United States Patent Application Publication US 2007/0054278 A1 - sequence listing, part 67

SEQ ID NO: 95683 - DNA, 147117 bp, Homo sapiens
  misc_feature (1)...(147117): n = A,T,C or G
aaaggggaccatctttcggtgggaaaggcaggcaggagggcaggaaggtggcaaaggcagacaggtggacagaagaccttgtctttgtaaattgctgtcttgctatgaggaaggcagatggaggggcagtgtgtccactgcgttttaggattcttcttttcaatcaataatcctcattattttaaaaagggatattttggtttccttcgtgtgtaaaaactgtatccatctccaagctcaggaaaggaacaatttacagtcaccctcccaggctgctcctgactgtttttgtgtgtcccagttggcttttcacttcctctcacctatcccagcatatctactttaaagactgttaatctaggctggcggtggtggctcacacctgtaatcatggtactttgggaggtcagggaaggaggatcacttgaggctagtttgagaccagtctgggcaacatactaagaccctgtctctagaaaaaaaatattaaaaagttagccaggcatggtggtacctgcgtgtagtcccagctactcaggaggctgaggcgggaggattgcttgagtctgggatgggaggttgaggctgcagtgagctatgatctcaccactgtaccccagcctgggccacagagcaagaccctgtctgaaaacataaaaatataaaagattgtattaattgtcatcatcatttatataaaatgcaaagcatgcctgatacatggtaggaagacaataaacactatttacatgtttttcccccttgaacatgttccctttttctgctgagtcacattattttttgactgattgcggaggggggcccccaatgcaaaattagtaactctggcagctttctctatgtcttccttttcctaacttttccataaaaccattcctccaaagccttcacatggtcacagtggccttattgtctctgattaatcacagttgaaactggctatctagaaagaatgactagctgtcttaatactctaatggaaatctgagtcagtacactactcctgttttttaaaatgtcttctcttcccttgtggaatgaaaggaatttacacattacacataatgagaacaaggtatttttatttatgcttttatttcaataggtttttgggaaacaggtggtgtttggttacatgagtcagttctctggtggtgatttgtgagattttggtgcacccatcacacccgagcagtatacactgaaccctatttgtagtcttatcactcacccccttctcaccctttccccctgagtccccaaagtccattgcatcattcttatgcctttgcatcctcatagcttagctcccacttatgagtgagaacatacaatgtttgattttccatttctgagttacttcacttagaataatagtctccaatcccatccaggttgctgtgaatgccattaattcattcctttttatggctgtgtagtattccatcatatatatatatgtgtgtgtgtgtatatatatatacatatatacgtatatatatattatatatgtatatatacatatatatacgtatatatacatatatacgtatatatatatattatatatgtatatatatacatatatatacgtatatatgtatatatacacgtatatatgtatacgtatatatgtgtatatatatacacatatatatacacacacacacacacacacatatatatatatatatatacacaccacagtttctttatccactcgttgattgatgggcatttgggctggttccacatttttgcaattgctaattgtgttgctgtaaacatgagtgtgcaagtatcttttttgtataatgacttctttagctctgggtagatacccaggagtgagaacaaggtgttttggaggcagacaaaccagggttccattcaatgctccccctctggtattcaacttcttcaaatcctggataaatgtggggaccctctaagcctcacttcttgtgcaatggggagaaaaacattaccatctaatatggggtgagaaaggagtgatgcagttgtggatttagggctcctgatgaatgatacctccagtggagactggcctggattggaatctttcctgttatccctggaacccctctacctatccccacctgttctctaccctggaagaagcccaggatgaacggcatccataggctgtcttgccttttctgttgtcctggttgtttctggccaaggaaagtcaacaaatgaaagggaaaggagaacaaggttggggttttcatctcctctgttccctcctgcagggttgcccaggattgcaccctgcactcctcaaaggtcatcacaagctctgggatcactccttcgcctttgggcctgagtggtaccagcctcagggatgagccgtcttcctcctcttcctgtccacactgctgttagctgtcttttcagtaaattctcctctcattgtcctatattccatgtgtctcttcttttctgctgggaccatgtgaccaatgctaggtcctgcttggcacccccagggaaatgacagcctattcacagaccacagggctgtccacagcagaggaaccagagggctaattaggagctcatgtgcatagcaaacatattggaatgtgttgctcctccaagctggtcagagacatttgccatagtcactgagtcatcagtggggttatctgccttgcaacctaacagtgatacaactgacatcttaagagatggagcagacatgcacctgcaccccctttttatcaacatgatggtgaataagtgacatgtggcttccaatagatgcagaatagcaggatgctacatcaagggctgtgattctctagtctttagggggtctcccaggaaattttattttatataaaaatcaaacttcaacagggctgcaactccattggtccaaaagtctccccggttggtatcaaataaaaaaacaacaaatgcagacttagtaaggagggacttttattcaaaaagcttaatgcaagagggaaaacactctaggtctgcaagcctctcaaaggctaggggcaaaaatggtttttcttttatggagaagagtaaacaaggctagaaaacataacaggcactgaccttgaatttaagggtggcctgattagacagtagatgagaaaacatttgctctgaggccagactgttcccaggaggaagtgcctgctcactcagactgaggatgggcccatgttcagggttctgggggaaagagggaaactgatccaacatttgactagggaggacaagtggctcagctaacttataactgtttataagacaaagaattaggatttagagggtctgtctctgtcctattagacaagggacatctgtgagtcttttctcagtcatatggggaagggggttctttgcaataagccattttccagaacacaaggtgtgggaggatgttaaggagtattcagtagcacttgataaagcacagtaaggaagactttattcaggaccatcgcaacaggtgcagggaccacagcaatggggacttgcagtgggggagaaagattgggctcagatctgaatacagcatgggaaagtggggattcatagccacggaatagggtgcccatcagtggatggaaaactactaagaggaaacaccaagggccagcgagattcctcctaaccgacctagcaggattctagcataaggccaaccaggtgaccacacatcccctgggggtggtggaggctgaggagcctgatccctgatcagatactgaggttgaacagatggagggggggtccagtagggtgttcttgctaaattgacttaacaggcttcttgctaaaactggattttacaagcaagtgcacagatgggcctagaagaaggttgaaggtccccagaggtcagacagctatgatataagaggttttgagcatttgcatcacataccacattttctaggcactaaagagaaggtaacaaggctttagcttttagaggcctccacatgatcaacaccttccctcctgagcatgtcggccccctatggccatgcacttgccagcagcctctctatggcaactttttgcctttttattaaaattgctcgggcgtatgagagccagttctagtcccaatagtatgcccatctcatccaacctcttactgcttcggaggtttgttttgactcttgtttggttttcctaaggaatctggttgaaagagagaagagagaaaaatatttttcaaatcaaatttctgccccaggtatttgtagagcaaagccgctgcttcaccaggctagagtcccttccccagggcccagtaagactttcatgggccatgaaggcaaaacatattaaatatgttttaatatgaaaatatattatgtaaaaacataaaacattaacatttgtattttacaactatattggtgcaaataccaatatgatcttcaatccccaatgttcattttcttctgattataacacaaattaaaacattttgtgagcccctaaaaaggccttagagtgtgtgcctgttgggtaacaatctggcctttccccactctcagatcatggaggttgggactgttttgtgtcttattcctctctgcatttctcagcctctctcttgaactaagaagggagttgatgaatctttgcagaactggaacttgtattccccattgcttgacatcaagctggaagtgtagtaaacattccccacattgttgaattgaatcacattagaaagcagggtattagcgcacagcatttttaattgccaaggaaaattttattttaactttgcattaatatgttctaaggaacctttatacttgatgcaatcagattcctgagagaagccaatacttttcctgtttttgtgttttatcctccattcttcatcgtatgcccttcaaggaaatctgaaaagttggcttttttgaatcattagtcacattgatatgtagactgcaattttgcttttcctgcgggattgctgaccttgtaaaatgatgcttatgtatgcgtcactaatctatgtgcttaacttttaacatctatgtaatgctaagaatatagacatcgcctgggggcaggtggaggttgaggaaccctatagagaatgatctgatatcatgtgtgatcagatagtgagggtgagggcttcttgcaaaaactggattttacaaagaagtgcacagataatcttagaacaagattcaggagactgggttatatttggtcaaggaaggaatctttgtcaagggatttcttaacctttgctgttttccaagatcaaagggttcgggtggaatgcgacaatgtcggtggtatttcaacttagcaacctctttttttgttttgtcatggttgctgagctgaaagggagaaaatattcaagggatccaccaagaaaatgctcacttaggctggaacagcatataataagagatatgttgtggttataagatcaacgattgccaaaaagctcacttgagggtctctcaggctgacaccacttgtcacttagcagcatgatgcaacctggctctgcagttagcaaacctgggctttccaaaagctaaaaccacctcagcacaggtgcagcttttatagaccttaaaataaagcttactcttataagaatagcttaaactatctttaggaaagaaatgcctggtcattgacccagactgaagacaggtataagagaggggggaaaatcccttaaactcccgttcagtctcttatctgaccatctcattctctatggcccatgtcactggcctgttcctgctgtaagtttcataacactgctgctagcataaaccgcttgggtatcagattgtgtctgcatttatctttgacacaaatcataccgaaggggagaagttgccccttctgaagaatccggtttaccaggatcacctgaaactcccaaaagaatgcagcaactaggcaaagagtgtctccgcctcacattatctgcccaagcacagtgctgttggccaagcctccagcagctgacgggacccagctgtagtgaggttgcagtgattgagtaggattggcctgcttcaaagcagaggtttctcatgggaatatgcttattaaactcccactggtgcagaaaccatgaacagaggatgaacaagtgaagttgcaatctcctccatcacagctcagttccccaacaacaggatcacaagctggagatgcctttaaggtaagcgtctattcccctggccaggctgggagtttttaaccctgaaacatactagttgggatgttcacagcagctacctgcttgtgttgcatattctcccaacatgtgttgtcttgttcttgtttcttaaatctgtttttgcttggtaatttccattgattataatgattttctgtgaggcttagcgagggaacattttaggagaggttataaatgcggctaattagtgacatgcaaatcgcttttgtggctgtttcaaaacatctaaatgacctataattaaattttgttgccaaattatttgttaattatcatcttcctatcaagtttattgcatcrggagatgtcattcactgtctaaaaggtggagtgaggaagagcatcatgcatatgtgttgcagagtgggaaagaatgcttgttttgttgggtttctgtctccattggtgtgtttttattttttgttcccacttctatgtatctcagatgacgagtttgtctatgggctgtcggaatcttctggttgagaaagatggtgggagccactttgtttaaatttcctaattttccataaacgaatcccttctgcaatatccccgacagatgcggcttttcaccctccacccaattccctcatgggaggaagggactttgagaggctgatcatttcgtggtctggcagcacttgtaagtccctggttctgttctggacactgtcccagctgtggcttctgagacaatggctaaatcctttctctcttttacagaccaccattcgagcacacttaagtgcaactcgaatgccattttccgctctgggtgaaatgttaccgattcctaagaaatcctggatgtcagatttttttttttttttttttttttgagatggagtctcgctctgtctcccaggctgcagtgcagtggcgcgatctcggctcactgcaagctccacctcccgggttcacgccattctcctgcctcagcctcccgagtagctggggctacaggagcccgccaccacgcccggctactttttttgtatttttagtagagacggggtttcacgtgttagtcaggatggtctcgatctcctgatctcgtgatccgcccgcctcggcctcccaaagtgttgggattacaggcgtgagccactgcgcctggccatcagatggtttttatacccttaagcatcctgatcactctcccttgatatgccactgaatctccatccctcttaaatcgcagggatctgcactgaaaaatattccgactctggtctgacttcgtgtaaacagctgagtggaactcatcttccttgtcccaaaagcatcttcttcttaacgtacaccaaactagtattaacttcagtcttctcagtcattcccttccccaactgacaaaacttgctttgtagttgtctaaagtcttcttcgtaggagctgcaagtaggtcacgtctgaatattggcatctttgtgtcattgattacgtttcttaaataagaagattatgtgttttccccattgcatttaattttgtgacttccatcttttgttccacttctcaaggtcttttctgaatctctgttctcttctgacgcacatgccattccccatgttggataaatattctgatagtcgattcatacaaatcattgatgtaaattatggaatagtgcagagctgtatagcacaggctcagtaacctctctggttcggtacaaagctttaatcagcacccttgtggagcgtttgtttagctagttacaacttttagatgctgtaacacatgattttctaattctaagctagatggctattcattctattgctgatattactggaaggaggaagtctggtagcattacctcaaaagacaggaggccaatgtcgttcccagagagctcaagatggcaccaaaagttcacggtttagcttcctaagtgcacaggaaccatctttaggaatatgaattcaggaatcttatgtcagacaaattttgcattgactagtctaactaaaagaaagataattaatatcttctttgtttatttaaaaataacatggttgtttataaagtgacatcaaaccatgtgcgcctctaggcagtaaatgtttatcggtggacattcacctaatatacacagcatactctctggctatattgggcatcttttgtttgcatttgcataagcactgttatagactgcttctgactccccaaaattcatatgttgaaaccccaacccccaaaatgatggtatttggcggtggggcttttgggaggtgaagaggttctgaaggtggaaactcatgaatgggactagtttcccatagtgattataaaagaggccccagagagtccccttgcttgttccaccatgtgaggacacatcaggaaggcaccatctatgaaccaggaagcaagtcctcactaaatactggatctcttggtgccttgttcttgcacttccaagaacagatgtgttgttccaggactgtgagcaatatatttctgttgtttataagccacttcgtctatcgtactttggcataacagccaaacagaccaatgcaagaaccattttaataaacaaggaattgtcattggctaattaagtagaattgtgtaatcatgttgtttgaatttggatcttgttggtttattgttgccataactgtctgtctgcaagtaacaataagcttgaagcctaagcaaacttaacatatgaaaatctgtgtcaagggcatctctgctttataaaagacagtcttcaattaggacccctccccagtgggattgagcacaaaaacagctatttgtgagaaaggatgccctcagctgcaaaaaaaaaaaaaaaaaaaaaaagatgttttcagtctttttcaaaattatgtttaaagacaactatcatcattaagttttttgctctatctagactttgcaatgttttccatctcagaacagaaactactgccctaaatattcaattaatattaaatggccctataggaatttatgtctaagagatagcattcattatctgtattttttcctattgctttttaggcatttatttatttttatatatttagggggtacaagtataattttgttacagggatatattgtgtagcagtagtctggacttttagtgtacccatcatccaaatagtgaactttgtacccattaagtaatttttcaaccctcactcctatctcactgcccaccttttatactctccaatgtctattattccaattagtatatccatgtctatccattatttagcacccacttataagtgacaatatgcagtatttgactttctgagttatttcagtaatgataatgacctttagttccctccattttgttgcaaaagacatgaattcattcttttatatgactgagaagtattccacggaatatatatataccacttttttttatccaatcctctgttgatggacacttaggttgattccatatctttggtattgtgactagtgctgagattaatgtacaagtgcaggtatctttttaatacaatgatgtctttccctttgggttcatacccggtagtgggattgctggatcaaatggtagttctatttaattctttgagaaatctccataccgttttccatagaggttatattaatttacattcccaccaacagtgtgtaagtgttccattttctctgcattcttgacaacatctgttgtttttagactttttaatatagcccttctgatggtggaagatggtacctcattgtggttttgatttgcatttctccgatgattagtggtcttgcacatttttgttttcatatgtttgttgggtgcttatatgtcttcttttggaaaatgtctgtttgtgtcatttgactcctttttaatggggttatttgtttttgtttttttttctcattgagttgtttgagttccttgtggattctagatattagcactttgtcagatgcatagtttgcaattttttttccattctgtaggttgtctatttactctgttgattgtttcttttgctgtgcagaagctttttagtttaagtcctgtttacctaattttgtttttgttgcatttgcttttgaggacttggtcatgaagtaaagccaagagtgaattagatatatttttttaagtttatggaaaccagcagaagacatagactacatagacattcatttttttttcactttcctcatcatggaaatattctgagacatgaaacatcactgtgacccaaggagaggcattggcgagagttagttgaaagagaaggagaaaggaaaagagtggaatatcattcactaaacacctcccatctgccttggaagttgggtgcacttcatctcttttaaaaatggagataatgggacatggaagcttggagtgataaagccaatatttgaaaaggggacgagttgactttatgatctgatcttttcacttaaagctctcagttcttcaatgagaaaagtaggtgtcctggacattattttatactagccaagttctgacttgagcaggaattaaaatgtaatggtttcaaagcactggataattcatcaaccagtagcactaagcacaggggtagggttagtccctcctcataccaattttatggctgtcattagagttaagcatttaacctccctggacttcagtcccttcacttgtgcaatggactgactgtttatttcccccccaaattcatatattttaattctaacccccaagatgatggtatttggatgaggggcctttggaatgtgattaatcatgaggggtttgtcctgaaaaatgggattagtacccatataaaagagaccccagagagctccctcattccttccaccatatgagaacatggggagaaggcactgtctatgaaacaggaagcaggtcctcaccagcacagaatctgcaataccttagtcttggacttccagcctgcagagctgtgacaataaatttctgttgcttataagctacccaatctgttgcattccacgatagcagcccaaatagactaagacaatctgtaaaataagggtattcaccacccatgaggtctcatagaaccttctgggtctaatcgtctgtggttctcaaagccttccccatttgaaggttgatgtttcctacttggtggaacatttctcttgcttccaactttattttgctctttctggcttccttggctgaattctctcttccctgtaattttctctgcatggcacttgcagtttcaccagtgggctatggaagatgtctttcaaagcctctggctaaggtgtaagaacagctggggtcctcattgggaagccgattaaactttaaaacagtaggctgaggtctagaactgttccaggaggtgagatgacagcaattgtccctgtgttcataccctctggttaatgtgactcccagctatgaatcaacctttatataaatgcattttggctcactggactgaatgtagctcggattcaataatagaaaatgtgtgggaggagacagtgagaaccccgaagccagaatggtctgatgttgtttcttgtgctggaggtccccaggttcagcgattcaccagaaggactaacaggctcagtgcatagtggggctcatggctaagatgtatttcagcaaaaaaattcagaacacattgaacaaagggaaacggcacatggggtaaaggctggcagaatccaggcataagcttccaggtatgtctctgaaaggagtcacacgggacatacttaactcctccagcagtgagctgtcaacacatatgaagtgttgcctacaagggaagctggttagagactcagtgcccaggttttttattgggagctgttcatataggtgccctttgcctagtactaccaaaattgcagactcccagacagaaagcaggtgttcagcataaactatgttgtttgtacaagcatttcaggcagagtgagccattcttgttaattctgggaagggtgagaaccctccccaaatctaattcccaattgccaaccaagagcacatgttacaagcaggcctttctaaggagagcaatctcaggtcctctatgttaacttctttctgcatatttctaaagtgttttatatttattatctttttaaggaaacaaactctgtcaccatgaagtcctagatgcatcccggaatgtaaaagctagaggagaatgttggatgtagcccatgacttcattttatagataagaaagccaattctcttctttttctcttttcttatttttagtatatttttatgagatataattttcctacagtaaaatgcacagatcttcaatgttccgtttaagttttgataattttatacaaacatataatcactgtcccaaacaaaatatatagagcatgtccattatcatctcagaacgttcctgttgcccctctctaatcaataccccagccagagacaaacacttttcagagttctatcaccacagacaatttttgccttttcttggactgcatatgaatggattcaagccatatagattatttggggtctcacctctttcactcaacataatgtgtgtgagattcttatgtgttgttgcatgtatcagtggttcatttattttcatggctgagtagtcttaggttagattgatgttccagagtttgtttatgcattctcctgttgatagttatttggattgtctccagtttttggttattgtgactaaggctttgggtggatagatagttttatttctcttgtttaaacatcragtagtgtaattgcttgacagtaagatacatgtatattcaattgtataggaaatggccaaacttttctctaaaacgtttgcatgagtttacacttcaacaagtgatatataagagttctaggggccaggaacggtggctcatgcctgcaatcccagcactttgagaggctgaggtggaaggattgcttgagcccaggagtttgagaccagcctgggcaacatggtaagacctcatctctacaaaaataaaaaaattagccagggtggtggctaatttgcctctagtcctaactacttgggaggctgaggtgggaggattgcttcaacccaggaggtcaatgctgcagtgagctttgttcgtgctactgcactccagcctgggtgacagagcatgaccctgtctcaagaaaaaaacttagagttccacttgttctgcatcttcactagcatttgatattttccgtttttcgttgttttgttttgtttttattttagccaccgtaggggttgtaaaatgctatctcatggtggtaattttcacttctctgattactaatcaggctgaatacctatttatttgcttattagccttttgtatatcttcttgtataaagtgcatattcaattgttttacccatttcattgtttcattccttttttattattgatttgttctttacatattctggatataaatcctttaaaaaataattgtcttacaaataagtttccctggtctatgttgcttatctatattcctttttccttaatttttaaaaaattgaatgttactttgaattattttatctcatgtatcctctcaatagtcccactctcttcacttgatgataaattagaagcatctaaaaaaaccaatcattccccaaaaagtaaattaaaacctttctatagccattgttcagttctagttactctattagccttgttcaaatcgttgtttttttttttttttataaaagcaagctttattttgctatctgatgagacaatatgctagtttgagagtttggaataaaaaacatggatatttgtattattaaggaaagtttccaagcacatagttattaaggaaagcacatattattaggccaagtttccaagcaaaagtcttagaatagacataaagatgtgaaataatgaacggtgaccttagtatttgccattgtcattgttccatgcaatatgtttaaaaaatgtttttatttgatagtgataagaatactatcagatctaacctcttaaaattttaagtgtgcaatacagtattgtcgactgctgatacaatgtttgactgcaggtctctggacttaatccatcttgcttacctaaagttttatgcctgctgactcataaatccccattttcccttcccctatcccctggaaaccaccactttactttttggtcgtatgaatttagctactttagatacctcctgtaagtggaatcatacagaatttgtctttctgtacctggcttatttcacttaacataaggttctcaaggttcatccatgctgttgcatattgtagaatatccttccttttaaggctgcatagtattccattgtatgtatagaccatgtttttttttgtttttaatccattcatttgttgatgggcatttaggttgcttccatatcttggctatggtgaatagtactgcagtgagcagaggagtgcagatatgtctttgagatcctgatttcaatgctgttgggtatatttccaggagtggggttgctagatcacaaggtagttccattttttaatttgtcaaggaaattctgtactgtttttcrtagcaacagcacctttttgcatttccaccagccatgtgcaaagaaattctccacatccccactaacacttgtctcttgttttttgtttttttaagagcagctgttctgacaggtgtggagtgatctctcattgtgtgtgggtttgagttgcattttcctgatgattggtgatgttgagcatcttttcatgtgcttcttggcatttgtatgtgttcttcggagaaatgtctagtgaagtcctttggccattttttaattgggttatttgtagttttgttattgagtttgggagttcattatatatttgggatatatggttatcagtatatggtttggaaatactttctccccttccataggttgccttttcactccattatttcctttgctgcacagaagcttgttagtttgacgtagtcccacttgtctrtttttgcttctatggcctgaagcctattcacattcttaaaagtatcttttgatgaatagaaatagttgcttcattttaccttttactctttacattttaatttggataattttcttgacctgtcttcaaggtctctgattcttttctttgcccatgacatgaacttcttatttctgatgttacatctattttgttttatagctagcatttctgtttgtttcttcttttgtattttcatcttgccactgaaattccccatctcttaacacatgctgtttgcctttcctgctagattcttttatggatttcctatggatgtcttaaaggatatagatgaaatatctaacatttgcatacctcctgctatttcacatgtcatacgtgcaaacataaatatgcatgcataatagacattgattataaaaaatagtggagaccgagtcagtcatattttcgcctagaaaacatcacacgcttcatctgtgtggccccttggtaagctgccatttcagtgtggttgtgatttgtttggttttaattaggttccgctcacccccttggcttcagatgctttgagaggggatccacactttccctttagcagagcttaggatctgagcattggtgagactcttaagtcatgctctgtttgcagcctgactgctcacttgttgggtttttgaagggtcctctttgttttctgtcttgccctggatttggtcattccaaattcccatcctagctggggaacagggacaggtgtgtggctgcccatggggaagattcggagtgccttggaggggtgcatctgagcttccctgcactgcctcactctgagttttttttgcactgtgtggtgtacgattccccagggggcttcatgaagactgcaggagtgcattgaagggttggctgcaggtgggctgtctggctggacctcatcaggatgctgatctgccgtgccagcctacctacacccagtcgttaaaaactcctttcagggtcagctggattcttcctcttctccctactsctgctaccaggggtgaaagcaactgaaggtttcttctttgtaggaaggttcatcacatcctggattctagttcatttatgttttttctgcatcttcagccttttttttgtcggggggcggggggacagggttttgctgtgttgcccaggctgcagtgcactggtgtgatcatggttcactgcagccttgcaccccggggctcaagagatcctccgacctcagccttctgagtagctgggactacaggcatgtgccaccatgcctggctaatttatttatttatttatttatttgtagagatggggtctttctatgttgcgcaggctggtctcaaactcctggcctcaagcagtcctctcgctttggccccccaaagtgctgggattacagacatgagccaccaccaggtccatcctcagctttttgatggatcttaaaaagccatgattttaattggaagcctcataaatcactgttgggaatgtgaagtggttcaaccactctagaaaacattctggtagttccttcataatttaaacctagaatttccatatgacccagccattccactcctaggtatgtacccaaaagaattgaaaatgggtgtgaatgttcatagcggcattattcatgatttccctaaagtgaaagcaacccagacatgtgtcagctgaggaatggataaataaaatgtggcacagccatgcaatgcaatattatgtgggcattgtattggtccactctcacactgctataaagaaatacctgagactggataatttataaaggaaagaggtttaattgactcacagttccgcatggctgggaaggcctcaggaaacttacaatcatggcagaaggggaagcaggcacatcttacatggtggcagatgagagaagagcaagtgaaggaggaagagccccttacaaaaccatgagatctcatgagagctcactatcacaagaacagcatgggggaaactgcccttatgatccaatcacctcccaccaagtctctccctcaacacctggggattataattcaagatgagatatgggtggggacacaaagcctaaccatattaggcataaaaggaacaaagtacttttggtaacactgtagtatgtttatgccgatattatcaggtgggtgagcctagaaaacatcatgctaagtgacagaagccagatacaaaaggcctgattattttccatatgacccagccattccactcttaggtatgtacccaaaagaattgaaaacaggtgtgaatgctcatagtggcattattcatgattttcctaaagtgaaagcaacccagacatggtgcatgattccattcatatgaaatgtccagaataggcagatccgtagagagaaagctaattagtggttctcaggagctgggagagaggaatgaggagtgaccactgacaggcacagggatctccgtttaggggtgatgaaaatgttctggaatgagatacacctgacagttgtacaacattgttgtacaattaaattgatgtactaaatgccactgagttgtacacttaaagtgctttaaacggtgaagttgatattacgtggttttataataatttaaaaagaaactatgagttcaaggcttcatggcttctttaccttgtcaatgtgtgttcactggtccctttggctttccacgtcttaattagtgtggagtcctaattagggagagaggtcaggctagggggatggagggaaagtagaaagagaaggcaggtaagttataagtctccctttcttcatgctccagaacagatagccctcctgtgcaaataactcacagtctgcctacacccagctatctccagacccttggctgatagaaaattgcaagttatctcactgcaaccttggcattatcggtactgcacaaagccctcttcagcacacagcacaagcaccatcctataaaatccccagcaagtctttgtctctttgcagtcagctcttctctcactgacctgcctgttgcacgcttgcaacgtattttcatactctctctaataaatctgctttttttttttttttttcttaacctacaactgtcttggtaaattctttttattcctgcaccaccgaccgcagatagtcgccactcacccatgacaattagcagttaaagctgactgctcttttcatagcctataactttaartttgtttttttctgtaaacattttcaactggccacatatgtcttgagtagacagaggctaattgtcagctyttgctttctgggttgttctattagggtgctatggcatagggtcctattaggatcctatggcaaagagcaacagtgagggtaagtggaaatttttaggaaaacttgaccacatctggggtaacaaattaaggcccaggggccaggagtttggtagaagcagcgtgaatcagaagctctgggggaaatggagtsgtccccaaaagcaggcaccagctgcaggtgcatgagtgaggagggagggatggtgcatttatacactgcattagggctagcgaaacctttatacagtgcattagcgttagcaaaaggcacttataggactttatcccctttattttttttaaccaccttgagaaatagagaatgggtttagagaaggcagagtgacatgcattttgttctgttgcaatttgggtattcttatgccttagtttgtctctgatatcttttarccaaggggaagaggctggcaaggtttccattaaaatttattttcacctttacttataccaatttggtagatatagcaggcgagcagtttcctaccttgaacaggggcatgagaagaatgtatctgcttttgctgcagacagcccaggtctggagaccctgcgattgggaaggctggttccactgggtagaagcactattgtgaatagtgatgtagtaaaaaagggagtgcaggtggtatggtttggctgtgtccccaccacaaatctcatcttgaattgtaatccaaattataatccccacatgttgggagagggacctcatgggaggtgaccggatcatgggggtggtccccccatgctgytctcatcgtagtgactgagttctcacaagatctgatggttttataaggggcttccccccacttcgttctgcacttctctctcctgtcgccatgcaaagaaggtctctccttcgccatcaccttccgccatgattgtgactttcctgagacctccccagccatgtggaactgtgagccagttaaacctctttcctttataaagtacttggtctcagatatttctttttttcttttttttttttttttttttgagatggagtctcacttcttcgcccaggctggagtgtaatggcgcgatcttggctcactgcaacctctgcctccagggttcaagcaattctcctgcctcagcctcccaagcagctgggattataggcatgtgccagcatgcctggctagtttttgtatttttagtagagatggggtttcaccatgttggccaggctggtcttgaactcctgacctcaagtgatctgcctgcctcgacctcacaaagatatttcttacagcagtaagaaaatggactaatatagcaggtcttcctttggcacattgatatatttccctttagataaatactcattagtgggcttgctggatcatatggcagttctagttttagttttttgagaagtctccatacggttttttataatggctgtactagtttacatttccacctgcgcaggtcacctgctggtcatctaattaccaaagcaatttttacaaaattcctctacatctttttatttatagataatcacagctgtatgcaccaatttatgatccctgaaaaaagagcagcaattatgagacagcttgttcaggggaaggagctcagtgtacaggttagggcctcccatcgctgtcttcctatgtcagatgcccgggctgattaccatgtctatgaaatacctctttaacacagagggttaactagcttgctgcagtgggaggtaagaataacaacagcctggccatccactgatcctggaaaatgctcatccacagagcagctgagccaagatggtttgagctatctttgtcttgtttcctcatctggttgttaaatcccagaggccctctgatattgacagcgcagatgctgatatatattaaatgtgtggaagcacttcatgccatccccaaatcccttgctttttcttctcctcaaacttgtgtgtattttattttctctccttttacatctrctgcccatggttttgttctgcctgatttcccctgtaacataacccctggttaccaaatgctggaaagtcagataagatgggaatgctctatggcgtttcatccaggggatcctggaaaatgcaaatatacaaaacctatcatgaccaaagcttcctgtgaggtccctggaaaaactctgtgcacagagatgccctcagggggcagaataacactttattattttctccactactggtcctcaaagaactctcacaggagactgaattctgcccagagctcctttcctgcatgtcccagacatccaccatcatttcctcctaagtccagactgactgactgactctgttgccgacatgcaaggaaagggacttctcttggtttaacaggaaaggaaatagagggacagagcaaataaaagggtggtggagctgtagggctgggacagagactatatgggagagtagatgttggacaaggagggaaaattgacactccagtcagaggcagctctggcctcttagctcactgtcattcttaaggcagtctctgggaaccttggcttctttagaacactctacctctgaaatctgtgacctaacccatgacttcaaacttgagcatcctttaggcacttggaggatgtaaagactatcctcatcctcatggagagtttattgttcttgaatctgatccttttacaggagaaagaagaagtcttaggctcaccctctgttaagtacaaaagtttcaatatatgtttctagacgtgttttttttcttacaaaatccttctataattcactattaccaatgaagagatcatttaaacatagccttctcaaccttttcttcaaatcccaccatcatgaaccatttgtccactgttctacagtgccaagaactctccaaatatggtggcctcttaacatgccagagaggaatgttttcagactccccagattgtttaggaccgctatgggacacagtcctctccatcaaatttggtaccttgtaaataaatgaaaatattaggtaagctgtgatgagtggttcatagcaaagcatttggatttggaggttgggtagaggtcttagatctgagcaagagagaaatggctccttccacatggtaactttatggtgagcaccatttatatcttgcctcagggagagcacacatattacacataatgggccttctggatctcattagagaggttaaaaccaaaattgcaacagaggtatcctgcctatgatggcactcaaatgtatcccaagtctgtacatttgctaaactaacagggatgaggagcttacaccaaggtaacattaattccagttgccttggtctgtggtatgcacttgtgtttgaaaccttgaaccttcttcagaaaaactgtttgaaaaatatttagttagccgggtccattggttcacgcctgtaatctcagcactttgaggggctaaagtgggagaatcatgagcccaggagttcaggaccagcctgggcaacatgacaagatcccatctttacaaaaattttttaaaaattggccagacagacacagtggcttgtgcctatggtctcagctacttgggtgggaggattgcttgagtccagaaggttgaggctgcagtgagctgtgatcatgccactgcattctagcctgggaaacactgagaccctgtctcaaataaaaattagtcttctgaaaaacatagggaaattaaaggaaattgaagtcctagcagagatatccaatgttggttattacacacttgtgtatgtgaatgtgctctttttattttctggttccttttaccttgttttatacataacctttagataagctttgaattagacaaaacatgttcactttgtttttaacaagaatgtttttctacaatatatatttattggaaaatacccaaataaagaaatacctattatttaatttaatataactttatattctaaattatgaccaatttaactacaagtatttatcctattacatttatctattttattttgtttacctagattatttatgaaaactgtgatagttatgatttaaagttataaaacccccattgcaaaattataactgagacagtgaaaaaagatttgacctaactgactccatcttgctctgaacctccaggctgtccttgttcattcctgggcataggtcaaactaactttgggaggaacttagtttatagattagctttgaaacagagatgataacagtcctttcccaaaacaaacctccttactgcctgtggactagactgcctaaagccacgagattagaagttatggtaattttactaaataattaaagatgtagctattttcattaaaccaatatcaatgtcttatttattaaaaattacacaagcaaaggtcgttctgttttgggctgggtttttagttttgtaacccctatgccaaaatttgacaccttatagtatttggcagggataagtatgacattgcttaattaataaatgcaaacaatgcatgctgacaattcttaagaaatttctaatattacttaccaataattttaaagctaacttatttattaaaggttttaagttatataaacttgaaaaagcatttgactagtccttttttcctgataaagtatttaagtgtttttatttttctttaagccaattaattagagctcttttatatatttttagtagtgaaacattgtgtacacaacgcataaatacatagatgcattaggtatgcgaatgaaagtacattttgtagatccataaagaccatccttttttttttttctatcttagactttcagattcttgataacctgttttacaaccttaggtggttgtcagctaaatagccttaaaattgcatgttaaaggaaaccactcaagtaaaaatcaaacagcaaatttacatcataaggcagagagagaaaagatctggtgttgctagagggagatccttttatttttctttgagcagatcaaacgtaaaattacacatatctattatgtgattgcataaggacaccaattttgtttagataaggactatctatcttttaactagatttctgaactctggccagaacccccccaaaaaccaaagatttgctcaaaaaaaaaaaaaaagacaagttcttaggagagaaaaacaaaacaacaaaacacgaaggccttttaaatacaaacatgcacacacacacaaacacacactttttgttgttgttgttagtagagacaggatttcaccatgttaaccaggctggtctcgaactcctggcctcaagtgatccacccacctcggcctcacaaagtgctgggattacaggtgtgaagtaccatgcctggcctcaacatagtattttaaagttcatctgtgtattgcatattgcaatatttcttcattttgtaaggttaacaatattgcaagaataatactgtaagaataatattgcattgtatgttgtgatggttaatttcatgcatcaacttgactgagctaaggaatgcccagataactagtaaagcattattactgagtgtgtctgtgagggtgtttgtggaagagattagcagttgcttatttttatttttatggatttaggagtacaagtgtggttgtgttacatgaatattttgtgtcatgaagtctgcacttttagtgtacccattgcccccatcatccaaataatatacattctacccaataagtagtattttctccttcaccccttcccacactcccatcttcaatagtcttcaatgtctgttattccactctgtctgtctgtgtgtactcattgtatatctctcccttataagtgagaacatgagattttttacttttgtttctgaatcatttcactagggaacattttctttgctgtggtaaagttcctgttatgtaagcacattgtttacatgtcttctgcagcaacatggatgaagtgtcctccagtttcatccatgttgctgcaaaagacatgagcccattcttttttatggctgagtagtattccatggtgtgtgtgtgtgtgtgtgtgtgtgtgtgtgtgtgtacacacaatgcgtggtdtagatagatagatagatagatagatagatagcacattgtttttatccagtcatcgttgatggacatttacattgattccatctccttagctccaggtagattcagagaaaaagcatcagattatagaagcataaacatcacagggttttagacatgataggagcctttttattgtacagctgtagaaacagggacctgcaaagactgggtgacatgtccaaatgttgacagctagttagcagcagcaacaggatggcagctaccatctctggatccattgctgattgtcctcccctccatctcatgatgcatcaactggagcaatgacagagaagggggaaaataaggggaaagccaggagtggtggctgacacctgtaatcccagctacataggaggccaaggtgggaggattccatgagtccaagagtttgtgataaacctggactacatagcgagaacccatctctacaaaaatttttttaaaaattagctaggtgtggtggtgcatgcccgtagtcctagctactcaggaggctaaggcaggattgcttgagctggggagttcaaggctgcagtgagctgtgatcgtaccactgtgctccaatctgggtgacagagtgagaccttgtctctaaaaattgtgtttttaatttaaaaaattaaaaaatcagcaggaaccaatagaatcttcacacatgcaacacttagtgtgtcttcactaagtgaagacttcagtgtaaagacttcaaatgtaaacaaacaggttaggcaaggcttacttttttaaacataatttttaattagtattttattaatactcaatgtatattataatgaattcaactatactaggtataattgattgtattgagaaatacaaagaccaacgcaccaggtactgttgtatagtcgatagaaacagattcgctaaatcaataaaacatgaacatttattttagaaaaatcacaagtgatttaaataggtatttaaatctatagaaaagtctgtttagacacaatttcagaatgggttttttctgtcctcatgtcagactatttttctttatcgatttaaaacaggacctttgttggataatagcactttgtgaatcaaatttcaccagtgtacataccttggattgaacgaagctgcttttcttctaaaaaatattgtttgtcgtgcaagtttttctctgtttttaataagccttcttccccatcgagcaaatagatcaggaacattttctttgctgtggttaaagtttctgttacgtaagcacattgttaattttcttctaatgaacaaatttaatataattacatctctagttataaaaatgttcctttgtctctctctttcctaatgatgctgttgtaggaatagctgctttctccacaaaaaaagtttttcgtgctcttttgccaaattaagtttgttcagaaaaataatttttaaagggaaaattatgcagtttttcagaagttaatgtgccatgttcttaatattttggagtggagcagctttatttaattttaagtacttttatgttaactgactctgtttcagttttttgaaacctctttatcaataccttcttgtaagccaggcttgtaggaaagaaaaagcaaagtccacttacttctgctggtaataatttatatacagtgggattctaagtggcttttttttttttttttgagaccgagtgtcactcactctgtcacccaggctggagtgttgtgtctcgatctcggctcactgcaacctccgcctcccaggctcaagcgattctcctgcctcagcctcccgagtagctgggactacaggcaagcaccaccacgcccggcagattttttgtacttttagtagagacacggtttcaccatgttgaccaggctggtctcaagtgatccacctgccttgacctcccaaattgctgagattacaggtgtgagccaccctgaccagccttaagtggctcttaacaaacttaaattttcacacattcttaattgggctagatggtatttctcatcctagtcctgataatatctacctccaggcacattttggaggtataatgaatgatatgctgagctaaccaaaatcattttgtgattcagagattaatataggcatgaaaaattattaatgggcttttatcctattgtgttcaatttcaataaaatggtctgcacctgaactaacccttttaccacaaagcatagaaaatggaaatgaatcttctccaaggagcgcgcgcgcacacacacacacacacacagatatgtatgtgtgtgtgtgtgtgtgtgtgtgtgtgtgtgtgtgtatrtatatatatataaaatggatcccttctatgatggcatcttggtgtggaacaaattcataatcttaatcctccagtatttttaattgttccctacccagctaatgggaccagtatctttccaaggaacaaggctgaagtcatcattgactgttgcctctttctgacacttcacatccaggcaattaccagctcatgttgattgtgtctcaaatcggctcagttctctccagttctctcccacctgcccctgtgctagtctggaccagcttccttggggggttatggccattgtcgtgcgatccactccagtttctgcccaacccttctgccagggagcaaccagaatgcctgcgggagtgaaacgaaaccatgcctgtcatccctagtgtcctcaatctctgcttcatcacttctggataaagataaatgccccaaacctaaaacaacagaaaggaaaaagataaatgccctccatgtctgatcacgatgatttatcctgacctcttctccacctcacagtcagacttttgcatggaaaaaataaccaaccaaccaatgcgcacagtttgtaggaatactgcaacatcagcaacttatacaataatgataaaaaacaaagaacatggagagaaacacacatattacctgagtggctctctgagtggctggttgatgtttctcttttgtacatttataatagtaaaaatacaacaaaacatttatttaaaaaaatcaatttttgtgtacaaaaatcacaaagcataatagtccaaagtaggtctctaaatagctaggtttttttggtgagattttagttagtcctcatatagagcctgaattttgctctatttaatctcttttttagccatttccctttggtctaccctaaatgcccttttctaattcaggtgctttcaactttcagttataaaacaaaaattcatttttacatggttgctgagcagagacatgtgtccttaaattgcttatataaattctgagactcattactaatgaaacatgttcttaaaataagttcaacatgacatttcagagccgctgtcctggggagcttttttctcgtcctcattgacaaaattgaccttctcacctcaagctattggagttatctactactgtgtaacaaattaccccaaaacttagcagcttaaagcaacttgcgtttgttatctcattgtttctgtaggtcaaaaatctgggcacagcttagctggatcctccttagcttctacgtctctttcaggctacttcaggtgtcatggctgtggtctcatctgtggtccaaaagtagcaggatctctttccaagctcattcagatagttgcaggcaggacttagttccttgcaggatgttcacctgaaagcctcatttttttttgctggctgttggctggacacttctctctttttcttataacatgggtctctccacaatggccacttacttcatccacagccagcaagcgatagagtttgccagcaagatagaggtcatagtcttttacaacccaatcacagaattgacatctcatcactttttccatatcctactcattggaagtaaatcactaggtccagcccatactcaacaggaggcgattgtatcagatgtgaataccagaagggaagtcactggggccacttttagttggctgaccacatttttgttcaaaactctattagtgtacttattatactctacataacattttattattattaatagttgtaattttaataataactttataagttaataataacttaatattattaaataactataatgaacaactatggcctcttactatgattcccttgctgaatcaataagtactaagaacccagaaggagagaccctgtctctataaaaaaaaaaaattaaaaattagctggtcatggtggtgtgcccttgtaatcccggctacttgggaggctgaggtggcaggattgcttgagcccgggaggttgaggctgcagtgagccgtgatcacgccactgcaytccagcctgggtgaaacagtgagaccctgtctcaaaataaataaattaattaataaaaataaaaaggtcctaagtgtgtagttttatcttcaaaataatacttgtaaggtattattattcctttcttacagaaaagaaaactaacaggctaaatatatagcttgtggtttcactgctagcaagtgggggagaaagaaagaaaacctcaacagcataaactgcagttctgactccactgcccaccttagtgggtttggtacttgtgcatttcctcatttgacctgtcagagtcttgcagggtgactgtgtgtctcatacaatcatagaaccaccataggactgctataatgtcatctttctgggttttgccctgtatttgtggaattgaaatagattcggttgaattctcagtgaattgctttccactggaaaggtgtagctagactaaaatgctcctaacaagttacatttgtctagcactttattattttggaaacctcttttggggttggatagggcagggtcttactctgtcgcccagagtggagtacagtggcgcaatcatagctcactgcagcctcaaactcctgggctcaggccatccttctgcctcagcctcctgattagctgggactacaggcatgtgccaccacacccagctaatttttacattctttgtagagatgggatcttgctatgttcctgcagctggtcttgaactcctgagctcaagcaatcctcctaccttagcctcccaaactgctgggattgcaggtgtaatctactgcatctggtcgcattttggaaaccttttatcgctagtatcctgagtaactcccccatggtcaaggtgacatcttagggtaatgtgcagaagagtgattcacaaggagaacatgccttctaaagcctcatggctggtggcctgagatgaggccagagctctgactcttatttctcctctcattctgctagttcttgacaagcagagaataaaagccagcaaaaagagaattaaggagagttaggaatgagagggtagctgtaacaaaaacaaacagagactatcacattccctgggttggttatctttcaggaagaatcgtggtgatctgcgtttgctttttatgaaaaggggagaccccgaaaagggagggaggtgagaggactattggaagtaggtcaggggagagagagagaattttatgtttcccaggctgggagctgtgtctcacgcctataatcccagcactttgggaggccgaggcaggtggatcacttgagatcaggagttcgagaccagcctggccaacatggcgaaacaccatttctactaacaacaacaaaaaaagattagccagctgaggtggcaggcacctgtaatcccagctaatcaggaggctaaggcaggataattgcttgaacccgggcggcagaggttgcagtgagtcgagatcacaccactacactccaacctgggcaacagagtgagactctgtctaagaaaaaaagaagaagagtatggctcccaatgactaatgtgtaggagtaaggattctttgactggggttcagacaggcaaggagcatgatgctgttgtgcagagtgtaactcctgataaaaatgtaaggtagcaaaagatttgccacatggacaaatgacaaaataagcaacttagaaggcatgagaagaaggaatgcttgcagcctaatgttttccttgaagagcctttttggagatggttgcctatgtgcattagaatttaagagcttccataatttgcggaagtatgttatacccgagaaacattgtctgttaacaccgaagatgtacttgtgggtgcaaatgagaaatttacacctactcaaatggtttggcatttccaaatcctttggtagatgccgatctgcctacatacaggagcagagggaatgaattgcaattctgttatgttcaggaggtgaaaattctacagatgatagggcgggtaacatgctagcactaagttggtggtttcagctggggacagttgtgttccccagaggacatttggcaatatctggaggacatttgttatttcacaactaggggagaacagagaagttggggacagcatcctgtcggggtttagtgggtagaggccagggatggtgctaagcatcttacaatgcacagaacagccccctccccaccaataaagactcatccagtccacatgtcaatagtgttgaggctgagaaacactattaacaaaatctgaggtccctaagtcaaatatcaactcatgataaaaacatgttctcatgttattttttcacacaggagaaattggttaagaagtaggtaaagcagttacagtgcttggtacatactaagcacccaaaaaactgttattttaaaataagaaaagttatgtatttatttcctgtatcaactgaaacatgaacctagtaatgaagtagagatgcagaacacagcctgctggctctggccttctctgatatgaatgctatatgttgcactcttatggggacaggaggttattaaactcactcttttgcaaattcctggtattagttatggatttgtaagccattaaatctacttagggacccctgatgctccaaccctgagcttttcgtgggcattattaatggtgttttcagttttcttaaaaacctctagtgtgtctcactcttcatatttaaagacggatgctaatttttgaatcttctctgtgccccgtaaaaccttccagccatttaaaaaaatagtgcatggccctgcttaatttcctctctggttgaactggcatgagggccttttaattaaacagaataaacatacatttttgatttaatgtggctttctttgatacttgctcaaccagcccctgctcacatggtgtctacagtctaattaggaaggggaacaatcatctgatctcagatttacaacccttctctgtcattatttattcatttgcctagtccacaaatcttgactatttaatgtgtgcgaagcatgagagaggatgctagggatatagccaggaggcatttagacttcttcctggctgcagaatgcttccagtgcagcagggaagattaaacgcaaaataactcaaactgcacttgcttgtatcatcagtgctgagaaagaaatgcacagtgataagaaaaggggaacttcctcccatgcaaggaatcttagagggtgtccctagataagtcacatgaaagctggggatgggggctgaagattggcctctccaaattatctctgccctcctctcattcttcagcctttccgcacctcactccaatatgaggtccattgttacaatcgtggtgttgaaggtaggagagttcaccttttattacacccacctagctatttaaacacaagcatgtagtacttgtatagatatatttgctcatatttgcaatttctctgtcacggatgtggggctggagcctggatttgccagccaaagagttaacagatgttgaacgcaatgaagaattgtctcaaaacagctgttccaagaaagggatagtgtttcgaataaaaagaacatttgttagagcacacatcatcttgagcctagccgtaaaaaaacccgttcacaagataagccattgttcgctctttgttaccaagtttgtgtttaaggagttaagatttgggagagactttttttttttttttttgagacagagtctcgctctgtcgctcaggctggagtgcagtgagacggagtctcgctctgtcgctcaggctggagtgcagtggcgcgatctcggctcactgcaagctctgcctcccaggttcgcgccattctcctgcctcagcctcccgagtagctgggattacaggtacccgccaccacacccggctaattttttttttttggatttttagtagagatggggtttcaccgtgttagccaggatggtctcgatctcctgacatcgtgatccgcccgcctcggcctcccaaagtgctgggattacaggcgtgagccaccgygcccggccctgggagagactttcaacttagctgcaggtcctgcccagcacagtgttcacagtctgcaaggaaggtagcagggtattgcatgggattttatgttaatgatgttcaggggatgataattctcacccgggaaggaaatgatccattagttacactctcagtctgtgtcttaggccagcatgaagccattacatatctttagctgcaaaataataattttatgatgagataaggggtagttttatttctggcctattttaaaagagagaagatgcaaggcctacgccagggactaaatcatttcacttcagactttgtatagaattcatgtcaaataaatgtcataaattataaataagacataagtgtgtcacataaaataattctatggtaatagttaatgacagagctaagctgaataaatatagcaaatatgtgtgtgtgtgtatgtgtgtgtgtgtgttttcatgtaaacattttcctctatcatagaaagtgaatgtgaccatcgaacacatccttgaattctaggattagtcccatggacttaagtctcccaaggagataaaagtgaagagacttaaaataaaacaaacaaaaaactcttttgccctatttatttgaataaataagagtaagatagtcaatcactcaatcactttgcaaagcttaggaatctaactgaataacaaaagtaccaactcaatgtagataaggagaattgagtggatcaggagagagagaggtgattgactatgattagtagtgtcatgtgtgaaggaagtacccccggactgccagtcacatagcttcccacatttactctgtcttctttaaaaaatatcacgcttctcaaaatacttcacattctaagagtgcagctgcacgaacatagagttgatgattgcatggaacaactgtataggatgttgtaagaaaatatacttctcttggagctaagagctatgtagttgacagtgacttctctctcattactggatgtctactctctcacaccagcttcctcttttgctgtaatagagtactattcaagcaggagaaatttttgtctccctttctcccagcaatggctggtagagtctggagacatctttggatctcataactgaggggagttatacatgctactggcatgtagtgggtagaggcttgagatgtgctgaatatcctgcaatgcacaggacaggcccctacactaacaaatcatccgtccccaaatgtcaatagtgcagaggttgagaaatcctgatttaatgcaattcatgacctgtaatggaacccattatcctggctaatttgcatttgtgtgtactcctttactaaggctcaattaagtaatttagtgaatatttattcactcgcagggccatgggggagaactgcaaaagaaaattgagggattataaatacctaatgggaaggcaaggtgaacacacatgaaaacaaaccaaaaaaattctacttcaaaatgttattgattttctccagaccctaattatgtatattctatcatttgcagtgcataccctttgtctgtctttgcaaamtgtcaattcagataatatagtgtcttagtgaattgttgccacaataatgtcatgtaccaattctcttccaagctcaacagattaacacaacagtgtatattttcattggtttgtctgttggctgaaacaaacaagctccaggctgtctgttgggctgtgtctgctacaatgcatttactctggggctcaggctgaaagggaggtagcacatactagagaaagagcttcttgtggtgatggcaaaagtacaacaggaccaagctaaacatgcaagcataacgtttctgtttccctcacatctgatagcatcccattggctaagacaaatcacatggttgagctccaaatcaaggctgaacaagtatactgtggtctctataaggccaatgcaggatacatggcctcactcaataccggtgggtcagagaaaggattgcgttattttaactaataagttcattttaatatttccatttcaaatttaacattataagaatttttcttgtttttttaagatttattactatttataattgtggcaaaatacacataacataaaattttccatcttaaccatttttaagtggcattaagtatgttcacactgttttgcagccatcaccactatccatctctagaattcttttcatcttgcaaaactgaaactctgtatctattaaataattattcccaattcccctgggattgagtacttatttaaaaaaaataataatctaccacccatttttaatgggagcaaggcttatttttatagagataattggcatatagcatgcatttatagttgtcagcccaacctatgcccaaggtgtattctatccaagatacagacatgtatgtcttcgggacctaaggtaggagccccacagaagtgtgttttactcagataaaaaagccttttgggaaggaattccttccaagttcaggccgagaagcagtatgggccatagccagggagcctgcattagagaaattggttgacattcagacccatgtccatcaatcactcaacagggaagtctacctaattctcaggttccaagcagtagtaggttaatccaagggggaaaaagtgaagtgtgcttttactgaaatctacatggaatattaggagcttagggcatcagcagcatatagctggcagcttcaggagcaaccagtgcaggagccagccagctggcagcagtaggggctttagcagtgttaaaccccagagcccatgagatggagctcagtatccttatcatcagccaccagtggtgggactcagactgggtaggcagtggttgtgaggtcctttagacaggacctgtttctatcagcaggaacaggaggcatcactacagagccttgggaaatgacaggcattattcagtagccaagggaactgctcgagtaattagaaaagcactgaagtctccaccatgtggaatgctgaaaagccctagaaatactgggttccagggacaatctgagagagaagagccatagggagtcctgggtgctagtctagataccacagcttgctatgagtatgactagggcaattcattgaatctctctgggtctttgttttcccttctaaaagtaagagaattgggatacatgatttgcctggtcttttctaaccgatactgtattacctgaatattatatgaatgttgttatatgatctcaagccaggctttatattcatgccacgttttggttgtagaaagtctgtattctttatttatttaattggttaattaattagagagagtctcactctgtcaactaggccagagtacagtggcgccatcagagctcactgtagtctcgaacccctgggctcaagcaattctcctgcctcagcctctcgagtagccggaactacagacgtgcaccaccatgccgagaaaatttttaaatttttttgtagagataggaacttacatatttcccaggctggtctccaactcctgagctcccccagtcctccctgctcggcctcccaaagcactgggattataggtgtgagccaccatgaccagccaatctctctgagtctttgtttctccatctgacaataagagaattgggatacatgatttgcaagacctttttgaactgaaattatattatctgaatgttgtgatttgctctcaagccagcctttaagttcatgccagattttggttgtataaagaccatagtcttaaaccatgctttaaaaaaaaaaaaraaagaaagaaagaaagaaataggcaatttctcatttctttccaagcataaatattagcttaagcattaagatagacaaggtytttgttgtgatggcattgtataactggattatttcatgcagtcttatgtgaggaattcagtaagaagttactttgcatcagctttatctgtatttagcatttagcagattaagccgaattgagggcctttagactaaatggcaaaaatggtttcacgtaataatagcagggtgctttttacattcatgatatctgtttgaacatgttaaattcaagataccagatatatgtctgtatggagaccttaattcagtatttggatatacagtctctctggacataaaacttaggtgtttctaagcattcattcagtatttaatctcaccaagacagcatatgtatttcataaaggtagggaggagatgaggaaagcagaaagtgtcttgaggctcacaacatttaaagtgcagactggacagtggacactcagaagtggcaccaggccaggaaatatgtttagtcgttgtttgattgtttctttgagtattttgcaccaagttagcctacacatttgtttaaattattaaattgatggtcatacaactgcacatgcaaatctgtgtgtctgtcttctctttaaaaattggaagctgctacaagggtgacattctttaggaggggtgcaagctcttggctggcaaagcccctccccatattgatgactaaacccaggccatttcccatcccccatccagcctctgtaattatgtggggttgtgttcctgattctgaggtccatgaatgaggaagaaccagcaaacagagactctgcagaaagagagacacaataggaaactcagagagtatgttcaaagagcagtgcattcctgagcaagggaatggctcactctgacaggtgttgctggaaagccagggaagagactctgccacaccatgtgcactggccttgatgtccagtgtccttagtgactctgggggagctgtctgcatgcaccaaggctggtgtgagtgcaaaaatagatgcagagtgaggtcaagctcacatgccagttcacacgctgaaggactgtcagtgctcccagatacacggcaatgagggtccagtgtcaggagagaacagataggtaaactaaaagcccagactccaccactacacatgcacgtaagacacctgcgctgtaccccctaaatctataaacatttttaaaaattaaaagtaaataaaattggtcctcaccatcatcccagctactcaggagactgacatgggaggatcacttgaacccaaaagttcaagaccagtttgggtaacatagtaagacccttgtctctaaaaaataaaaataaaaatattacccaggcatggcagtgtgcacctgtaattctagctgctcaggaggctgagatgggagaatcgcttgagcccaggagttggaggctgcagtgagttataatcacaccactgcactctaacctgggcaacagagccagaaccctgtctcaaatttttttaaataaaaataaaattacttaatagaacaaagaaattgttcaatttctttcactttacagttaagaaaactaagattcagagaactgatatgattaacacctacccctgactcccccacctagaataaaggtcataaaatttctccccgggccagtgagaaaaataaagtataaaaatttctccccaggcagatgagaaacagaaagagaaagtagtgagttttgtctcctgatgtcagggtcagagccacagagacttggttctggaagtatttgagagtaagaacctggctcaaggctgtgaaccagttgctgggagaggtgttgcctaccactgctggtgggaagactagaaggacatcgatattgagtaagtaagacctcaggctaccacactgcacacctacctgctaccttccggggaaccaagccaggcctctctctggctgggaaacctgttgagcaacctcctcatatttgctgccaacataagctccggttctaaatggagaacctgttgcagggtggggcagcaaaacctcaagagtgagaagagaggcaaacagcaaaatgaagtagaaagcccacgtcctcctcaacaagaaggggtctaactcaaaggaagcaggttgctggaacacgtacacagacctccatacaagaaagacatcatgtgtgtgttcaagccaccatcctccccaaagattccatcacctgttattcttacaaggaatgaaatgcagtgaggtgagagcgtgttgggatggcagacatggacgatggatgaattctcttccctctgtacattttccagcacaaagagctgccccaggctgttgaccccatacactttgagttttgaaaggtttctgtgtttcccttagaaagctactaaaccaggacaggcacagtsgttcaggcctgtaatcagcactttgcaagggtgtggcaggaggattgtttgagcccagaagttcaagaccagcctgggcaacataacaagaccttatctttacaaaatccacaaaaattagctgggtgtggtgacacatgcctatagtcccaggtacttgggaggctgagacaggaggatcgcttaaacccaggacttcaaggttgcagtgagctaagatcctaccacctcaccccagcctgggcaacagagcaaaaccttgtctcaagctgacatccttcagttcctttttgtgtccttgtcctttacaggaagatgaagatccctttcctcctactgttctttctgtgggaagccgagagccacgcagcatcaaggccgaacatcatcctggtgatggctgacgacctcggcattggagatcctgggtgctatgggaacaaaactatcaggttggtaatgcagctcctcagtaaacacatggctgtattcataggcaacagtccccgggatggttattgttgatctacagagcacagaacatgtagaaacgttcaaaaccctccaaaccatgcctggcttcatgtagatacactgagatgtaggtgtcatgaaggcaggtgtgagtttatctgtttgactatgaacagggagctggatgagctcagggagatcactaagaaggtgtgcatcacagttcttctttactaatggctacgatgctgctttccacacattcacatttccatcccttttgttcacctatttcgtcttctccttttggcatctggctttattctggttggttatgggtctgtactactctgtcctggctcatcagtgacttactctcactctcactctcactcatgcccaactctccctcttctagcccaggccctaccctgtcgtcagctatgcaggctgtcttagtctgtaaaggctgctatgacaaaatgccataggctgggtggcttctaaacaatagaaatgtattgctcatagttctggaggctggaagcccaagatcaaggcatagcagattcagcgtctggtggggacgtgcttcctggttcatagacagaaccttctcactgtgtcttcacatggtggaaggggggagggagctctctgggtcccttttataaggtcataaatcccatttacagggcttcatcctcatgacctcatcacctcccaaagaccccacctcctaataaaatcccattgagggtgagcatttcaacatctgaatctgggggggacacaaacatcgagaccatagctgacaatcaggagaggtatcatgttttaggacctcataacttgccagtaattatcaaaacagtggcaacaaggcaatcaaacgagactcgaggtcatttgacccttgggtctgaacatcctcccagaagtgggtgttttgtttctctccctctgcgtaaaatcaacctaacataagacctattttaaggacccttttgtttaaaaaggaaagtaagcccttggggagtagaatactgacattaaaatttcactttctcttcctaataatgtggagatgatggcataaaaatagttcyatggagagcttcatcacatgaaagatcaatacaaactgaattaaaggagaggatgaggaaagagattatttgcttctaccagaactttcttttttctttttttcttcttcttttttttttttttttttttttgagaaggagtttcactctgtcgcccagcctggagtgtggtggcacgatctcggggatcactgcaatctctgcctactaggttgaagcaattttcctgcctcagcctcttgagtagctgggactacaggtgtgcgccaccatgcctggctaattttttgtattttttgaagagatggggtttcactatgttggccaggctggtctcaaactcctgacctcgtgatccacctgcctcggcctcccaaagtgctggggttacaggcatgagccactgcgccggcccagaactttcttgtaggatatgtgaatactaaatacctgaagccaggaatggacccattgccaagtgccatggggcgctggttattttccttccattctcttactcctcatcttctttttaacatgagaaatcttggacagtatatttaatcattgcatatcagaccaaacaaaaattaaatagattatgatattaaggaaaatctttcccacaagacatagccaaatatgtctcactttcaatctgaaactttgcatcaaatgttgctttttatttttttaagagtatattgacttatgacattgcttaaattttaaaaagcatatgcaagggtaagatctgcaattttaagagagcactttaaatgtcctcttaaaattgtaattatctttgtatgttttctgccccaccttttgcctacttttgtaaaatgtttacagatcactttatacatttgtgatatagatcttattaatttagtttttcttatcagcatcataattttattcagctttttcattttatctgtttctttaatattatgtattcctaagatatattgagatagtagataactgttcctaccaagatgtcttaattaaaaagttaaaatcaagcctttgaggttaaatctttaccaattatcaaaagaaaaaatgtctataaagccccatggaagaattcatggcaatatataccctaaatctgccttggtctctgtattagagtcccattatttctgaattacatttttcatttttatattttgtaatatcacaccccaaaatagtcacttttttttgtaggccactatagacactaggaagattaattcaaatgtaaaaacagtctctgtcttctaagcatctcaccctttaagaaaaaagcaaattagaaatattggtaattaaacacattcactaaattaataaatggtcactagtttgacattacagatgcaataaaattatttcccccttcaagctatgcatcattgcagcactactctgtgagggcactgatctagggaagccatgggaccaatgaacaagatgtatactcccaccctacaggcagccatcttgaaggggagcacaattagccatgccattgctttacagtgaagaagctgcttgtctggtggagtatggactactgttccaaatataggtcaatccccttgcataaacaaggaagggcactggaggcccatgagaattccatctgtacctggaactgaaggatggcagatgacaagccaggcagggaggaatgracctggattcctggtgaaggacgtggatatatcttgtggggtataacttggtatggtccaaaaactaaaagatattaattcctaaatgacttcccaaaatgttcagccaatccattcatagagaaaggctaaaggtatcactctacaagtgagctcataaataagtatttatgaagcataaaaaatataagccagcaaagggtatgtgggggtcgcagcatctaatttcttcactgtagtgtttgtgccttttccctggagcgtattaacccatttattgatgctcactggttgaggcacatggagtctgattattccctgtccctgggggcatgtagaaattaggcaggggctcattaaagctggttgtgggattccctttggctgtggttggaaagagaggggagtcagattgaccctggagatttctcttttggtgacacagaggtaacttaggagatgtggatcggagaagagtgaagcctcatcctcattcaccccttactttccctccctgcagtatcctatttcaaagacttggtttctctcttctaattcagggctagtgggaccaggagctcagagccctctgtaacatgaatggaccttttggggatgtcccgcctgcatcattcacacatctgcatggttttgttgtagcttgagtcttgattctgtatcacttcttccccacctcccctgcctctcatctcgcctctctttcccacataaccccagacttgcctttgctcattgagaagtttcccagtataaagagccatagacagtttcattttgaaaattatcacagagctgggcacagtggctcacgcctgtaatcccagcaatttgggaggctgaggcgggcagatcacttgaggtcaggagtttgagaccagcctggccaacatggtgaaaccctgcctctaccaaaaaatgcaaaaattagccaggcgtggtagtgtgagccgagattgcgccactgcactccagcctgggtgacagagtgagatcctgtctcaaaactaaatacatgaacaataaatgaaaatgatcacaaatgctatgattcttttgttctaggactcccaatatcgaccggttggccagtgggggagtgaaactcactcagcacctggcagcatcaccgctgtgcacaccaagcagggcagccttcatgactggccggtaccctgtccgatcaggtaacctcctatctgcatcgcaggggctgtggtcaccttcgggacagtctcccacctcgaggtatctcctggttcctaagggttgattttttcctggtccaggaatggcatcttggtcccgcactggagttttcctcttcacagcctcttcgggaggacttcccaccgatgagattacctttgctaagcttctgaaggatcaaggttattcaacagcactgataggtatggacatctatgggatgggaaccatctataggtatgggaatgggagggaggacttggacaaagttagcaaaagagtgggagaggacatcatgacagttatcttagggatgactttgctggtacactttgcataactttaaatggaaacaaaatgatttcaattgtaggttaaaacacaatgagcctatctggactactcaaatgtatagatgtgtgtgtgtgtgtgtgttgtgtgtttgtgtgtgtgtgtgcatgtgtgtatagataaatagatacttaggttatacctaatgatagatggatgaatggatagatggaagaaagcattgatgaatggatggatagatagataataggtagagaaatagctagctagctagatagacagatgcagagagagacaaaggtgagatagatgggatggatggatggatggatggatggatggatggaaggaatagatgatagctagctagctagctagctagatagatagagaaatagaaaaacagacatagatagatagatagatagatagatagatgcagagagggacaaagatgagatagatagatagatagatgcagagagggacaaagatgagatagatggggtagatggatggatggatgaaatagatgatgatagatatgatagatggttggatagatagatagatagatagatagatagatgttatatataaatagatgcagggagagagacaaagattacataggatggatagatagataatgaggcaattggatggatgaaatagatgatagatggaacaaatgaaagatagacatatacatagaaagaatatacaaaactattcacaccatgctattgataaagattttcattttactttccaatataaaattatgtcagaatttgtcttggttgacacacccactgattttatcatgtagatagggttgacaccttcctttttgcatgaagagcttgaatctaagcaggccataaaatgaatcctagcaaatctcagaggagcaaaatgacccttttctttcttccaacatcttgttaaaaaactatcatttttttcttttgtgaggcactcattaatttagtgatctaattaacattttataagaaattttcagaggtgcttaaaataattgctgagttactgagtgtgatttcctcatgcctcaggggtaggttctgaagtaaggattcgtttccacttttaacattcaaggaacaaaattaagttgcttctaaaactttaattttaagggcctgtctcagaaaagcatctgaccaggaaaaagaaaaaaaaaaaaacaaacttgtatttttctgtagagtgtggtttcctgcctattaaagatattagctagttttctttttggatttttatctgattggggttttttgttgttgttttgtgttgttttgttgaaatcactaaattagttcttatttcttggtagagtgagtagaggatttttatctggttgagattttgtttgtttttttgttttgttttgttggaatcgctaaattagttcttattttctggtagagtgagtaggtaataccttagcgtttgtggggaaaaaaaagtgaaaaattctagggtcctatgagcgggaaggctagcttcatgaaatagtcagaaagaacctccttttcagcatgtaggaacagaagcttggattggaatcagggtgtttattgggactgaagtgatcccccatttgtcttctcagggaaatggcaccttgggatgagctgtcacagcaagactgacttctgtcaccaccctttacatcacggcttcaattatttctatgggatctctttgaccaatctgagagactgcaagcccggagagggcagtgtcttcaccacgggcttcaagaggctgrtcttcctccccctgcagatcgtcggggtcaccctccttacccttgctgcactcaattgtctggggctactccacgtgcctctaggcgtttttttcagccttctcttcctagcagccctaatcctgacccttttcttgggcttccttcattacttccggcccctgaactgcttcatgatgaggaactacgagatcattcagcagcccatgtcctatgacaatctcacccagaggctaacggtggaggcggcccagttcatacagcggtgggtattgccttgtcctctgatgctgcctgttaaaaaacattctgggttatttctcgtggaggtggaagaaccaacagggttttgttgttgttgttgtttgtggtttgttcgtttttttgagacagagtcttgctctgtcgcccaggctggagtgcagtggcatgatctcggctcactgcaagctctgcctcccgagttcacgccattctcctgcctcagcctcctgagtagctggaactataggcgcccgccaccacacctggctaattttttgtatttttagtagagacggggtttcaccgtgttagccaggatggtctcgatctcttgacctcgtgatccgcccgcctcggcctcccaaagtgctgggattacaggcgtgagccaccacgcccagccagaactggtagggttattatgctagccacattttcccttccatgcctaacacatttcttcagccagagctcgccatagcacatgtttaatggccttagaaaggtattgcaatgcagtgtgctctccttagagtctctttgccaacattccccacatcctgggctggaaaggcccatggcaaattaatgtctgctgatgacaaaggaggtgtcagatatcccactggttttttgtttgtttgtttgtttgagagggaatctctctgtgtcgcccaggctggagtgcaagtggtgcgatcttggctcactgcaacctccacctcccaggttcaagtgattctcctgccttagccttctgagtagctgggattacaggtgcctgccaccatgcctggctaattttttttctatttttagtagagacagggtttcacaaacttggtcagtctgcattttgaactcctgacctcaggtgatccacccacctcggcctcccaaagtgctgggattacaggtgtgagccacagtacccagccccactggtctttaattttcaaatgtggccatcaagagaggcaagataatggcttatgtttagtttataggttgtccttgtgatataaacaatgtggaaagatccaaaatattttggattaatctctgagcaaacaaaacaaaacaaaaacctctgtgagtaaactgggtgaagtgaatgatgtctcttgggtctgtcaggtcccattgagtttatagttttggggattgcaatctgtaaatggaataaccatcaacagtggagcagacagcattcctgaattacataggtaggtataatatatatctatattataatacataatatagagagcataagtagatataattaagtagatattatatagaggctatgtcaaaaacacttgctattcaaaacaagcaaataaaagtattttgttccacttgtaactgtggagaacaggactctaaagagaaatggaaagttcatctgaaaatcagacgtttggtctttatggtgacttaaactctatgagagatgtaaaagagagttgggagggtgatttaaaaattataaaggagacagaggaaatataggtaatattggtttgtcatccaattaattgcatgacacaaaattgtaaaatcaatctctggattgaacaatgaatgacaatgaaaaggaagttattgtgatgaagggaaactatattagggatttaatttaaaaacaagcaaatatgctcagcctaagaagagaatacatagttaaggtatgtggaagctacataagttagggctggtgagaaaggtaaaaggtaacgtactctatgaaaattatgttgtcatttcctcacatggaagatgttgtgttcctctgtccagatcttgtgtgcctggagttgatgctttactggaggttgggaatgggcagtggttctcctcactctcttcttccagttatgaaacagcataggagcaacccattcacctggaggtacaacagtgtcctgctacccacaacatcacggattatgcaatagataaatcatagggtgtattttagtatatctctctggtatcacaaaagtgtttcatcaactctgacagaagcccacatatggtttgggtgtctgaacagactacgaagtgacttacacaaaagttgcaattgatagtatcacttcctccttctaaaaatgagacacaaatagaatgattagttcttatagttcacaccgcctctcagttttgacagattttgttaaaatctaaattgtcattgaactgtgaaatatataaactggtcattggtcattttaagtattctcagtttcagcctctgggacttggctccagagagtattctatgtactagctgcccaacggctgagggagcaccacacaatttaagtttttattttggttaacatccaacttctgctgccagtttctgtttttgtcagtgaagactgacaaaatctcagtggattaacacttgaagatttgtttcttgcccatgcaaaatctattgctggttgggtgatgctctagggaagctttgctccatgaggagactcagggatccaggttgctaatatcttgtggttctgtcatctcaatagatggccttcccagtagcgtccacaggagaaaagagttgaagggtcccttgggggctttttgttacttcactgacccaggggtcagcatgtagaccaggccccatgtctccaccctgacttgacatggggctaagaggcagtctccccatgtcttcaggaagaagaaaatgaaackgccttgctgaacatatagcagtgattttcctactgcaaacagtgattttcaaatttgttttaaagctgaggaatatttcagatgaaattttatgagaagctaagtatgtcagagggataaaagttgcagtgcttgggtgaacctggaacagaggactgcatttggaaattgctgacatttaataaagccccatggaaatctcatgaacagctggagagaaagggcagactctgcaacaaaagaataaaagaacatgtgagcaaacatctagttagtgcagactctaggcaaattaatatttaacagacatttgtaagtaaaaaaggtaggcacaccaggagaaaaatcaacaccagccttggaattttaaaaaagaattgatattacagctatgtgagtggaggttgaaggaatttgcccaaggttatagataggtgtaaactaaaggggctattttattataaaaatttggattgcagacatgtaccgcataataacattttggtcaacaatggaccacgtatatgacagaagtcccatgagattataatggagctgccttatgcagctgtacgtttgtatcttttttgtttttttgagatagagtctcgctctgttgcccaggctggggtgcagtggtgcgatctcggctcactgcaatctccccctcccgggtttcagtgattctcctgcctcagcctctgaagtagctgggattacaggtgtgtgccaccacgcccagctaatttttgtatttttaatagagacagggtttcaccatgttgaccaggctggtctcgaactcctgacctcaaatgatccacccgcctcggcctctcgaagtactgggattacaggcatgagccaccacgcccggccacgtttgtatcttttatactgtattttttcctgtaccttttctatgtgtacatatgtctagataaatacttgccattgcattgcagttgcctgcagtactcagtacagtcacatgcggtgcaggtttgtagcctaggagtaataggctttaccatatagcctgggtgtgcagtgggctataccatctaggcttgtgtaagtgcactgtacgatgtttgcagaatgatgaaattgcttaatgatacatttctcagaacatatccctgtcactatatgatgcatgtctgtacttgaagcattgatgtgaagtatactgcttattggtattttaatattttcatcagagaaaaatagagtaaagaaaatctatagtttggtgttgtgttgcgtttgtgtgtgtatatatatatgtatgtgtaaatatgtgtgtgtatatatgtgtgtgtgtttgtgtatatatatgtgtgtgtgtgctttacacacatatgtatttaatttacaaagagataaattattgaaattgatttccaagggaagctataggagatatacatgtacagcagcagcaagtattaatgtaaagaataaagaattttctgcccagggttggataatagccactaaaagtcctttaagcaactatttatagatctatcagaattcaggtaagacatgagctatttgtcatgattttcacaggtttgggctgacaggcacttgctggaggggttatgagtcgttcttgggcaatatgcctgttgtctgggtgcctgtccttggtaaacattgggatctgtgagtaaccatagctccatcatgtcatgcccatgctgacagcctgtcttacccaggtgccagagactgcagaaacctctcggattctgctcacagcaaaatggcatggtgaaggatgtcgtgcaattcctaagagaggaaggaagacttcaagctgtcagtcacactcctgaacatttatttccagtattatttgtacagagatactgcagagttagtgcccgtggtcagcccacacagccagatgcaggcattgcagggctgaccacctgcctcctgggcatggcgcttggttcagaactgtacattgtagggtggcctttgctagcctagtgtatggtggcgtataatgtaggatcactatgacttcctgcaggtagacaaagaagggaaaagggagagtccaggactacaggggtagacaagtgatacctcagactttgcataaggaaaaccccagaggtgcttattacagctgaagatggccaagatgaactctagggactgtcacagagtagttccaaatgagactttgcatcagcattttaataagcttctcaagacattctaaactgggtgtttcataggacactctaagaaacactgggtttcatatacatgtatgagctttggctactgtgcagaaacactgcagttatttgtcacctagatttttctagaaggtgatgctgacaggtgatctcatgtaaaagctttggaactttataagatacatcattcagttatatcatcatctagtaaggtgcacatagatatgtgattaaaacaaaagcttatggaaatgatctttctcttactagggtgattgccctaatattttctaccccattttattctgttttttttttttttttggtaataatctggttttggaactaattaatttcatgatgtatcaatgggtcacagtctacatgattgaccatgctcttacctagtgtgtgagctttactgtgtttgataaacaggagcacagccattccaagatggagcggcgctcttgggcctatttaaggcagaaaacaacagtgtgctgtttatcaaatttgctgggaaagctggacatccttatatcagtcttcatctaccacaaatctctcaaaacgagacaaggtggagattaatacagcgtccattatacaatggatagtcagaaatgatacttggcttccagggtgaatcaccttgtatgacatgtattttgacagaaattatttaatctattaggtatataaatattcatatgattacaagtcattttaatgggtatataattttgagaggggaccaaaacaaatttattgatcatgaggatattgaagcctgacaagttaatcttgattatctctaattattagagagctgagattttcttttagaactacagatttaagatgttctggcagcaccaaagttgaagggatggttattgaattacaacaaaaggattttttctttaaaataggtgattctagtgtagatggctattgtccacattggagcactcacagcatggttaatattagtgaaaatgctagcatcttgtacactgtgtacattcacaaacagcttcttacatactttatctgaagatacaaagatttaaagcacattgttacaatcatccttgggtagagctgtctatctgtgttagattagttatctgattcacaaaatataatatccaagggtcctgagagaatggccttgatatgttaccaaagaatcctaacattggtgacaccaccatgttcataaaacattttttcaatgtctgaagacacatttatatgtgttatttcattatccagaatatcctgagcaatttagccaggtcttaccacctttgtgagaaatggaggtagagttattcagcagccgaaaaaggaatgcctgatcaaagcaatggtagtattagtggaatttactcaaatgctttcaaatttaaaaatttccagttacaactggtgccttgtttagatattttaacatatatatatatatttgtacacagctgcttctcagttcatctgtcaaaggtggtgaggaaaatgatttaaaactcctacttctaaaatttatagcctttctctacactgtgttactgatatgatttatactcaagggtttgctcctgagatgctagcttgcaatattagggtatgaatgacaaggaggcataaggcaaagatgcttcattggtttgtgattcttgcaaatgaggtccacttagtcaaacccagtttgtggcctgggattccaagcacatattttcaagttgaggagagcgatgatttagaatgtataaccatccactccacaatccctcaccctaattgactcattcagggataaatttatctgggggagatgcttctattattagagagctggataattagctcaccatatgttatacactgtatagtaattcaggagatgggtcatcctgaatgcactttaattagccagaaatccttgctattcttgcataaaggagtgaattataaatttcttggagatacccaactctctgtatgtgccctgtagggtcatcccattatcacagctttcggttttgccatccctgtcttcattgcaatgcaaaacagatccaacttaggtgcacagcagaaatggtaacacataatgggacatgttcaagtgtaatggacaccgtggaatggttgccaattatacgtcaggtgctgtggatacacacattgttttgtgcacctcccacacccattgcttccttcacaccacataacaacctcatgaggtcggtaaatagatgtctcactgtggagaaactttgaagctgaaatcctttgaatgaacaaagctccacaggtaataaagagtagaggctgaatttaaacagaactaactcaaccttttaaattttggaatgcttcataaacagttgggggaatcttttccatctactctagtgcggtagacttattgagtgnnnnnnnnnnnnnnnnnnnnnnnnnnnnnnnaaataaagcgtaaggatgatgggtgaatgtagcaagttaattttattcacaaacagcttttttctttagttcaagtcaaggctaatttttaaaaaggtgtcatgctggtgggtagaatgagattcatgttttatgtcttcaatagaaagagatggatgttggtcactctgctttgtgaaaaaacagatatgttggcctcttctctgaattcattgaaacagtgcttcattgctaggaaaaatatttaagtaaatcacttcgtgtttttctctgaagatatatacatgcccacttcgaacagtagatttccaagaatggcaatgactttatacacacctacataatctgtatagtatgttatacagttatgggatttatagatttatctggaatttgccattagtataaggttctccaggctgaagtttattaagttgtttcaatatattaaatatatgtatgtatattttgagatattttaattagaagttcaataaaagctaataagttttagtcaagctcaatgtaggataactcttgttctttatagatgaattttttcagcaaagggtttatggatagcaaatcaaaaatttggaaattatgtagagttctgtttttaatctctgacttcccggagtggtaagatctcctgttctgaaaacagtaaaccctgctccctgacaactctccacagaaaacacaccaagacatcagcatgatggaaagtatcagtaatcaaggggtgggggggaaacacctacatgaaaagattatacatttagtggagagccatggggaagaatctctcctaccatttcctatggtctgtacttttatgataaataaatactcctttctacaagcattgcttgtgtaatcataattccctaaaatctatgacagctgataaatgtattattggaagaagatatgaccttttgtcctggtctatgtactgctatcaccatttggcacagtcacaatcccgaaatgcatttattgggttcctccagcctagcctctcccacttccagctggaccccagtgtaagtggctgtgatgaatagctgtgatttggctcaaagtgtcttttgaataaagggatctttaggaggtttcattagtttcgataagagtgtaagccaggaaggaatggggtgatattgattttaattcatggtaagaaaagtaaatcagattaaacactaagagcaatatacagggacacacacagatgctcattcaaaaatggaaaaagtaaataattaaagaattatcaaagagtcacattattcaataactgcaggtaacacatgatttgtttctaacttttgtgggcctatgggatatgtatttaaaaatgagggcaacgggcacagtggctcatgcctgtaatcctagcactttgggaagcctaggtgggaggatcacttgagctcaggagttcaagacsagcctgggcaatacagcaagaccctgtgtctacaaaaaataaagaaatattagccgggcatggtggtgtgtgcctgtagtcccagctacttgggggactgagatgagaagattacttgatgccaggagttcaagaccagcctgggcaatatagtgagaccctgtctctacaaaaaatcaggaagtattagctcggcatggtcgtgcacacctgtagtcccagctactcaggaagctgaggtgggagaatctcttaagccccggagttgtaggctgcagtgagctatgattgcaccactgcactccagcctgcacaacagagcaagaccctgtctctgaaaaaaaaaaaggaggggagggcttctcttttgaatgaacctctggtttcgggctgagcatattgtaacaatacaggtactgagggatgttcgtcttttgccatactagatctagtgggtccatggcattcccaactcactggggcatagataaagaatacttacacctgaccctggaaatgcctctccagccatacatttctgtatctctgaatatcatgcctgtgaatagctcgaaagcctacatgtttatggaaatcattcacaaacactgtcatgctatgtgaaccattgaaagctacctctttctgggagcaaattctgacccctgccaggttgagataagttctcctctgaattcattctctgcagcactgagtggggcatttaagacagcttagactagctgtcaatgctcttgtctgaactgtgggttgctgatggcagggtccggtccagtctctctttatatttctggtgcctggtattgtgtgtcagcagaacatttgcttaataactgcaaaacttatagatggaagacatgaacagctgggtgtataaatccacctgctgcacgcagaggtggtcacatgaactttgtgggggttgggggtggcggttgttgataccgctatctgatttatgccatactctaattaccagcagcagaaggtagccagaaggaattcacagacatcyctatttgcattcctgttattccctatgcccactgtagttggaacaatactacaataataaaggtcagacactcagatgaagattattattccgaagatcctcaaaagtatactttatggcagacagaaaaaaaatgccttagccatcttcttgtgtgaattttcactcctgcctctatagaatgtaaatcttttgattctgagattggaatgattacatgttgctggaaaggctcagggctgtcttctgtatttttaacaaatggagcgcaggcatgtagcagctgaaagttctatcttttcgcacagtgtgcaagacagtggcaataaattttcagaagagttgtttactgaagtactccagctaataaaaaaggaattaagctgttattgagaaatctttcttccaccaacttgctgatgtgtcattcagctttcaaggtcgtagagaggaagagaaacccagatctccttcctgagcctgggtttgaagcaaatggtctttcctggtctctcaaaggatatcacaaagcaagaattccttcacctgggcacaggctgtcagttacaccccaggtgtgtgcaggaaagccagtgatttatgtctgtctagccaacattcccatgcaccgttgatttcacttctgttcctgaatggtaaatcttggaacagtgtttttgcaagccaagtatgcttttctctgttttctgggtttgtttttgtatgtcaaacctaatcaannnnnnnnnnnnnnnnnnnnnnnnnnnnnnnnnnnnnnnnnnnnnnnnnnnnnnnnnnnnnnnnnnnnnnnnnnnnnnnnnnnnnnnnnnnnnnnnnnnnnnnnnnnnnnnnnnnnnnnnnnnnnnnnnnnnnnnnnnnnnnnnnnnnnnnnnnnnnnnnnnnnnnnnnnnnnnnnnnnnnnnnnnnnnnnnnnnnnnnnnnnnnnnnnnnnnnnnnnnnnnnnnnnnnnnnnnnaaaacaagttccataaatatgtgaattttgataataaacacattaattcccttctccccttctaaggaggattcccctgcattccaagacaaaggtcatgttccgtagccttgattgaaccctgaagctcaggtctttgactcaactgttctttcagtcctcatgaaccagcttttatttcaggctttattatttgccggttgtgtcatctttatcatttatttctttatttccacctcacattttaatatgccacaattttatgatcctgccaatcatgttgatggatgtctctttcttcttcttcttcttctttttttttttttaacttttgagcaagaggactgctatccaaaattggagaatccaagtcgaaactggactggagcccagtgctgggcatttcaatccatgcaatagctcctcgttctcagcaaattctgtcactcacatcctgtatgaccatgtactatgcttgggagattgactttttaagctttcttatctattttccttaactttaaatctaaaaataaatgggagaacagatgagagtgaaattgcagtgagattgttctcatacataatgtaactctctatttaggaacacaaagactgtaatttcatgttcgttttgaggaatctaagccagtttaggggaacacaatctgcttctggggaaggaggtgcaatttgcccaggtgtgagtaaactttccccataataagtaggatggaggcttcacagtctgctctgtgtggccaagctctctaacatactgtggctccatttcagctcctccaggttcctcaagggcatcttctcttagaaggagccaaacacatggcttggtagagatgctcatatgtaagtcatcagctaggatgacaattacagtgcttccatctaagcagtagtatgtcctcttttctttctgagatctaacagtgaatgttatagaccaggtccagtgggctctcattgcatgccttcttattccagttcctgtgagaggtgagacaagccactcaggattttttttttttttaactttcttggctgtgagatattaacaacatttccttgtttcatattcttgtaaaaaaaaaaaaaggttggggggtacctaatttgccaccaagtactggaataataaaacatggtactgatgattaccaataacttgttagatttgatctgcctgttttcagagaactggggatgcctggcttagctctaacccaaagtgtgctgttttgtgctaattttctctttcaaaggagtagggggttaataaatgtaagaactgaaaagggaagtgttacagccataggtgtgagcagttcgaggagcccaaggtatattaacattagcaaaatacaaaatgcatttagaaaagcatatatccatttattgtttccagaaaaacttattagtatttgtgacacccagtccaaaatttggaatgtttttggctatcatgagaagttaaggaagccaggaatacatagaagaaaaattaatttaattacatatatatatatatatatgtagtcttctgaacttttactggctggtaaagatgtggaccataggagatgaccccttcaaagtaagaagagacttaggagagaagttctgcagagtagtccctgctctagagcaactgttacataaaccatgtcccgtcaaagtaacaaaagactgaggacagaagttctgcagaggaatctctgctctagagcaactgttacataagccacattccttcaaagtaacgagatttaggacagaagttctgcagaggaatccttgctctagagcaaccgttacataaaccacatcccttctaagtaacaagagacttaggcagaagtctaaaccatatgcaacataaaccattcacaatgcaattcacattgcattcccaaggccctgtcgttcacttgactgctgggcggggctgccaatgctcagaaagcaaatgcagtatttcatccaatagcagagatttgctgaattcatgccacctgccaatcactttgcgggtgtcaggaacaccatgatataaatgacacctcctgcctggtggtctggtgggagaagagagcacataaagagctctggtgtcgtggaacacatactttattagcatttgctaataaaaattgaatctccgggctgggtgcagtggctcatacctgtaatcccagcactttgggaggctgaggcaggaggatcacctgaggtcaggagtttcagaccagccaggccaacatggcaaaaccccatctctactaaaacaattacagaaattagctgggcatggtggtgtgcacctttaatgccagctactccagaggctgagacaagacaattgcttgaacccaggaggtagaggttgcagtgagctgagatcatgccactgcactctagcttgagcaacacagcaagactctatctcaaatataaaataataacaaaaaaataagctccagaccctacaaccatgcctggcctgtaggggatgcttaacaatattgttttagggttcccttttctgagccccaacagggaaactagagaatactgaagagaaagaggaaatgaccagcagagaatcatctcagtctcccctgaggctagccatacaaactagaatccctcttccccaaggcaagttatagagaccagaaccccttctccctcaatcaagtcataggactgaaaaataggaccaatttttcctcatcctttctatgtaaaaactggccataaagaaattccccaacctaccttgactgtgggtcctagcactcccattccagagaaggtcctaccccacacttagaaagaaggaacgctgctcagagaggccaagaacaatctagacagacaggccttgccggctttccccactcagttcattagcattagatcaggccctttttgtccaatcctatttctacatggctgtacatactttgttgaacctaagcataaaaatagtcaatttcccctttatctttgggtcttcattctcaaggctcctatgtgtacacattaaatgaatttgtatgccctttctcctattaaaaaaaaaagaaattgaattcctgcccccatccatgcattcattctctcatttgtttggcaatattattaagtatcttctacaggtcaggcatggcactagggcctggagattcagtggaaggttaatgctccatggtgctcagccctgatgggacttcctggaaaaggggaacaggctctcagaggaggtggcattggagatggcttctgaacaatgactgcttgccagggagagggggaagtaagttttaggttgagaggtgatgatgtgcagagcattgagctgtgaatgtgcaagctgtgtttgggactggttaccatattggggtagaagctgggctgtgtgagagtattggcatcaacataannnnnnnnnnnnnnnnnnnnnnnnnnnnnntagttaaaggaagagcttgaatcccagtaagaagaagccattggggagtgggcagtgaggcaggggctgtcattaaggtgtgtctgtcccctctaagcattgcagcttcttgcacaaatctctcagagctctcaccaaccctggggaagtggacacttgtcctgttccctgatagccttcaaaaaggcctctcacccagtattctctttcagcagaaaggaattgctaattatttcccagacgagaggtaaagattgagcctacgaggtgaaactgagacacagcactaaatgcatttctcagagggcaacccgatgtgaagaagcacccatgggacttattgatccctatcagcagactcagttgtgaaacctcataccttcgtatagcaacatcgctcacagcccattgtagcaaaggccacgcattgacagtgacttataactcttgagtatctgtgcattctaatcaattcaaatgaaggaggtttaggtgctctctgaattaaggaatatgtttgcattatcattcccctctctcgagaggtttaggccaattgaatgaatgttctatttaactttgaaaatttcagtattgaccatttagtgttcattctaggagacttgttgtattatagaagagggtagaacacaaaattgagttggagttcaaacagcattgatgaaagtaattgacaactgaaggtacacaatggaatactattcacctttaaaaagaacgtaatgctgtcatttttgacaacatggatgaacctggaggacattctgctaagttgtataagccagacacagaaagacaaatactgcaagatctcacttctatgtggaatctaagaagaaagttgaactcctagaagcagagagtagaatggcagttaccagggactggggttaggggagtggatggggaatggggacatgttggtcaaaggataaaaagttttagttagacaggaggaatagtttggggatgtattgcattacatggtgactgtagtgacttacaatgtattatatatttcaaaattgctgagagagtagattttaaatgttctcacctcaaagaaatgacaactatatgagaaaatgaatattttgattagctttatttaatcattccacatggtaaacatatattattgcactgtccccaacaagtctatacaagaattatttgtatatatcaaatgatacctatatatacaaaatttgtatatatatttgtataattgtttgcatatatcaattaaaaattttaaaaggtagtcttctctagcagtgtgtgtatgtgtatttgtgtataaatttttttcccaaagaaatactattttcaaggtgcttgaattcatattaatcaccatatagagaaggaagaacagaattaaacaacaacaacaaaaaacaaatataggcaattttctattaaatnnnnnnnnnnnnnnnnnnnnnnnnnnnnnnnnnnnnnnnnnnnnnnnnnnnnnnnnnnnnnnnnnnnnnnnnnnnnnnnnnnnnnnnnnnnnnnnnnnnnnnnnnnnnnnnnnnnnnnnnnnnnnnnnnnnnnnnnnnnnnnnnnnnnnnnnnnnnnnnnnnnnnnnnnnnnnnnnnnnnnnnnnnnnnnnnnnnnnnnnnnnnnnnnnnnnnnnnnnnnnnnnnnnnnnnnnnnnnnnnnnnnnnnnnnnnnnnnnnnnnnnnnnnnnnnnnnnnnnnnnnnnnnnnnnnnnnnnnnnnnnnnnnnnnnnnnnnnnnnnnnnnnnnnnnnnnnnnnnnnnnnnnnnnnnnnnnnnnnnnnnnnnnnnnnnnnnnnnnnnnnnnnnnnnnnnnnnnnnnnnnnnnnnnnnnnnnnnnnnnnnnnnnnnnnnnnnnnnnnnnnnnnnnnnnnnnnnnnnnnnnnnnnnnnnnnnnnnnnnnnnnnnnnnnnnnnnnnnnnnnnnnnnnntgcttagaaagctgctaagtctttgcctccttgtgttttctttccctgtgtatttctatctttgttcctgatgcctttagagacagcaaatgtatggggttttttgaaagtaaccaaaaatgcattgatcctgaaaggtaaatagaatacaaaaagcaccttcaccagcctcggcaacatagggagaccccatctctacaaaaaataaaaaaaaatcagccaggtgtggtggtacatgcctgtggtcccagctaattgggaggctgaggtgggaggacgtcttgaacccaggaggttgaggctgcactgagctatgattgcaccactgcactccagcctgggtgagactgagaccttgtctcttaaaaaaaatatatatatctttaccctcttttgcatgtctgcagttcctagtggatacatttcaggggaagtctagtctgtgggctgcagatggaagagattcatggacgaaaagagacaaaactttagtccttattatcccttattctatcaacaatgaaatatgaacaatgccttgtcattagcagttaaatgtgtgatggattttggatccagaatacctgcagctggctacagccttggcgaggctctcagggcaacagtgacgagatcctcgtgttcttcttgctgcatctaacgatggcaaagctttgcttgttctccaaactccttctctcccttcctgagcaaataaccctatttctgagaaacatggcatttttcactgacattgggaagacttccttactgnnnnnnnnnnnnnnnnnnnnnnnnnnnnnnnnnnnnnnnnnnnnnnnnnnnnnnnnnnnnnnnnnnnnnnnnnnnnnnnnnnnnnnnnnnnnnnnnnnnnnnnnnnnnnnnnnnnnnnnnnnnnnnnnnnnnnnnnnnnnnnnnnnnnnnnnnnnnnnnnnnnnnnnnnnnnnnnnnnnnnnnnnnnnnnnncagcattgcctcttacttttacattgctgggctcatctggacagtatcagagtgacagaagagatcattttgtccatattccagtactcgcccaggttcctgaagattttcatatatttgtttccttttactttttctctctctcattcttccttccatttcttttggtgaaataactcaatagtttctaatctttggatccagatgttttggaaatccatgaaagttgcttcctagttctgtttgtttgtttgtttaaagcagaaaattgatggcagtggtggtcacctactgtggtgattgtcagaacaaattttgttctgttttgttttaaatcatgaaaggagcaccttcttaagaaacaagactgggctcttcttccagcttctagatgcttctttaattatctctgtgaacttgggagatgttttacatcttcaggcctctcctctatcatcttgataggaggattcaaattaggcgagttctgaggttctttttttctctaatagtctgtgattctataaagtaatgagagtgagtaccatttgtaatactaactaggaaaaacaaaaccagaacattctctctaacaagatttataagaagaatgcattacgcttagggctcgtacatataccaatacaagcctgcctccttttattttttcctttctaaaatgttgcacataaatcaatttatatttttcgcatcttagtgtaaatcagtagaatattttctctttttaatgagtgttctattttaatgtgtcaggctgcttatgcaactctaagatttctgttggctagcaagcaacctcacgctgatctcatcacacctgttgattaaattttatttaattagcatggcatacatgcctgactcattagaaagtctaacttccagtgttgtctcactactagttcctctaaagtatttggagagtattttcaatcttcaagacctgccttagcccctgatttatagatgtttgtgttgtttttttgtttttggcggaaagataaaatccttcccctaagcattccatgaatttttaagaaagtttttgttttttaaatccaatacatatgagtgttctaaagaatatttcttctttccaagaagggcttttccttattacacaggacgggactgttggattctgaataattatgtaataaaataaaagggggatatttgcttcataagaaacactccctgcacaaaggaaaactgagatggaagcggttaactagtgagggtgcatctcagtcactcagagcatgttctctccacatgtttgagggctgtataattctgtggatcatcactttctccactgcaggtttctctaagcctggaaaggcatattcagtgaccaagaacctttattatgtaactgtacaccagttctactgcccgtgattgtggcttactgccttattcttagctgagtgagtgctgtgtctcatattgttatagtaactagagaaagactgacttcatacagatgttgtgagagctgcagaaggggcttctcagtacaaccacacaagggcagttgaaatccaggagatacaattctgctctgcaaattcacggggtggtcgacatgattttaatcatcagagtgactaacattgagagctggccgtatactgggccctgatagcacatgtatttgtgggagccataggcttttggtcccataaaggttgtcaagaaatcactggcatgaggcagattgattcataggagaaaagacatactaatttattgaatgtgcatacacaagagccttcataatgaagacccaacctcccaatggggtccagaagcttatacaccatcctgaggttacagaaaggttgggggcttgggccaggcatgggggctcacacctgtaatcccagcactttgggaggccgaagcgggcagatcacctgaggtcaggagttcgagaccagcctggccaacatggtaaaaccccatctctactaaaaatacaaaaattagccgggcatggtggtgtgcacctgtaatcccacctactggggaggctgaggcaggagaatcatttgaacctgggaggcggaggttgcagtgagccgagatcgcaccactgtactccaggaagaaaaaaaaaaaawatatatatatatatatatatgtgtgtgtgtgtgtgtgtgtgtgtgtatgtgtgtgtgtgtgtgtgtatatgtgtgtgtgtgtgtgtatatatatgtgtgtgtatatatatgtgtgtgtgtctgtgtgtgtgtgtgtgtgtgtgtgtgtatgatgggggcttggatcctggtaaaacaggttatgcgggtcagggagaagaggagttctgttgaggggcaataaatgattgctagggagaattattggatacaggaacagagattatcttgtaatttaaatgatccttggagttagtcattgtacttggaaaagggtctcctcaggggtagtcatatcttggtcttcttttctgcaacagacaatgaaattacagggaggggaagggaaaaaaatgttctccttgcgggggtctggatcttaggtagataaaagaacttcaccttctatgggagaaactgtgtgtgggatgagggggaggttagagagacttgaggcttcttcggtttagcatgtcaaaatgcaatctttggggatatcagtttctgagtcccagcatcttacctcattttgtgctgccagtggtccctgtgcagcaggtgatgttctcatcattcgcattccacaggtaaggcaagtgaggcttgcaggttaggtacacccacctcaggttacagaattcataatgggtgagcatgagttccaatgcaggtgtcccacctagaacatgaaatctayaccactttgtttcttttctttccatgtaataagaaagcgtgcatcatgtcagtgcacaaccaacaacatatctccgggacagatctagttcattcattagtcatgttgactggatgctaactgtgtgcttaaatgttttttggcagtgtagggtgggagtggggtgcaatgatgataagactataggtttaggggagaatgttcagcctacaggatagtaagaaatttaagattctttcaggagatcctataacaactcagggcagaaagtgaggaatgtcatgagggaggtgcagataaagtgcttgaacagtttggaagcaggaagggcagtggtgctgtgcatgttggatacagcagccacatcatttcagcagggcacacccacagtggaattctttgggcaatcatggtgctattgcaaagtctgattttcaatcccagttaattctgaagcagcccaagcatcagggaagaacaaacgtgtaaaatctcattgnnnnnnnnnnnnnnnnnnnnnnnnnnnnnnnnnnnnnnnnnnnnnnnnnnnnnnnnnnnnnnnnnnnnnnnnnnnnnnnnnnnnnnnnnnnnnnnnnnnnnnnnnnnnnnnnnnnnnnnnnnnnnnnnnnnnnnnnnnnnnnnnnnnnnnnnnnnnnnnnnnnnnnnnnnnnnnnnnnnnnnnnnnnnnnnnnnnnnnnnnnnnnnnnnnnnnnnnnnnnnnnnnnnnnnnnnnnnnnnnnnnnnnnnnnnnnnnnnnnnnnnnnnnnnnnnnnnnnnnnnnnnnnnnnnnnnnnnnnnnnnnnnnnnnnnnnnnnnnnnnnnnnnnnnnnnnnnnnnnnnnnnnnnnnnnnnnnnnnnnnnnnnnnnnnnnnnnnnnnnnnnnnnnnnnnnnnnnnnnnnnnnnnnnnnnnnnnnnnnnnnnnnnnnnnnnnnnnnnnnnnnnnnnnnnnnnnnnnnnnnnnnnnnnnnnnnnnnnnnnnnnnnnnnnnnnnnnnnnnncaagattgcgcccctgcactccagcctgggcaacagagtgagattccatcaaaaaaaaaaaaaaagccttgctatggaaaaaaaaaaaagaaaaaacacccttccactgctgagagttggaatcaactgattttatgagattctttcaaacaagaatggcaagtcttcatctttagatggagttccagaagtctttgtgcatttgtcgttcagttgctcaggattggtagcttggcatcccctgttggctgagcatgacagggcaaccctcagtttgatttctctcactctcctctgccttccctgcaggaggacctggacattgctatcgtaccctctgggcacagagaaccaacctggaggaaaaataagtggtgaattcatgagatgagcttgggggatgttacagaatgaatgcgtgtttgccatgcctgacatttagtcagtcatgtgcaactcaatgtagcagcaagggccatgcacccaactcgtcttgagggatggagaataaattggaaggcctcattcgtaagagctcaggattgtgtcaagaacctcaagaaacacaagaaaactctggcaatggggaaccataggtattggtctaagcccttcaaatttgcagtgtaattttaagtagggcctggattatcagacatggttgtaatggattatccattttaaaatagactcttttaggaggtttggattaaaatgattgtgaaagtatggactgtagcatgcaatgaataacccctctgtatataggttcatttacatggacaaaagtcctctgattcaatatacgtagaagacatctacttttagaatctgtaggggccatggggaaaacttccccttcaccctctgaagtttctctaaagctcaactcacaaaacgcagattaattggagaaaagtcataaaaactatattaacctgcacacagggagcatcacagagtggctacccaaaccccctatgggataccaaagcttgtataccatattgaggttacagaaagaatgggagcttgcatcatggcagccctccgataaaataagtggtaaatggtttgtttgtttgtttgtttgtttgttcgttttgagacaggatcttgctctgtcacccaggctggagtgtagtagctcaatcttggctgactgcaacctcgacttcctgggctcaagcaatccttccactttagcctcctgagtagctgggactgcagatgcttgcccccaagcccagctaataattttattttttgtagagacaaggtctcactatgttgcccaggctggtcttgaactcctgggctcaagcgatcctcccatcttggcctcccaaggtgctaggattacaggcgtgagcctccatgcttggccagttaatgtttctttaagatctttaaagtgtaggactctcatttcgtatttcctagatctggacgagggaagtcctggttacatgaatacagagtttctgcagatgcaaatctcccccacaaaaacagctctccttgcatgctgtctgagagccatctcgcatatatgaaataaatatattttgtggtaaaatattttgatttccttcaagttctatagaccaggtacacattaggtgctcaataaggaagttttaaaagtgaaagtatggcggtcaggtgcctgatatttgcaaagcctgatccaaggtgccaggaattactaggaacacagatatgaataaggttgacttggctttctcctatatatcaaaatagtagtccaaccatgggcatggatgagattgttctgcaagaatatttcaggcagttgggcaacctgtgacccacaatttatctccatctaatccaggataagagtttagaaatcaaccttcatgtctttacttctcaaaactgtaagacccaaaaaaacaaaagcccatgttctatttgacattctttgccctatacagagtctagcctggatcttaaggctttgtatttcccttggggtgtaatgcatcacttttctatcttgaatttcttaaacattcttatttttgatcaatgcaaccctctttaaaaagtgacaataatgtgctcacttctggtgcacagtgaggatggaaggtccagtccagcatccaaaggaaggtcacggcagaaagaacctctaaaagaaaaccaaaagaacagccaaaaactgggaagacagactcagagaagtgtgatcagggaattcaggagcaaagagcatttcaacggataatgatcaataccaacgagtacttcagagacatcaagaagggctgaaaagggacaagtgaatgtaactcctgtaaattgtagaattatagtgtattacagagaatgatatttgaggagctgaggtcaatgaggttggatatttctttcaagaggaatggaagaatttgtgccaagggatgacttaccaggctttgtctgagctcatctctgcttggagaccatgaattgggtgttggcacataggtatgtggattttcagttcaatgcagggccagaaagtaggatcaccaaacttattgatgattgaagttttgctagcagggagtgtcacaaaaggcaactgggcagtggaatttgagtgattagcaacagaaggactgaagtggcagatggtggtgggggatgaggaaggaagagagctggtggcttgtgatgatgaactggagattcaaacaagattgcagcaaaggtgttggaaggctggggcagagtggaagtgtttatattccagaggttgaatcattccaggtattcccaggtgcatggcatgcctgctggatgatgaatggaaggcaagttcctggcgttggagaggtcatggaattgggaagccagagtgttcagctggtgccttcatatgactgtgcaccagcaaagatgccatgcacggctgtcctgtgattcctagggctgattatctttattcactttcatggtggaggtttatagccaggcagagagaggggatgcataatggtttacttgcataatggtttactttgtaaggaggaatgtagaaccattatggactgctcattcattaactgagcttccaatattatcaaacactcaaaattgaggcttgaaaattatttcaatcgttggttacctgccaacgtttcaggtttttaacaggtttcagggagtcagggaggtggtccatgcacactaagaaagctggcttccctctgtccagcacagacccatctgttagctcaatggcattaaggcagtattaagagctaactgctgagactatacaactagttatctcttcatagctgtggcacacatcccagtgggatgtgatgtgcagggggatgcacttggagcaataagaaatagaacgtggaagcattttgtcttaaaactcttaagaaaagcaaatgtatcccctagtctctctctcatctgcttccgcagcaatggttggatgtggtatgaattcttaaatgtgtttttaattttcattttgttttaaacatgcgcttcatagagttcaaataaagataaataaatagagcatagagccatgtgacactggctccagactagacagcatgatggaacagagcaggaagcccagaaaaagaatttcatgtaaaatgtaaatgtaaaggtgacccttcaaggcagatggctaagaatggattatacaataattgtgatggtatgattaaacttttaggagagcgattgtagttaattcactactgtctggcattgtggtgctttgcatgtgcttaaatggtataataatggtgttgtgttgatggtgatggtgatgggtgggtgatgctgatgatggtgatgatgatgatgatggtcatgatagtgataatgttgatgatgatatgatggggtatgatgatggcgatgctgatgatggtggtaattatgatgatagtgatnnnnnnnnnnnnnnnnnnnntggcatatgatggctaggattttaatcttgtctgtcttacatactatgctattcttgctgttcctcatatatttaaataaattcccccatgcagattgtgtttggaaaatggaagtactgaagaattccaaaaaatatattgagatatatttatctgatatacaggataattgagaaaggtctttctgagcacaaaagccaagaaataactaactcaaagagaaagattgcagaattttacttcatgaaatctaaaatctcctgatgtcaggtaaaaatataacataaactgaacaaaaagaccaatgacaaaagacttaaaaagcatgtgcatcatcaacataaaaagaaaactcctgagatataggaagagctcatacaaagcaaatgatagaaagataaatatcagaaaaagacattgattataccaatttattgtatcagttcattacacatgttctagcattgggcattatgattttaaaaaattaaatgtttgctaaaataactgaaagagatcagctctttttaaaaattacacataccacattatactgattcctgaataggtcagacttttttcttgtatttttaaaaaaataattaaactacaaaaaaaatctgttgccatttatccagtggagtcagaatctttccttaatccccaatgcttataggaggacctgatgaaatctatggccactgaatcccttatgagtctgccgctgataccatattactgttgtttcagcttacgaggcatattttaaatattcagccaacacctctcatttatgaatcccaaggcatctatgacacaatgattaaaactcaagtgaagcaacaaattgggctttattttcacactgatgtttttcttcattggaaatcccctttaggaaatgtctttcaaaaggctttaggttatctgtgtgtgtgtgtatgtatgtgtgtgtttacacatgatattttacattaaatttatctcccactcatcctaaatcacactttttaaaaaatgagtctgtgaaatctacttattttaataatgctaatgtaatgttaattccccaaagtggaaactgcagttaaaaaaaaaggaaatccattggtttattcagactgtcaactcttggtatatgcttgcagtcatagctgagctctggatcagatgaaatatgacctctgatcgtgtcattgcacacccgtattgctgagattgctgtgataatcatgaaattgcagatagacagtatcttctcagggacttttgacaggggctggtattaagcctctgctgcctaatgaaccaattttttattcaagcagatctagacaggagagaaatgaaatcatttccattacagaccactgtttacctgaatgcaacatgcataatgaggttttgaaacttcaggaaaacatctaggaggtgatgacaacctctacattgcaaaggaatgactaatacaaacccacttatgcgtgattctctttccacgattgccaaacgtatttaataaagagacagtttaaaaaccgccagttacatgcttgactgtaaagatatatagtacactttaggatatgtgctgttttgctgtttgggagtgttttgtatatactttttaaaatacaaggctttctcaaataggatagaccatttgttactggaatataattttatctagggttcttactccttttcattactgcaggaagaaaatgaatttttggtaaattgaaataaaatcacatatgtcaacattttctattgattgtcactttcagaattgtgtgtttgggaagcctttgtgagtgacaaggcgtggaatggaggagacagtagctatgagatgctcgctgactgtcccagagtttatgcttttcttgtgccttcctacgatgtctggacagnnnnnnnnnnnnnnnnnnnngtgagtgtgagatagcatgtcacataccactttgcaacagaaaaaaaaatttaaattgttgcctcagtcttcctgtgtttttttagtgttttccacactttgtataaatgtttttctgattaccaaagtaatccgcagtatgcaaaaccgaagaatatagacacaaacagtacagaaagggaatgacccatgaaatctcacccctaaataggcagcatcattaatagtttgctggatagatttatttcttatatgttgccagtatgacatattaatatcaagatttgactattaagaatattttacacaaactctatatgctattctgcagttttttcttttcgctcaactatctatttggtcatttttccatttcaccatttcgattttcattttacctttcttagactacaatttgtttaatcattcctctgtgagggacatctgagttccttttttaaaatttttttattttttattttatttatttatttatttatttgtatttcaggtagtgctataagtgaatattctgtaaagctgtgtgaactggtgggaataattttgaaataaaaattcagccgagatcaaatttgctggatcaaagagcataaaaaatttgctttcatttgatattgcctaaaataggtatactcttttttcaccatgatagtaggatacccattgataatcaatgagaacgctaatttcctcatactcttagcaaccctggatattatcagtctctttttcatctatcgggtgaaaaatgctagttcactatttttttttctattgtgtgtagggttagtacagagttgtatttcttnnnnnnnnnnnnnnnnnnnnnnnnnnnnnnnnnnnnnnnnnnnnnnnnnnnnnnnnnnnnnnnnnnnnnnnnnnnnnnnnnnnnnnnnnnnnnnnnnnnnnnngttagtacagtgttgtatttcttctcccagggttctttggtcacttttctattggattgtagatctttttcttattgatttgtttgcactatctatatgataagaacattaatattttacttattgtacactgcaaatatttttcctgccttttttttttttgtcttttcattctatttaaagagtcttttgcaataaatttttgtagttaaaccttcatgatgtctggggcttgtaattggaagattttttttttttaaagcttttcttactcccctacaaattacaggttgagtatcctaaatactcaaatattcatccaaaatactcaggaccagaagtgtttcagatttggaatgctttcagatttgggaatatttatattatactcaccagctcagcatccctaatccaaaaatctgaaactcaaaatgctccaatgagcatttcctttgtgtgarcatcatgttgacactcaaaaagttcaggacttaggagcatctcagatttcagattttcagatgtagaatactcaacctatatgtatacaccctttcccttgtattttcacccaatatgtatatggcttcatgctttacagttagatatttcatctgtggaggaaattctgtacgtgtgtgtgtgtgtgtgtgtgtgtgtgtgtgtgtgtgtgtgtgtgtctgtgatggaccatgtgttatttgcctattcttgtgaatttgggtcttgattgatcagtactcttggctggtgtgggacctcttaaaacttgggtaggacaagtgttggtggcccagtgttatactttgtcttcaggtggtaggaatccagttaggatcttttctgcaagggctatgcagagggtcaccataatgaaaccactggaagccaggtggctgtagcccagtagtctcttcccatgaggtccagcattggctgattcatctagctagatccacccttgagtgggcagcaataattagttcaaacctacactgtcactgcaggagattgggagtgaagccaagctccccttgcaagtacatgaggtcctcatggtggtcgtggcatccaccagccaaatgagttaggaccacaaggagggcttcaactgctagagctgtcaagagcaacctatggtttctgggagctgctgatggcttctaacagcctcacttttggactggcttctgtagccaccatttctgggtggggttttaggaggaggtgagggtcatcaggtggttgggcttcccttggtcccatggggcagcaacagtgatttgcaacccatgtgagcaggcaggggcaaggttagggctgggaaagtagtttgcacacaggggagggtgggatggtttggtgactgtaccctccaagagctattttcctcaggtgctaccattcccacttggatgaggagcacaaagccttgaaatcaagtgaaggaggggcttttctcaattgcctccaaagggagcctcctgctttgctcccacatgtcttccccaagcagtgaggagggagcagctggctggtgctactgtgcatccttccctgacctgtgggtccttacctgtggaatctcatctgtatccaggtgtacagccatgtcccccactcagattcctatgatggtcatgaatccaggaatatgtcttttttttccttaagagatgaggtctcgttttgtcacctaggctggagtgcagtggcgtgatctcggctcactgcagcttcaagcaatcttcctgcctcagccccccaagtagcagggactataagcatgtgccaccatgcccagctaatttttgtatgtgtgtatgtattttgtagagacagggttttactatgttgcccgggctggtcttgaactcctgagctcagtcagttcacccacctcagcctcccaaaatgttgggattacagacagaatatgtttcttctagagtagttatgtcacttttgcaaagggagctaggaaaaagaaggaggcagaaattggtctatgttctccttgtttctggaatcttatgaaaccagtgctcaagctgtttagatttctgcatttagaaaagagggaagagaaatacaactcatgagatcatttgaagagaagacatttctatcccatgaatgaatgcatacttaattgaaagcagacagttcttgatctgagccctttctttggcatcatgggaccattttcaaaaaccaaaaggcccttaatggtactggcagcattaaattgggggttcagtgctgtgttgccatctcttctccttgctcttcttgtgttcactgtcacattagactgtgtcctgttgtcacgctgccgctgtcatctgctccactgataatattaatactactactaataaagttactcgttcttctctcactatatacttactgtctgccaggtgttatgcattcatagtagttctcatggcagccttctgcgaatggaactgtattatcccattttaaagatgtgtaaaccaaggtgcattggaaggcagtaactagtctcagcaagctcacaaaatcagcagattgcagaggcaacattcagagccatgtgtatatggttccgccccacacagtgtatactgggacgatgatatcataccacttctggcttcagcatattgatggcagcagcggtgccaagaaaggacagactttgtgaccagattgcatgtgattctatcccccactgaccaacctctggcggttaaatgtgggcaggtgacctctctcactgagcccccacttctttctctgtaaaatgagatcatttcattgcctttcttgctggggatgttttgaagagtgccttcggtgtattaagcactgggcaaacattcactattgttaggaagccttcacacagagcttttgttgcatcacagcgtcagttgattctcttttctgtgcatcttgactttgccgtctctcctccaagtatattttattttgctttttggtaggaaaggggagcaaatggccatagctctcttagggcacaatttcgtgtgttcgagtcttgtgacctttcgttggtttggtatctcaccatgagaaaaatggagtaaatgaaatatttccataactttgtcatctgagatcatgtgagcacgcctctctgcctgcaatctgaagagtcacttctccaacaagcctcgtggagtagaaattcaggattgctcacagagtctgctgggagctaactgtctgtcttagggtgatttctgggctcacccacttggactgcatctctcaacatggcatgcagcgcccgtggtttgggggcaacagtggcttaatgctttcttggggaggtaaacacttaggaaggaaagtttctttacaacaggattctgtaagtcattttatttgctctcaagaagtagaaaaaagagaaggttataacatagcatatactttcgtatattactccttctcagtgcaaaatggatcttgttcattgggtaccccagataccactgaagcaaaaaaattaaaacagaacaaacctctgctgtttctggcgttaccttagtgcctgccatacttaacacaaaatttcatttatttaaggtcactcacagtgagtgtaccctgactaatttagctcatcaattacttaaattttaaaacaaatactgatgctcacctaaatgaactccatttagtcagtcacggcaaaatctaactgttgcacctattcacacttccagtttgtagaaaattgttagtgaaagaacattgttgtcataattttttttttattctaaggtaagacaatagccagaacaaaacaaaaatgacaaaattacagcattttaagtcttttaactttaatcacttgaaggtggaattacctgtcaaatacctgtgccgacaatagctatttcttgtctgccaagtttcatcagtaacaaccatctataaatgcttttatgcatccgatttgttgcaagtaaatataccatactttaggaagaaaaaaacctagagaaaacaagcttctttgacaatctttgaagctttgagcgctgactttgagaaaaacgattttgttttgtttacacaacttgacattttggttttgcgtagtgctgccttgcaattaagcataggaaggagagacgtgaaatgacattacaatttatttggaaacagagagaattgccatacttacagatagagtagatgcttctgtgttactatttctttgtaactttatccttgcagaacttcccgagagggtgtcccagcatggggatgcatctgtacaaaacacagctcttgtagacaggagtgggtcttgctcagatatcgttggccaagaagggcttcagtctattcagtttgggagatggaaagggagtctttgtacagaacagtatacactgagttataacatccacaagtggtgttactgcctggatccacatcatagaatatacatccacattcatatggatttgcataaaagcatgcagcgaactacacataatatgtagcatatttccttccaccatgtctcacccaaagccagtaaatcctttagctactcatggctctgcagatggcttctgcttggtttggtccatagtcttgtcgttccttaccatgttctgcattgcatgccatgtgctttgatccactgcatgccatatgccaagttgaccattcacagaatagtcatttcctggaggaaggtctttattctaatgaaattgctcagtccctctgcttgcaattgcatcagagtcctgcttgaagcatttcttaatttaagagtattccaaagaatacttttctcactttgccactgaaccagtctagttaggactgaagatggaggtcactgggcaaggtcatcctttcagtgcatgcttcctgacttcaaactatattacaaggctacagtaaccaaaacagcatggtactggtaccacactgtctcaatgccagttgcctgatatttggcattggcttctctttgtgcttttaaagcaagagtgggtagggtggcagggcttgcctctgttttgggagggagaagaatgactttctaggtgactgctgtctaaacactagttcaatgcaacaagcctcattggctctcagttgccatctctacttccgggttagacttctgtgcccttgggcagcctcctggagtgtgatagttgaactattcatgcccctgaacatgagccccacaaaaatgtttattggacttctttacttggtactttttaaagagttgaggaatggaacttctacataaagccagtatcaactgaagtatgattaaagacaaggccggaacactagggacataaagatgagaaactcttcattgcctctcctcgactatctggtatgagtggcagtgctggagttattttccactgaattcctcaatgattctttttgtgacccatttgcccactaatttgatattccccatatgtgctgtagtcagaatatagcatgctttcaatggcattaatgttaaatcctttgctcttgcaggtgaatccacatcttcgaaaatggcatttttttttcttccatcatcctattcttgattttaaatgtatgcctcagttacacccatatggaaagctcaaagtaaaccagggtatcagaaaacccagtgataacagtgcagcaagaatgaaggatatgtagatattgtgtatgtttttcttctctctccactttctatttgagtttccagtaaatctgcatttgtgacaaaatagtaaactttgcagaaagaggtttttgcaacctcagattacagatggaaacagtacatagcaggaaaaatagcagaagggttagcttgagaccaggtgtttgaggctacaatgagctatgattgcaccactgcactccagcctgggcaacaaagtaagaccccatctctaaaataaatttaaaaaaaataaaatttgagagagatggggtaagggcattatggccagaccaaggtaggcctggagagccaaaaaaaacttttaactgtaatacatagttgaaaatccattgtatagagtattgattttggtcctctacattaatttagcttataaatcattaatctctgagtcttatcaagtctataatgatgttaccatgtttaaacatctgcaaacctaatttcaggttcttgagcctgaaactaatattatcttacctggaatttgtatctcaaattaaaattaatagtgtttaatgttgtcttataaattatttctatcgtttccatggtatcttccatttattatggtatcttccaagaagataccataagaaattatcaaagaatcaagttatcaattatcatgaccacgctaaaatggtcatgatggaatgaccattaaaagaccatttggctagttaattcagatgggattaataaaagtacatgagagcatctgaatactatcaataattagcagcaacacaattgcaccacaataataataaacatttaagacttacaatagctaaaatgcaaaagcatttagtctattttagtcacatctctaagcacaatcttagtcatgcgtctaaacatggattacttaatgtaatccctacaactatgctacaagatacttttatcatcacctctggtttaaaggcaacaaagcaaaatttggttaggttgagcaacttgtgtcaggattgcccaacagccactacactatagagcttcttggctgcatgagaagagttctggattgtgaattgaattcagacagtagacctacctggttgctggggagagtctcctgctctggagctgcaggttgtgtataagacaagtctgtttggaccaatggcctctgacagttttcttctcactcctgtattctagtattccatcaagtcctgagttcttgagtttgcctcagatactataaagatatctgggttcaaagttaaacaagggatgtggaggacagtagaagctatgggtactacaagggtgttttgggtaatgctttttctgccatctaaccattccaagcacatttaattttgctaattaagtctttcaaggcatagaaaggaacgacattagaatccatgagtttgagttaaagctgtgttctaaataatactccactgaataccaatgtgtatatttgaaaagtgaggtcaaaattaggggtcagaactagagttgaatacctgttgctttaaagtcatggcccaattatagctcagtcaaaaaaatctagtggaacattcctcctccatgaatttattcagcctgcttgaaataattgaattaattaattggattaaatgaagtaatatatttagagtagtgagcatagtgcctggcttgcaagacaggctcaataaatggtaactgctatcattattattatcattattgttatgattactcttctttccacagatgtgtaaagcatctttgcttaaaatgtgcctatacctccattacattgagtagaaaaatcatagatgagaaaacgtctataatggaaaactaagcagatatttgcatcatcttatcttttttattactagctcaccttatatttaaggtatctctggtaggacccacggtccctagaagggcccaccaatagcattggtattaaggatcttggggaaagatctgcttctctcgactaacactgcaagtccccacataaagcaaacagatcatcctggagttaggaggatattgcaaagaagctgtgactggcaaactgaaggttgcatggattaaggaggttgcaaaacataaaagatgagtttaccaaggcattaatcaatctgtccatgttttaattcaagtggaaagaaaggcttggacctgtgactgatgtacaaggtgtcagcaaaggaaaacatcattttcaattttgtatcttcagctttagagatggtaaaatccaatgcaaagacctagttgtagcatgaacrtgagtctcgatggtgtggtagagcatcataaatatgaagaattctgaagggctttgtttcccagtccattgttcatagcctctggccattctcgactcacagtcctccctcccttgtggctcagtctggaggtttaaggttgcacctccagttggatattgctggagragttctggctgatctgtgtccagagctttgcattgacttctgtcatagaaatgatgcaatgagcatctgtgcaacctcctactccatggcacaggctgggttacctcccagggcaagttcagctgatggccataccaaacagcaaatggctgtacccgattacccaatctctatctttgcaagaagagaaagtccaggaaatacaatggcattgctggatcaagaattgaaagacagtgtgctcactttgaactctgctctttcaaaacatgtcctgctagtctgaatgcccatggctcagggaaaccactctattgtgatgtcgataaccctatggaaacgatgtccaaagtggcttcccttgagctacaggcatgctgactttgggtcttctcccagacaccggaaggagtatagttccacagaacaggtacaatgactttgttcttccccgcaccttttcccatctatgcaggaaaacactggtgtgccccatgaacgtgagaacaagttggagttatttaaattatttccagcaaatgcaacaccctggaaaacacacaagttattgttaatccaagaaaatagtggagtagatccgtgaaggcatcccagatggtgagagcagatgcaagtgcaggagggtaaatcacacattacgactgccattagggcaaagatgggtttaatggaggaaatcacaacattatcacaacaaccaggtacaacacaatataagaattaattaccaggggacaatatgaactcaggaacaaaccaaagagggaaacccagtcaagtgaagacagggttatctgtagaatggcgacattgcactcttacagttttccatgttttaagtaccctaataattccgattatatgcatagtatgattatttactatgtttgaaagttatgtgtcaaattgtctgaaactagccaagtctcattatgagcattgttactgagaactgtgaaattccagccatctctttttatatgtcaacattgattaagcatttagtcgcaggtaacctttcctctcaaagtgtggttcttgggcaggtaccatcagcattatgtaagagcttttttttttttttttagaaattctcagatccccactctaggtttactgaatcagaaccttcattttagcatggtcatgaattagccaattgaaattcaagaaacattggtatataaggtgactatactatgaaacctatatgctaagtacaaggtcttgtgtgttagtttggttcagccagcagaattctttaaaaaattgtttaagttaatctaatcagtttccgaatatcacatttgcttacttttccatagttatttaaaaaacgattagggatgtcttcttaacatgttttgaatgaaatttttatgttaacttatgacatgtgaaagtgagtaaattaataaaaagcatgatgatacacaaattaatgcatgtagtgactagttgaatgggaagatcttgcattgggtacgtccacccatcaccgtcgaagagaaatttatcctctaatccaagaacttcagagaggatgattctccatcatctatttgaggcagacaaatttgcatttattaacataaactgcccatggcagaagtttgagccccttgtctcttgctcagtcattaggggagataggagccactcttctcttgttattcaggaagtagatacagtatgtgctggagttcaccatctgcctcccagttccttagttcctgcaactctcctgcaagagtttcatttccagtgccctccttagaccttgctgtccacttggcatttgactgattgaatcccagatgaccttttatgcaggagttgcattagatccatgttgagtacagcaaagcacaacttctcctatttaactattatgccattttgcattcttctcttgaaaaaaaagggaaaagccatacaaacaccaatattccctgcagttacattgagtaggtaggaaagacttccttaataaaccccccaaaagacagcacatcacttttgtatctcaaccaacatacaaaatgcagattatcaactttatgcctttttattttggtcctatactatttttcttttatgtgtaaacttttagatttgattttatactgtagataaatcatatgctttccaatgtctgatctgaagggtcccttgagctccatatggatggaggagatcaggactaaagttttggaaatcttgaccatttatttcaggaagaagtactagattgaattcacctatatgaaatggacattgtatcaaactggagatgatacacctatttgtgcagtgacagatataccctgatgtatgggacattggtgttacttctaatcctaacaaagaattccctttctgggactagtgacagcagaatatctctgtgccactccacaatggttcaggagagcatgagaataacgctccaaaggccacatccctgaagtaacacctagcattttatatggccagcagagagtcgtagccacccccaggtggtacaattattgcaactcttatctatcttaaaattctagctttagctgaaatactggagtctcgccatctctgttggtcagatgtaggagtaacttgctcaccagcatagcttcagggagactttagggtaccattgtgccctggagttacactgagtaagtgaagaggctttcttaattattaacagtgggtgcctgtttaaggggatatctacctatctatctagcatatgtgatataaaaataaaacacctatgttttatattatatattaatattatataaaataattatatatttatatatatataaatatattttatttatatatttatatataaataaatatatttatttatatataaattattttataataattatgttatatgtatataacatatataagtatatatttatataattataatttctatataaattgtataattaaaatttatatataaagtatataaatatataaatatataattatataaaatatataaattttatataattatatataattataaaatttataattataaattatatgtaagtatataaatataaataacatgataataaatatataattatattaattaaatttagaaatattataaaacataatttacatgtatacttacaaaattataacattctatataaatttatataatatacgtataaaatatataattttatatatgtgtatataaaaatatatacacatatataatataaaacatatatacatatatgtgtgtgtgttatatataatataaaacatatctatgttatatttaatgagcctaatgcttccaaaagtataactttcatatatatatagtgacttcatagcactttgctccagtattctgtctgagtgtacctaccttgtagaagaaaaggcaaagcagaaatgaactaaaatgacaaggatttggtgaggcaagctgagagttctaactccattgtaaagttaaggaacagtgagcactccctgtacggccagtccaggatgaagtgttttgggtggaattcctcattcttccacagcaaccccctactattatccattatcacctctgacttagtggcagaggatcccagtgagaagccagagacttgggtttcaaaccaactcgcttaagtcaggacctagaagcaagaactttagcacttagtcctatgctgtggcacctcactcacctaagacctcgaattctgctttcatgtttgaaacccttctctctctgcactttgtagctcagtgcctgactcttaatagtagcttagtgcttgtttgtgggctaaataaatggaatgacagaactttctagaatttaggcttcctctgcaacccacatccacacttgacagaggaaggagccagatttttgcatttccaaggtttcttctttgggactgcaaaaggtctggttaggaagccctcacattgataagcttgttcttgttatctccagttaaataacaaagtgctcttgaaatggcttattttctatatttgtttccttcagaaaacaaaggcagaaagctttggagatagaacatttcatttacaagctataatgcagctcaccatcggcaattcaaaactatcactctatataaatcagtgtcattatatcttgagaaccttcctgagaaataatatttgcagacctctaatttataatagattgctctgaaagcaaaaataatacagcagcatttgttctcatgggagatttctgttcacagtgtttaggagggaaacatgttagacctttgtaggatcaatgttataaaaaattaaatgtcgaatgggctctgggatttacaaatgagattctggcttaagacctgagtagtatgggatccagactgtatcttttgggaaagaatgggctaaaaggaaattagaaatctgaccatttctcaggaagttgagctaaatattctaccatgcatacgtgcatggcagcctcagctactttctcttgtactaatcccagcccagttgtatagggcactttaatgaaagtgatcactctaggcaatgaagaagaaacttgatgaggacatgttaaatatcatggtcatttgaaatattggaatttggaggagatatccagggataagyattaagatggggaaggatgcaggatatttcagttgagagaatctgcataataaatgcagctgtaaatttgtctggagttaaaaataggcaagaggagaagctgtaagtaggatgtagctggccttggctttggggataagagctgtccctgaaaaactctgtgacaccccagcctttagcacacagcccgtgtaaggtgggcacttcataaacccatgttgaatgaatgcatgaggaagtctaggagtcaaaactgcatttgaaaggcatttaaaaaattaacagaaggaggctgaggcaaggggattgcctgagcccaagagtttgagaccagcccgggcaacaaactgagacccaatctctacaacgaatacaaaaaaaaaatagccaggcatggtgatactcacctgtagtcccagctacttaggaggctgaggtgggaggatcacttcagcccaagaagtagaggttgcagtgagccatgattgtgacactgcacttcagcctgggagacagagtaagaccctgtctcaaaaacaacaaaaataatagactatttttgagcagttttacatttacataaaaactgaacagaaagtaaagagtgttcatacactctcccctgcacatagtttccttattatatatattatgtattcatgtggtatatttgttacaattgagccaacattgataagctgtgattaactgaagtccatagtttccattagggttcactcttcgtgttgtatgttctgtgggtttggacaaaggtataatggcatggatccacaattacaggatcatacacagtagtttcactgcccccaaaatcctctgtgttccgcctcctcatccctcctttctcccaagcccacggtaatgactgatctgtttaaggtctctatagctttgcctttcccagaatgtcccatagctgggatcatacagtatgtagccttttcagattgactcctttcacttagaaatatcttaagatccttccatgcttttcatggctttatagctcatttctttttagctctgaaataatctttcattgtctggatgtaccacagtttatttatccattcaactgctgaagggcagtttcattgcatccaaggttttgacgattataaatagacatggtataaatatttgtgtgtgggtttttgtgtgcacatgaattattatgggagacacatttttataggaaatttctttgcagcattttctttgtgcagatacttctacatatagaaagatgaattttgtttcaaaggagggtgtatggtcatatgccctttactaaatactaactacaatacacggaagcaaattcctaagtcctctgctacctgcctaatctgtgttattttacacagaggttgttgtatgagcaaaagggggcatttttctttcaaagtataaacgggggttatagcgccttattgtttccttctatttcaactcattaagctaattaccattttcaaagtaattaggcttaaattagtgtctcagccaaacaaccccaagcccgagagcacaggtggtttgcttagctgcaccagataacaccataataaatgtctgcctgatcatgatttatcatgggagacaaattgctaaaatggccctcgggtgtcttattttttggttctgagtatgacatttacatatatggtgtgggttctgggaatgtttatcatttgagttaaaaattgagaaacattgaacatactctagcccgtggcacttgcaatcaaatagcaaaaatatgccttgccacaaatgacttggttgttgcttttgcatcagaaatcatctctgccacctccatgggcatctcactctgcagtccttctccttccccttttcgggaccaagtgggtgtgagtgcaacctggagcgaagggtctggcactgcagggtgtgatctacctgctggataggatgtattccaaatcctatatttaattatttcgactgcagaggatgcctgcggccattgtagaatatcagttgttgtggacatcctagtgtgactaagagcccacccaaaatttgattcccatgtctagaccagtgacagcatgcacacactaagaggatatgaaaaggcttattactcatataatgtggctttctgaggagagcaggtgatatggtttggctgtgtccccacccaaatctcatcttgaattgtagcacccataattcccacgtgttgtgggagggacccggtgggagataatggaatcatgggggagattttcccccatactgttctcatggtaataaataggtttcgcgagatctgatggttttatgcggggtttctgctttcgcttggctggctctctctcctgcctgctgccatgattgtgaggccttcccagccatgtgatactgtaagtcaattaaacctctttttataagttacccagtctcgggtgtgtctttattagcaacgtgagagcagactaatacagcaggttactaaaccagtacaaaaaatagcttgagagagctcggaaaagaaacggattctgctgttatggtgattagtacttggggctgggataagggtctcttgcatgcagacaggggcttgcatagttccaacctcccaccggcggtgaaggagggagcgcccaggatttcttatcagcctgcgtggcacgagcagaagagggagagatgaggcttaaaaactcttagcactcaaacattaagaaatggagtcaggctctaatataccagtcaaagcctagcagtatgcactgacttattaaattaaatcagcagcatatgactatgtagagccctgtggaaattgtacattgtctacctctagtttgcccatcattgtcttctgatttgagagctgagtgatagcttcctaatcagaaagtccatgtttcagctccttcttcaaacttcaactttcctctgtttttttcttgcagaaaattataagcatatgcagaaatgaaatagtacagttaaacctccatatgcccttcactcatatttaacagttattaactcctggctaatcttgttgaatctatatcccatactcatttattctcgccctgcattcttttgaataagacagcagctatcatgttcctcaccacctccatttcatctacgggtatttcaggatatatctctacaagattttttttctctggtgtactttttactcctctgattctcactgagtctatctattcacctgttcaggatttgagcattttgagttttcaatcagatttaattcttactttctgattcttccacttcttaagtatctgaacttgaacaaatcggccttttacagcattgttgctctacccataaaatgaagctagtgccatttactcatagggttcagtgtggtctaaacaagataatatgtaataaaattctctacatgtagacagtgctcaacagagggtagcaattattgttattattattgttgttgctattattttttgaggggttatctggaggtggtatacaatgttagttctggggaaagaaggtgaggtcaggaggaatgttgatatttgtgatggacggtttagacttggagaataactcccggttattcctctatcaatgaggaatattgatattcatgtgagggatagtttagatttgggtatctactgtaagtattaaaagagaatattctcataaaatatctatatacatatttgttcacataagaggaacatcactggtttagttttcccatccaataaagaaaaatgatagacttctttatagccttagagccaacaccagctggtgagaacaacctttcagcttctttcttctggcacctgcctccaagtggctctccatcaatgaacctggtacttttagaatactttctcaggtctccctgcagaatcacttcatgatacccagaggttcaaatggtgcttctaaatggcactcaagtcaatgaatcttggtgtctattctaagaagccagccacagccagtcttgattgcatcacgtctcatgctgggataaactccaatatgtaagaacgtttacttccaccttgagaaattagccacccactgagtagggcaaccatctccatttgctttatgaatatgcattatttttaaatggagtctttttcccctccagggcagatcttgaaccttctggatgagctgagattggctaatgataccctcatctacttcacatyggaccagkgagcacatgtagaagaagtgtcttccaaaggagaaattcatggcggaagtaatgggatctataaaggtgagaaatgctgggatggagaagctctggcctctcagctcatccgctggtcacttttttcttgattttcgagcttttccatagttcttctgctactttgcaataggtaggacttccttgtgtcatggagacagtcagaaggccaaagtgaccatttctgttctggttcccacagaatttaaaagcccacatcttgtgtcaagacattagaatgagagtatgtatctccaaatgtaaatgcagcctcatataatgtaactgattaaaacaagaattcctctacacctatgtgtagatttcctgtcactactgtaacaaattgacacaaacttatgggcttaaaacaaatttatgaacttacagttctagaagtcagaagttcaagatggatatctcactggtctgaaattgagatgtctgtagggccttctacaagctcttggggggaatctgtttccttggctttttcagcttctggggacttcccactttccttggctcatggccccttcttccatgtggaaagctaacaattcactgtcttcaaacctccgtgtctgtgtccgacctgtgcttccataatctcatctccttcacttactctgacacccctgcctccctcttatgaggacacttgagattacgttcggcccacttggataatcccacatcatcttcccatctcaagatcatgaacttaatctgcaaagtgtcttttgccatggggtgtaacatattcacaggttacagggattaggacgagggcatctttgggagaccgttattctgcctacgtgaacccacaatagtattttgagctaacacttttcaaaaattttttttgcagcattagctgagccactttcatggtggattgggcatcatgctagtcattggagatatttgatgagacccagctactggcttgtatagtgtatgctctgccaatataagatagacatatatattgtctaatatatacatttagacatatcttatgtacttatacatagctaatatttaatgtctatatacattagacatatctaatgtctatcttatatgacagacattacatgacacacaacgtggcccatttcataaagtgatatgatacctaaaagggtgtatttgtgctaagggttaggactccccagccaaatctgcagtggatatgggttgaaggtacaagaagagatgacgccttaaccaaaaggggagggtgaatcacagtttacctgcaaagatatgaaaggatgatatagggaatgcttttatctatcaatttgtttagaaatattgattatcttctgtgtgtcttgcattgggccagacacaacagtaaatatataacatggtgtcttccctgaaggaagtcatgttgaactggtaggtgggtgggtagatgatgacgtgaagcctgggaagacccagtacaatttgacaagggcgctaacacttgcatgcacaagatactaatggcacaaggggaaagagagcctcacttggctgaggggttcccaggaatgtttgcaaaggagacacggctagaaaggaggtcaccagtgggtctgtgcctctgctttctttccccttctgtctctttctgctcttccaaccccttgctctcttttgtcatgctggaaagaaggagaagcagcaaatagcttgttctgcaaactgcaaggagctcagtaaggccagattacaccatacctgaggcaaagagaaatagtcctctgtagtctatccctgcagcataaggctgcaggtagcttatgaagccttatgcttctagttacgtctctgtgtgcacatctggagccctatgaccggctgagcacccatgggcaggaaccgtctcctacaccttttgttacctggcacctagcacaaaaagatgcctgttaggtgcatctggacaaccttcataggctgctcagacctcctcccagccccttcctttaggtctcattgttaccttgctcaatgcaggacacataatcaatatgtaatgtgggtttgattaatgaaccggtgtgtttaatctgaacaggattaaccccagtaggctatcactctttcagcccttctctgtgtgccatgttactttaaaagtagtaaaaagtggaaacatgtattcctaatatatgaagacttggtattaccgggctgaactggggtccactcacccagcgcagtaaggccaaacatccacaccgaggttttgcagtgggagaaaggagggtgtttatttgcagggttccaagcaagtagaatgaggcctctctcacttaagattccacttccccaatggtttgcaagcaaaggtttttaaagcctgggaggcagaggctacaggcaaagtcataagtctatacatggagattatacattggtttgacctaaaaaggcaggacatcccaaagaagggcgcccacaggttataggtggcttcaaagattccctgatttgcgattggtttaggaagtgaagctttgtctgaaaatttggggtcagcaaaaacaaacatgatatctggcctgtgggcgtggcttcctccaggccccttgggaagaaatttggaacaaagaatgtcagtcagagttcagtcctcagttcctctttacctggagcctaggtgccagcagatggcattttccatttggaaggggtccactttctgaaaaacaactatgggacatatgttaaagtgttatctgtagttattacagggaaccaaacattttatggctctaacttccttgtctattattttactctatgattaccttcttgcttatcagttgctcatttacttttcaaagctagctaggtgcctggaattttctttgaaggaactcaagatttttccttatttccctgcctgggggagtccagcaggcccctaagaggggtccctgctccatctcattggtgtttcagtcttattttcacaaggctataacctgtgtggatagagttgtttttatttcattttgtagatgccagtgtccctaaagactggagttccaggctgcattccacgctctagttcatccattcattcattctctctcttagtgcctgttcagttccaaaatagcttagcagctgccgaggaggagacgtgtacatcaatcacaattctagaagtggttggagagtaatagttacttaagaaagttacctatggaaggctatagagccccagggcagggagaggggacccctgactgacaatcccggggaagtttcatgggacagagaaggagctgcatcacgttttgcacagatagttcaccagggttcagagacacgagaggtatagatcagaaagggagcctcaatggtcttgaataatggttgggaaccccagttttatcatacaaccctgcaagcatgtcaggagctactccataaatttcttttttttttaaagaaatgtatttgatgtattagaaatgttttgcttgcatgctggagagaccatgaatgtgtaacatgattaatgtctcagccaccgctctattgcaaagtattatccttttgtcaacttatttgaaatcaagttcacagtgaaacactgttaaaatacaatgccctaaaaggaagatggggtttccttctagttatgggaagtaggcttctgagtgtcaagtgtcaagatatcttgttctctagagctgcaaactcgaacacatacctgtggtttacgcagacacagagaaatcataggatttaacaccctgtttaaaatagcatcctttctaaacaatgatgacttctactgtccatcaaaacccttcaaaggactttgctatttgaacttttttttttccttttgagagaatctcgctctgccacccaggctacagtgcagcggagccatctcggtatttgaacttaatgattctactgtattcccaagtcaaatctgtttccctggtgaaatctatgggcttcatcaatgacagagtggataaagaaaatgtggtatatatacaccatggaatactgtgaagccataaaaaagaatgagatcatgtcttttgtaacttggatggagctggaggctattatccttcgcaaactaataatgcaggaacagaaaatcaaataccacatgttctcacttataagtgagagctaaatgatgagaacttatgaacacataaaaggaaacaacagagactggggtctatttgagaggggagggtgggaggagggaaaggagcaggaaagatcactattgggtactaggcttaatacctgtgtgattaaataatttgtacaccaaacccccatgacatgagtttacctatgtaacaaaccaaccttcacgtgaatcctcaaacctaaaataagttaaacataaataaataaataaaataaaatataccagacttcttgttaaaaaraaaaatctatgggctaaatttggtagaatggctaggattaaatcatccttccattaaattcaataggttattccttttaataagaggtacattacatgtctgctgcagtctacatttaaaaaacaattatctaatattccaggggtgagggagtaataataggactgtttcatttctttaaggaaatgactttgcagtatgattattctgtttaggtttggatatgggtaaattttgtctttgtcaaaatgttctagcataaagggaaattgggaaataagggtagggtcaaatgtatactttggatataattctggtcaaagtttagaaatcttggcagtaagtcctttatacagtagttcctaaaatatttccctctgagacccttctaaaataaattttcttctattgtccacatgctttgaatgattgtgtcaacctaataaaaccaattttctaaggaataatttatcttcccatttaataattaagaaatcattatctccattagggcttccacttaatttgactgtgttccataccatgtgattatgattttcatagacagcaagataaataagtaaaccactgaacatcccatagcctgtgaccctttgtagctgttaaatgtaaaattttccatcagggctgttgacatttgaaaatgttcacattgcttctttgggaccttaggagtagaaaccattgcttgaaactaatagaggatttaagatttctatgcaatccttaactctttctaggaaatttagtttatggctctcaatttatgttcctacaccctggacaggtattggatctatttggatcagcctggtgggtgagtcttgagaagacgcttcattctgcacttgtatctgtgtcaaggcagtagaacagaaaggagttcaagctgagagtcctgcaaattgcagttctcttattgaaggagcaagtggccccacccctagcttcacttttctaaatcagggttcaaagcctttgagcctctctttgcatgaggagttgcaaacaaattcatggaagtttcttctcaaccttcactgcagctgcttctcacctgatccacctctcaatgttgaagacctccagggctctgtcctggcccccttccctttatcttcacacttgccctatctgatgtcatccaaatccaggacgtcatatgacatccaactgcagggcatcccacatacagagccgggaccctgctgtggaggtccacattgctatgttcagctgcccacttgccacatgacctggaagctcagtaggcatgtcatctcggaaagatgcaagctagacatcaaatgcaagctagcccaagcccacacatgcccaaatctgcatgatcttattgaatgctttaccccgtgactgaacctcagtgctacgatatttgctggttgatgggcttgttttattttgcctctctttaacccctatgtatcccatattttggaatcacatcctattcactttattttctaagtttatctgacattggtcatcttttgtcagctgtatcaattttccatcttgtccaggccactgtggtctgccctttggacttctccagtgtgcttcttggtggtctccctaattctttgttctcacactccgttctctacccasacactggagtgagctttcgtaaacatagtgtcaatgtactctattgaatttctgaggactgacataactgttagcaccacaaactgggtgacttaaaaacagcagaaagttgttttctctcagttctgggggccaggagtctgaaagcaagctgctggaagtggtgggctccctacgaaacctctaggggagaatcctttgttgttctgccattaattcttaaccttccttgacttgtagatgtgtcactccaatctctgcctccaccttcacatggcttttttcctttcttcaaacactctaatatcaaccagccatggtggctcacacctgtaatcccagcactttgggaggctgagatgggaggatcacttgagctcaggagtcggacgccagcctgggcaacatagtgagaccttgtctctacaaaaaacatgtaaaaattagctggctgttgtgttgcacacctgtagtccaagctactgaggaggctagggtgggaggatcacttgagcccaggagtttgaatctgcagtgagctatgattgcaccactgcactccaggctggtcaacagagggagaccactgtctctacaaaaaaacagtttaaaaaacaaaattaaccaggggtggtggtacacatctggagtcctagctactcaggaggctgaggtaagaggatcgcttgagcccaggaagtcgaggctgcagtgagctatgattgcaccactacactccagcctgggcaacagagcaagaccctgtctcaaacaaacaaacaaacaaacagaacaaaaaaccactccaatatcttctcatccactgaaaatacaatgtgaagtctgcaccccagctgtacagttttctcctcctctcttcctggcttttcctgggtcccccaaccccttcatcttgttcccacctcagagtctttgtgttagaaactcatccttccatctcatctttggatggattttatctttcactcatatgttgcctttgtaaggtctccctggaccaccaaatcaaaagtccttgtctctcccaccactttattctaattgctcgcatctctgataacttacctgtttattattttatttgctcatagtccttctcccatggaagctggaatctgggctgcctcatttaccactgtgtcctagtgccttgagtaaccatggagtaggcattcaataagaacttactgaatgagtagggatatggtttggctgtgtccccatcaaaatctcatcttgaattgtagctcccataatccccacatgtcatgggaggcacctggtcagaggtaattgaatcatgggggcgggtctttcctgtgctgttctcgtgataatgaataagtctcatgagatctgatggttttataaagggcagttccccttcacacactctcttgcctgatgccatgtaagacatgcctttgcttctccctcacctcccgccatgattttgaggccccctagccatgtggaactgtgagtccattaaaacttgttctttataaattacctagtctcagatatttcttcatagaagtatgaaaatggactaatacaaatagtgaacacttctcagatttctcttccttctgtctccttctctccctatttcttccctttctcctaaaatatcccttagatgggaccagaataacttccttaagattttcttttagttgagtttagagttgtttgccttttcctcatactacaagatttccttattctcagaacagaacagttaaactcatatgtctggcttcatttccatccctctcccaagtcaaggtcaccctgaaggaggctcttcctccctccctttttctctgcctacaggcaagtaataaatgtcaatggaatggataaattaactctatagatggcttctgcagaagtgtgggggtgggggatcatattttccagagtgttcaagaatatatacttttttttcatgtgcagagaaatgcttttaaaattccctgatggctgcatggaaggcactgctcttcaggcattttttccttaccttaaggccaaattccaaacacgtggcttgagtccatgtcacttatgagttgcttcttacagtcactgattttgacatctcttcctgtcattcaataacacagctttctgagagcaattgatacttttattgtgagagaaaaatagtagcaactgactctggtagattattacaaggtagttatgttcaaatgatgttggcaaacattgtcattggcttcccaagagtaggcaaagctgcctcttcatgctagtgtcagtatttagtcctccagcaggtatccacagccttttaacctttgaaagatcacatcagtctcatttatgtgttcatgcatttggtttaattttactggcatgcatttatatattgattctatagaacatgccaggcacagggctagctgatagggtataaaggcaaagaataaagggtctccgactgctactaatttacattctactagaagctagtagcttaaattctactaaaagacagaatgcctctaaattctactagtttttaggatagatatataagagaccacttcagtgtaatgtactggtaagggaactgttaaagaatggtaaaggcagttagcccaacttgggaattcagagaaccttccaggaggagctgacattttgcaggttgacgttttgcattgttggctaggagaggacaggtgggaagtacacagtaggcaggtgtgaaatacttatggggagcgaaaaagcagctcagtatttctagggatgaaaatgtagctgggcgcagtggcttatacctgtaatttcatcactttgggaggccaaggcagaaggatcgcttgagcccaggagttcgagaccagtctgggcagcatagttagaccccatctctaaaaaacagatttaaaaattagtcagatgtgatggcatgtgcttgcagtccagctactccagaggcttgagatgggaggatcagtggagcctgggaggtggaggctgcagtgagacttgattgcaccactgcactccagcctgggtaacaaagtgagatcctgtctcaaaaaaaaagtgtgagcaaggactgacagtgtcaggtgatggagacttggtatcatgtccgggcattgagctctgccttgtgggttatctgagctgggagtagggaccagacagatgggttaacattagtgaacaccctgaaaatggaagggccatttggaatgattgggactgtccactttagcagaaaatgcaactgctggatcaccactgtctcaggcattgccgtaggcagagtgatttgattgcattggcttcagttgacaaaatgtatgaccttaatactacacagttaaatgtggcagagcttgcacctgttgttgaaaaagtcacatggacaggcaggagattgtgatcccgtaatgggaggcttgaatttctcacttttgagatgggcaagattgaagttgtgtggtcaagcgtgctctgcaggagagaaaggttgggattccgggacagcaaagaggtgggaaagtgagaaggatgtggccacggtgggtaactgggctctgtgagggcagggagtgggcatagctcatgcttatgggctcattttctttgatgacatgcagggagagtttctcttttgatagtcaaaggtcaagctgtttagtatatgactggtggagaaaattttaggaatgcaatgtattagggaaatgaaacatttagcaaaatagagaccagaagaggttagacataggaatttgtaatcacattcacctataggcttctgtttttttcccacagtaatacgcttcattgattaattcattatttcatttatttcacaaaatatattgagtaccatctatttggaagggatttcactattactttagttgatttaacagtgcattagacagtttgttctcaaatactgttgatactgttggaatgagacatgcatagaattggttgtcatatgtcccataaacttgaacttgaaaaatactgtggaaattgaaagttgaaaaataatatgtgatcatagaaggcttaatgaaatcggagaggcttgttatctaggcttttaaggagctttgtaaatgatttgggtgtgggggctgtattagtcagggttctctggaggaacaggactaataggatagatgtctatatgaaagggagtttattaggagaattgactcacacaatcacaaggtgaagtcccacaatgggctgtctgcaagctgaggagccagaaagccagtccgagttccaaaacctcaaaagtagggaagctgatgatagtgcagcctttggtctgtggtcgaaggtccgagagcccctggcaaatcactggtgtaagcccaggaatccaaaacctgaagaacttggagtctgatattcaaggacaggaagcatccagcatgggagaaagatgtaggctggaagactcagccagtctagtccttccacgttcttctgcctgctttatcctagctacatgggcagctgatgagatggtgcccacccagattgagggtgggtctgcctctcccagcccactgactcaaatgttaatctcttttggcaacaccttcacagacacagccaggaacaatactttacatccttcaatccaatcaagttgacactcaatattaaccatcccagggtcaaatcctagcagagcaaccatcaagagggagcagcagaactttccggagagcagaggatgagctgttgaccaggacattttcgtgggactcagctcaaccaaggtgtgatgttggaaaggtggaccccagtcaggacatggttagcttcgcattccagagtaagatgtattttttagtttttcattcttgcagacaatattaagtatgagttcaattaagtgacaagaaaaatgttagtagaagttgctgtgacacttccccccgatgctgaaggatttaatattatggagtaaggtccaagttggtgtgctcaccccaccccaaaaaatcaaaatttagtaaattagaacaggactggcctagctgtagcatgtgggcctaatgcaaaccagcccttgattttctaaataaagttttattgaaacccagctgtgctcatttgtggatgtctcattcctggctgcttcttaattacaacagcagagttgagtagttgagaaagccacccaaagagcctgaaatatttactacctggctctttagagaaaaagtttgccaacccttgacttagattccttagcagttggatgtattgcttgatgagtcattcttaatcatttgacctgtgtcaattaattttaaggatattcttcaattcttgacatgttatttaggaactgatatcaccaggttccttatttttgccttcataatagatgggtaatacgttggtggaacctgaaaaatattgttatatttcccatctgcaattcatgggttttagtctttggcatgaataaatcaaggagagtataaaatgtagcatcttgggtgagaaaacatttcccgtgaattatcatcacacacttcaacggggtttgcctcaattcagagaattagtgttatctcagatgggaagatttgaggagaaaaatgaaaaacaatatttcataaaactctgcccagatcaagcataagaatgactagcatatgctcttgccattaaaagtgatttgacctgctgtgtggtagcattcagaaggacaaaaatagaagcctggtttgcaaacagctgtttctaacaagagtctttgagtaaattgtagaagaatcctcgctacgcttgcctagagagattgagtaactcagccatcatccttctgtgatgagaacatcatcacaacatgccatcaagatgttaaaactgtgaattggacaattactctacaaaaagttaaacttagaccatggctttttctctgctcataaattttcagaaaaaatagttcatactccttcacctgtttttttttttctttcccccatatcccattctccaactttcctaagtttatttctccttcaaaacccaagtcaaaatctattggcacagggcaggtttgcccaggtaaaagacatttctttttattttggttggtgtttaatcagagttatctgtgggcatatcttttggtttgtttgtttgtttgtttgtttgtttgtttaaggcagcgtttcactttgtcacccaggctagggtgcagtggcgtgatcacagctcactatggcctcaacctcccaggcttacccaatcctcctgcctcagcctcccatgtagctgggactagaggcatgcaccaccatgcttggcttttttatttcttattttttgtagactgggtctcactgtgttgcccagcctggtctcaaaccccgacctcaagtgatcctcctacctcagtctcccaaagtgttgggattacaggtgtgagccactgtgcctggcctgtggatatatctgagctgtcttttgagacctttaatttctgtagggcaaggtccctcttcactgtgttctctctgggattctgttggcatacaatcagagttctcagtgggtattatctgagctatcttttgaggctgtgagtttctgtagggcgtaatctccattgtatatctttgtgtcccatttggggatgtgaaaatcagtaaagcctagcatttggcaggacaggttctagaactatacctaataccatcaattactggctgtgtaacctttgccaaagttttcttggctgtgaaatgggttacttgccttgcagagtcatggtgagaatcaagagttaataaagtcacgagtttgaatggtttggggaacatgtgaaactccatcattagtcctgatcatagcaagtcattgcttattaaatgtctgctgaatgaatgaagcatcccgtgtccaccctctgagttcctctaaactctgctcgatgataatgtgagtggtgcccgggagagcagatttcggtgctttttcagcctgacagacacatttggcgcatctcgctttccacacaatatcgcaggaggaaggagactcaaagctacaccatctgacaagcaagggcacttgctcatcaacacatgcctgcaaatgtgtgatcatgcttcctccaacatgtttttccataggcagtgtgtgctcggatgtgtttatcatctgttaaaaaaattttaaaacatttttttgccatgactgttgtaaaaactctccctttatagctttagaaaattgcacaagattatgtttatggatacatttctttaggacctgaatatagactcagaactattaatacaagatgggaatctcgtgatgttccacatagtgggttcagagcttccaacagagcgtttctcgggtgtgacaatttgttaacactagctgcagatgaaaccatgcctggtgctaccattcaggtggtcagtaggtggctagatctaggggctacaggcacagctgcccccatagtccagtgcctgcaatagaggtgctctgtgcatcttacctgagcaggggtaagctacttctttgcacccaagcagaagtattgccaccaggtggccatttgtggcttggagctcctttgggaatctggaatctctggcaggctgtgatatttccagggcctctgcaggagatttgttttattttgctttgttttcaaagtggttatacatcaagccatgttctcataagatgtctcttccatcacctggagttctgggatattagcaaattcctcagaggggaatagatcactggcacttgggttgtaaaatacacagacattggatgtgcctgtggatttttgtgaaactatgtgctttgttttctgttttttaagacatgacgtctctctctgtcacccaggctggagtgcagggacacaatcatagctcactgcagcctcaaactcccagtttcaagcagtcctcccccctgagtagctgggactacaggtgtgtgccaccacacctggctatttttttaattattattaatatttttttgtagagatggcatctcaccatggtgccaagactggtcttgaactcctggtctcaagcatctcacctgcctaggcctctcaaagtgctggaattacagacatgagccactgcacccagccactatctgctgtttaagggccatgtttttcagccactctgtcaagtggctctacagccaggtgcatcccttggcttcccctggtgagcccctagtaaaccatcctcagacattgcctttcaccctaaagatgatgtacagatcaactcctgggagggtacgaaattcgctcggtgcctcagtccttaattctactgttcacatgtatctttctgagtttctacatagggtgtagaaactaaatgtggtttacaaatatggtgtgatcctcttctttcaggacatagacaacttggcaccagtgctcttgctgcaaagataaagtgatattggagaactgtttaaattcacaggctttggagtcagtcagacaaacctggatttctatctgtaactctaccgcttactaaataagtgacagtcagcacataactgaagttctctcagcctcagattgtgcaactattttatatatatatatttttatatgtatatttatatatatattttatatatatgtatatatatttatatatatatttttatatatatatttatatatatttatatatatatttatatattatatatatttatatatatattttatatatattttatatatagttatatatattttttgtattttatataagtattattttatatacatttttattatatatttatatattttccattatatatattttattttatatatatataaaatattaaaatgttatgaatgagtttagattgatggagaattacaaaggtagtacagaggtatatttttcacccagctatctgcaatcttaccatcctacacaactatggtgtatttgtcaaaattaaccttcacatgttaccagctttcccattaatgccctttctctgtttcagaatcaatacacaatgccacgttacatctagaagattaacttttagagggtgctttttcctgatttaatagtttggtttttgttcctgtttatttatgctgttttatttaaaacaagggggcaatatgtgtatatctaaaccattaatgaaatcagcccttttttgttstatagcgatcacttattttgttgttaaatttaaagtgaagatggtgtgagtttgatcgagtagcaggataagcaggtgaaaattttatgagtttgatggaacagaaggaaaactagacagtaattcacacgttgagattcctcccaaagatctgctttcaactgcttgaatgaactacggcaaagtagttaaacttcccatttgttggctgtgatgtctgtgaagcaggaatcacagtatctgtcagagaattaccttcaagtgatgttgaaaggataaaataaggggaagagttttaactttcttaggaggccatcacagaaactacaaagtatgatgtgaacttccataggaatctcccctaagtgactgtgcatatagaatgtctgaatatctgcaaaggtcagagcctgctgaggagactacagtcttcagctgtaagaaatgagcttttaactattcacaatagcaaagacatggagtcaaccaaaatacccatcaacagtggactagataaagaaaatgtggtacatacacaccatggaatactatgcagccataaaaaagaatgagatcctgtcctttgcagcaacatagatggagctggaggccactatcctaaaagaattaatgcacgaacctaaaaccaaattctgcatgttctcacttataagtgggagctaaacattgagtaaacatggacacaatgaagggaacaacagactctggggcctacttgagagtggagggaaagaggaggagggagaggattgaaaaactaaatatcaggtactatgctgattagctgtgtgatgagataatctgcacaccaaactcccaagccatgcagattacctatataacaaacctgcacatgtacccctgaacctaaaataaataaaagtaaatacataaacaaatacatacatagataaataatgtaacatctgaaaaacacactagagcagagtgcaataaaaggaggcattcctgtaaaggttagaaaaacaaagagaaagagatgagcttttaacaatggaaatttgcttcaggacccctgaaacctctgtttctagtaatttacttcctaaatataagtggcatttatttccagttgactcacacatgatattcctgcaaggaatgagcattttttcattggcttcgttctcacttaactgtctatttaatgcttcacaccaattgtttaaaacagcctcttttttgagtagctgaacttcaactccactccctttgtccccagcctaaattcctgacggctacttcagtgccccttagccctatgctgtctttgtcatgaagggtgaggaagcagtgtttattcccccagcgatgggtcacctgcccagctggagtgacctcagccctggcctgtctgagccctatactggagcacttggtctccatccctcaacgggaggtgttggtcatataggggccacaggaaaactgcccctttgccctctgaaggtttgctaaaaatcagctgacaaaggcaactgagaaaaggcacacaaatttattcacgtgcgtggagccttacaaaatagatctcaaagaaatggctggatggttgatgcttttacaccatcttgaggttacagaaagaatggggccttgcctcctggcaacacaggttaggagaggggagaagaggacgcctggctagcagaggtggtcttgttatgcagatgagacctcctgtgtagcagtccacagagagaagagatggtgaatgtttcttgcagacctttaaaggtatgtgtctctcagttcatctttcctggatcggacaacggaggccttcagagaaagcctggctgcctcaatgcagattctctctctctctctctttttcttttctgagacagatgctcactctgttacacaggctagagtgcactggtgagatcttggctcactgcaacctccacctcccgggttcaagcaattctcgtgcctcatcctcccaagtagctgggattataggcgtgcgccaccacgcctggctaatttttgtatttttagtagagacatgatttcaccatgttggccaggttggtcttcaactgctgacctcaggtgatccacccgtcttggcctcctaaagtgctgggattacaggtgtgagccattatgcccagccagattttctctatagattcaaacctcctctacaaaagacagttttgcagggctgcttctgtttgcagaccctgtgaacatccatctcaaaatatgtcaaagaagagtattttggggtgaaatattttggttccttcagtgaccatcttctgagattatctgctgacattctgatccactctgaactcacccttcctgcctctgccggtaccctttcgatgctgtatttaattatattctaattgcttcataggcaccaagcctgtttcctcaactctcctggttaagagccatcctggtaataaaataataccaacgaagataatagccattttttgtgcstctcttgcaggcactgagcttggcagttgggataatcattccatgtaataatcacgtggaaacatagtgggaatatgagatacagaaagctgaagctattttctcaagtgcaaagggctggtgtatctgtttcctatgtccgttgtaatcattgaccacaaatttagtggctcaaaacaacatgttttttttttttaatttttagattcagtgggtacgtgtgctggtgtgttacatgggtatattgcattatgctgaggtttggggttctaatgatcctgtcatccaagtagtgaacatagtacctgatagtttttcactccttgacctcctccctctttcccccctagtagttcccagtgtctactgttgccaactttatgtttatgagtactgaatgtttagctcccacttataagtaagaacatgcagtgtttgattttctgttcctgcattaattcacttaggataatggcctctagctataccatgttgctacaaaggacaatattttgttcttttttatggctgtgtagtattccatgatgtatatgtgccacattttctttatccaatccctgtcgatgggcacctggattaatttcatgtctgctattgtgaatagtgcagcaatgaacatacaggtaaaggtatctttttggtagaataatttattttcctttgggaataaccatgaattaaatgggtcctcaaggtgttggcagggctatgtttcttgctgaaagctctaggggagaatcttattccttgccttatccaacttctagagcctgcctgcattcctgggcttggggtgcccttctctgcctttaaagtcagcagcatagcatcttccagcctctctctgtgattacacccctccacttctctgactccctctttcccttgaaagaaccctgtctacaaaaagagtcagactctgtaaaacgtttgaagagattcattctgagccaagttgacacagccccgggagatcctaagaatatgtacctaagttgttctggctacagcttgatttatacattttagggagacatacagcattagtcaatatatgtaagatgtacattgttcagtctggaaaggtagcatgagtcaaaatcgggggggtggggggtgaggaggcttcaggtcataggtggactcaaagaatttctgattggcagttggttgaaagagttgatttaaagacctgcagtcaatagaagggagtgtctgggtcaaaataagggggttgtggaggccaaggttcttatgatgcagatgaaacctcccacgtagcaggcttcagagagaatagattgtacgtgtttcttatcagactttaaaagataccagactcttggtcagttctctcccggatcagggagaagaccccaaaagagaaggagattgtctacagaatgtagattttctgcacaagagacagctttgtggggctattttgaaatatgtcaaataaatatattttggggtaaactacttcaatttctatcagggcctgctatctgtcgtgttggtatcttatggctacaaacagtctgttttgtcagtcttaaggtctgtgttttaatgctaatgctggtcagttgtacctgaattccaaaagaaggagggtaaaatgaggcatgtccaatcccctgtttccatcatggactgaactagtgtttcaggttaaacctttagaatgccctttgctgagaggaggtgtctattctgttagtcgaggggcttagaattttatttttggtttacaaccctatgattatattagatccactcagacaatgcagggtaatctcctcatctcaaaatccttagtcacatgtttaaagtcccttttgccatataaggcaaaatacccatttccccaggctccaggctccaggaatttggatgcggacacttgggggcaccattattttgcctgccacagctggtgtaaagtagaaatggaacttgaattccctgactccagagtcattgatttgaatctttggtgactcaaatctttgttgcgttgagtccctctgattacaaagtttttgttcaagatgccatacagtgctgaccatgtcacatatggtggtgactgtatcatatatattccttttttcaatacaacatatactatattgctcatggaatactcatagatggaatctatgtaattagagcagttggttcttctacattgagcacraaagagtccattgaagtgagcattgaaaggattgaaatctccctgttgcctcttacctcttttttgatcttttaggaggaaaagcaaacaactgggaaggaggtatccgggttccasgcatccttcgttggcccagggtgatayaggctggccagaagattgatgagcccactagcaacatggacatatttcctacagtagccaagctggctggagctcccttgcctgaggacaggtactctgatgccagggtggttggtattgttgagctctgatttcacagcccagtatgctctggtttgcctgcataatggtgtggggaccaaggcctttggccccctggagttttcctgaaaatcacaggtttgaggcaggtcaattaataggataaaaggcatatacatttacttaatgtgtacacagcaggcttccaaaggaagacccaaagatacaggggaaattgttcatttttttgctgtggttcagcaaagtatgggcagtgtgtagaagtaggattggagggaaaggtctgacctcatgctaacggactgagtggggaaacccagccaggcctgtctatctagatgcttcttggcctctctgagcagttttccttccttctgggcatggggcagggccctctctggaacgggggtcttatgacctacagtcaaacaaagtaggtcagaggatttatttatgggcagtttttacacagaaaggcagggggaaagttggagtcatatttttaggtttgatgctggctttggggatcaggggttttggttcttacgacctgcattggggaagagggattctagtttctctggcgccttggggtagagtgggactgagagacaggagggcaggagaaagtcagaggaaaactgcactgaggccactgctgaggccctcggtttggagtgtcacgatgcctccagctgtacttgttatctctgtccggtctggggccttactggtgggtttgccaatgtaaaaacccctctgccaatctctttatccagagggaaataaactcagaggcactgaaggtttttagtgaccaggaatgtggacgggtggtgtttaattcagccttggtctttcggcatcgtgctgacgctcttctcgtctgttcaccccaccgtagcttgccattgtgcagcttggccacaacctctttgacctccaactttgggatcccacaccttttcctttgtccacactcagcagccctttgctgtaacagggagaaatgcagccgggtccccagctaaggccccatttcccagcacgtcttcactgagaagttctaaatgaaatgtctttctcttaaatttaaatacgacttcatatgacattgccagtggtttcttcctaagtgttattaccaatctgaagagttttaagtgaagcacactgattaattgttttcattagtttggtgacagaccaggcgaatgtcacgcaggcggctgcaaatcttgtttaaattcagctgtaatgagaaggaagaggaaaggggaaaggaaagacaaaaacagccacgctgccaaagcaagtccagagatgggtttcctcccctcccgctgtattcgaccttgtttccttactggtttcaactctgctttaggtatacacccttcctcaacacacacacagacacacacaccaatgagaaatgcagcgttgacagttcaactattctcaaactttgaggtctcaaaaccccttttcattcttccatgatcgaggaccccagtgatcttttcctgatgtggattgtattgagcgacgcttattatattagtaataaaaaatgaaattttttaaggcaccaaagtactccaagctcacattccattggctaatacatcgatgatgtcatcatttaccctgtggccacaaggaatgtccattgtacactcctaaaaaggtgatagtgagaaagacaaagagtgccttcctattgttataaaaataacattggcctcgcagacctcctgaaagggtcccagagagtctctggatcacgctttgagactagtgggtgctatggctaagagtggagattctagacctttctagacctgcactggttgaattcatattctttttttttttcttttttttttttgagatgggggtttcactctgtcacccaggctggagtgcagtggcgcratctcagctcactgcaacctgcgactcccaagctcaagcgatcctcccaccccagcctcccgagtagttgggaccacaagcatgcaccaccacgcccagttaattttttgtatttttggtagtgacagggtttcaccatgttgccaaagctggtcttgaagtcttgagctcaagaaatcctcctgcctcgacctcccaaagtgctgggattacaggcttgagccactgagcccagctgagttcatattcttgtcatcactgcagggtaagcgttgaactttcctgggccttcactccttctctggaaaataagttcaataataacactgactttacaggatcaataggaggattaaaaacctccttgcctgtaatgttcagtacaaagaaggcatgaatgtttgccatttcttgttttgcctatcattttgaggtagtagtcagatgtacattattagtacagttctttcctcttccacatttaatattcatccgaggtcataaaatcatagagtatgaggccaaaaggggaattgtaagatctcctactccagtcaaactattcttttttaacactctagtgatggaaaacatggcagcagtgtctcagaaagtttttcctatataaagccaaaaatcccattctctatttcacctcctccttggctgtagttcttacctttggaataaaggttaatacttcctcaagtagctagaacagagtgttcagccaatctcatttattacgtttgtctctcatcacccataatgttaaaaccatcactgctcttcactttcataatatcttggaatggttttctacccagtgggggaaaagcaaggtaaggaaaaagttcagaggcaaagaggaagattcataaagggaaatcttactgcttctaccttctagccactctagtctgaggctgatggaggccaatctgtgtttcttctatgtgctcaatgaagaagataacagcctccctcttagaagacccaaggattttgtgtgtgggtttgtgtcatcagtagaaccaactctcaatattgaagattcccctctgtttctgattcctttcatggacctcagaggtgcttgctgacctcattttttttttttttttttgagcagagtcttgctcatttgcccaggctagagtgcagtggtgcaatctcggctcactgcaacctctgcctccacctcccaggctcaagcgattctcctgccttagcctcctgagtagctgggactacaggcgtgcaccaccatgcttggctaattttttgcattgttaatagagacggggtttcactatgttggccaggctggtctcaaactcctgacctcagctgatccgcctgcctcagcctctcaaagtgctgggaatacaggtgcgcaccatcacgccccgctaatttttgtatttttagtagagatggggtttcaccatgttggccaggctggtcttgaactcctgacctcaggtgatccacccacctcggcctcccagagtgttgggattacaggcatgagccacgacgcccggccagttgacctggttttaaaccacagatgttgcttctgtgttgaggtcctagctcctggtactagtccagctgtaaaatgcctttgtcatcctagagacagcacaggttagaaaacagaaatgtgcttccaagtgccttatgggaatagaattatcacacagtaccttatttaaagcatattgccaaccaggtacagtaatattcttatgtatttgtccagaagactttgaatatctaaagtagtgttttcccccaggggtcacttatcaatgcctggagacattttttattgtcttggctcagggtgctactaaacatcctgcaacacacagcacagagccctactgcaatgattatcttacccattatgtcagcggtgctgacgtcgagaaatcctaccctgaaatttattattgctcttttatggaaaatgttgttataatggaaaatcccatcaaaacttttcaataaaagcatctagacaataccctcacatctatatccatctataaatgtgatacacagatgtctgccctttagaaaatagtcttaactccttcctgctcagagtggtgcaaataagctttctcagctccctgctagagagatattaaatttgcatttctcaggagaagaaactcattcagacggttggacccaagctgtttgatgagcacttaacaaagtgcctttgcttctttctgcgttttgtttgaagaagataacttctgttcagcagacctccattcttcacgcactgtcctgtaattctcaggaagcattttggatctagtgggagtccttcatggccaatcaaagcatggtgggagatcagaagcccgtggatccaaggtttctacttaagccaaaagaaaggtagtccggaggaacacaggaaagattgttgttgttgttgttgttgttctgtttttgttttgcagcatcttaacactgcagtgagaataattctctaattcaaccctatgatgtgcttacgtgagatttctctctggcagtgaatttttccttcatatgcacgttagtgattcattttcattcagtggcatgacttatcagaagaaatttcagtgtccatcaccctgggcatattcagaaaaattatttccctccaggtctccaaataagctgattttggaaataaatggaggacaaccttttgtgttacaaaaggcagcaacaaggacttacaaaaaagaagaatcgaatatctaaatgtattaattcattaacatgaaaattctttctgtgggtctcatctttgcaagcagatacaatattgccatagtatgagtatgaccatgccccttcctaacaaggtattaacatcagtaatagagaatggcaacaagccatagttggttacaccttttggaaaacatcaacattttaaccatagacccttcagctgggatgcaaggaaacagagtgctggcaacctcaagaatcaaattttagaggtgaaatatttagagcttgtggtccataattaaaacaaaatttgacttcattttttaaagttacaaaaacaaattaatgctttaatgcttaacacacttttgtctaatggagacaaggaatggatttagctgacttctcccagtaacttttgctgacttacagttgagccactagagaagaccttttcaatagagtgatacagatgaaaaagtcagtgagctgtatctgctttacattagttttgcagaactaaaggtgactctcttcatgggaacaatcccaagtttgtgtgtgtaaccacttatactgatcttgctttctgttcaactatggcagagggtttaatgtttacaaatggaaacatatttttctgaattgtgataataactttctgaatacttaagattccctttaatttattacagatatatgtactttctcctaaagatgtttccttaactatgactgtctacattgaaatcattgccatttgtatatcaaataagctgctcaccaacattgtgccccaaataagcttctctgttagtctccaagaccttaccttctgtatcaccccaaaccttttctttctcttatgatccttcagtccttggcctggcaatttggccaggcaaagggcgcgtgggaaggacatcccacgtggagggacgaggatgttgaaagcctcagagctgagagagagcacagcacattcttggaggaatgacgtcaatagggttcagggaaggtttccagaacatgccctttttaattatgtaaaaattgtctgtatggtatttaacttgacctgaaattttgacacaagggtaccttgcaaacaacctgttaatagcgctaccatcattgtcagtcaggaacccaaggagaataatttcaccttccaaattaaaaacactcccaaacactcccttttccaccaagagccatgagggcactagggcagaaaacacattcagttttttttagcattggctgttatgcaaacatgctacaaaaacttgaattagtttgcaagaaaaatcccgttagactgtttccagagaaaacagcaatgctttgagtcactttgaaagtggattggcccatctcccccagaacacgacattctaaaagcatttttgtactagcagcgttaatggaaatgtgctgttctctgggttattgccatagttaactgcgaatcccacaagtggtttaagacaatcccaaatatttcgatagcttagacaccacttaaaagtttagctcaacagggtcactttccatttttcatggcagaaatgaggcttcctttgacagaccatatttctgcagcactgttaaatggtggctttccatagcagcgtgatttatggcctgcctctaggaaggaccacgttaggtgtgggatattaaaaaaaaaaaaaaaaaaaagtctatctccactttggaagaaaaatagaaaaataagtttgcagaataaactttgtgcccctcctttaaaaaaacctcaaatatttcatttttaagtaagaaaaaataattataagacttggagtcttattttgttttagttaaatccccctttcctataatcatgatcaatttcagttatcaaatactgatcttggccaaggccggaggagagcttgaagccagaagttcaaggccagtctgggcaaatcgctccaaaaaaaaaaaatgaaaaatagctgggcatggtggcatgtacctgtagtcccatgtacttgggaggatgaggcaggaggatcgcttgagcccaggaggtcaaggctgcagtgagctatggtcgcgccaccacactccagcctggatgtcagagcaagaccttgtctctaaaaaaaaaaaaaaatcgaaaaatactgatcttaagacagcaattccatctctcatgttcttatatcacaatatcacatgatgaattttgttggcagatggaaaaaaaaaaaaaagccagattcaaaaagtaaaattctagcttgtgtcccagaaaatggggatttcatcttgcttttggggagtcattgaaagacattctccctgcttggggaaggatagaaatcctctgtccctcgtctctccccttcaggtcacttttcaccactgggggcttttcctggtctaattctcatgcctgcgcactacctctcttacttcttccttcctgtcagctttatgtgggagctcataaaggcctgagtcttccttgaaaggaatttgaaaagaaccacgcacaatgactgccatttcgggatggaaacagtatttcagggcacacgctgtgtctcaatagaactctctctacggtgtttctttttcttcccctcgtggttcacaggaaccttggtttgagaagtgagccaagccagtcttttgttcttatttttacttatgataatagaatattttcagtctgcagacttctgcagagtgcatgattaataacaagggttgagaccggagaagtgctaacaacaaggctataattacattataggtttttagtgacaacaaaataaaccatgggagaaagctcaagggacataggacctcttaagcacacttaccaaaattgtacagccacgccaaacttccagtttctaaacgccttgtaacaagagatggcagggatgtagtgtttttaatcagagaaagaaaatcctcaagttaaacactcaccctttcaaaataattatctgcctctcattttgatggcaatggcctaatggtatcatggcttcaatttctcatgtagctgttaatttatgtttaatgcaaaacacaattttataccttattcctttcttcaaactataagtaatcttattttgctcatcaccaactgcatatgtcttattttcttggcctagttagatacccagtagtagaggagatatattttcatttgggaataatccgttccctggttatttaatggtatcattattattatatatacattaattcattctaaggagaaatttgcattcattgcagtctacgaatccaagttgcctcatgcaatatagtatctttttattttaatcccaaattgtcaggtgcccatcttttcagcaggcctgtatgtcatgaataaagctttccctttgatcaggcaatagacagaaaattgtgttttggagaagcaagaggaagaataagggtatgaatgccagatcagctggatttcaatcccatcagttcttactcgtcccatgaccttgggcaaattacttaacctttctgtgcctctgttttctcatctgtgcagtggggatgacagtagttccagctcatggtgctctttgcagatgtaatgagataatgcacggacagagctgggatcagtgtgttgcacagggcacccaggtggggtcagtcttctttgtattaattacgactggagctccctcatgctcttattggttcagaaggacatttgagaacacaggactgattcacgtcttgatgcctggctgtttatcccacaggatcattgatggacgtgatctgatgcccctgcttgaaggaaaaagccaacgctccgatcatgagtttctcttccrttactrcaacgcctacttaaatgctgtgcgctggcaccctcagaacagtgagtaaacagacctttccacgctcctcatgctccgtgcaacctatgccatgggaatagataaaactaaagggtaaaaaggtggctctgctcaatggaggccaacaggtgcctcaatgtgcgcccatgctttgctttgtcctcttttccctcctcctcctctcttttcgttctggtcacatagttgtccaggtaggaggacatcagaaggccatgtcattcacccacctgaacaccacccacagcttctctatcccagcagagaaagctccctgttctcaacagggcgctgtggccggttgctttattgcatgcacagctgcccagcttcacttcctagcactcctctcacactgaagaaagcagcccctgtgctctgtgcattgctgtgcttacacttgcaggctcttctcctggaaggatgtcttgcctcatccttcttggagggtactcctcaatgccccccaggccctgctgaaatgccacctcctctgcatgtcctcaaaacattcccctcactcttctagcaagccactaaaggctagagaaggaatgaagagcatttaaatgtttatctgacttactttcccagcctaaagatgatggatcgtgactcactgcatctgtattttgtgcgtcatgcatatttgctacatttagatatttaaagcaaagttaaaatgttcttcagttctatctcattttctgaactgggggttcttttaattgtgcaattgaacaggatatcttgtgggttttctaatacttgttttatagtggcatttccaattagcatacaggaacaaatggtttataatcttaggtgtggttgttgatttttatggctgcatagtattccatggtgtatatgtgccacattttcttaatccagtctatcattgttggacaattgggttggttccaagtctttgctagtgtgaatagtgccacaataaacatacttgtgcatgtgtctttatagcagcatggtttatattcctttgggtatatacccagtaatggtatggctggatcaaatggtatttctagttctagatccctgaggaatcgccacactgtcttccacaatggttgaactagtttacactcccaccaacagtgtaaaagtgttcctatttctccacatcctctccagcacctgttgtttcctgactttttaatgattgccattctaactgatgtgagatggtatctcattgtggttttgatttgcatttctctgatggccagtgataatgaacatttttttatgtgtctgttggctgcataaatgtcttcttttgagaagtgtctgttcatgtcctttgcccactttttgatggggttgtttgtttttttcttgtaaatgtgtttgagttctttgtagattctggatattagccctttgtcagatgagtagattgcaaaaattttctcccattctgtaggttgcctgttcactctgatggtagtttcttttgttgtgcagaagctctttagtttaattagatcccatttgtcaattttgtcttttgttgccattgcttttggtgttttagacgtgaagtccctgcccatgcctgtgtcctgaatggtattgcctaggttttcttctagggtttttatggttttaggtctaccatttaagtctttaatccatcttgaattgatttttgtataaggtgtaaggaagggatccagtttcagctttctccatatggctagccagttttcccagcaccatttgttaaatagggaatcctttccccatttcttgtttttgtcagatttgtcaaagatgagatagttatagttgtgtggtcttatttctgaggactctgttctgttccattggtctatgtctctgttttggtaccagtaccatgctgttttggttactgtagccttgtagtatagtttgaagtcaggtagcgtgaaacttagaattacagtaatattcctatcactaagatacctggcagtcaatggtaagtggtgagcaatttacacaattattgtatgttctagaggtacctgttgaggctggactttcagttccttctttggaggtaaaatgaaattccccttttctctaaggggctttggagctctgcttctagaacctaggactgcccccccccacccgccccaaaggaggggtgtgtaataacctcctaggtgctaacttcttcttaaacttagggtgattccattccattttccaacaaatctttgtctcttccccactcacctagccaatttacccaagacttatcatttaaagaaaagcctctcttttatttttacaacttttccataaaattacaacctttctattagccacagaaatcacaccaggtttatgcttcagagtttctcctttaagtctggcagttttctcatgatatgttctagaagacaaaaaaacaacagaaacatgggcttgcgattttacttctggaagcattttattcacatatctcatccatgtggccacaattcctagtttccataagaatactccttcttttttagatcagtttatagcatcaacttctgagctttgtaataaatgagagctcaaggactcttaatttcttttcatatggagccggcaagaaatgtgaagaacaaagtttctgtgactactgcatgttcgaataagtctgtatcatgtcctgaaccttgcaaaattgtattttaatagagccaaatccccagttagagaagcgggaaggaacatattggatcagaggctggaggaacacattatgtggaggagtaaagagaaaggggacaggaagagacagaaaataggagtgagaaaaacaagacccagtttctgataggcaactggccccgggataaaatttgcttcttagactctgaatgcaattccttcaactcttctgccttgaactggtaacaaaaaaaggagaaatcacagtatctgaaggctagaatcatttatcgagataaaggacctcaggaaaacaagacgtttatgaatcatttatgatttatttttcagatgctatctgaaactcagcaaccatatttgctgtcttggcttttgtgtatggcttcatgtttagtcattttgtattttatctgttcatttttcctagaaatatgtattgagcacctactgtgtggaacatatcgtcttagcgctggcatctgtcagtgagcaaaacagacaaagttccctgctgaagagtagcttacattttagagcatgaggcactgctagctgtacaatgtgctgggaatacagggatgcgtaaggaaaacgtgactctcatccatatggagctttctgtcacctggggaagacagatcttaaactagtaatagttgagtgtgactgcataggtcatctcagatagactttggtaggagcttgccaataatcactagactgtggaacatattccatgaatcttagggataagagggttgtcgcctgacctcagaatactttattagaaaatagaaaaaaagaaatgtagtattagggtttagtagcaggcagtggtatgctggaatcagctcctgatcgttcagaaatcttgccagcttgttattaaaccattgtctgttttcatttggctgtgttgtgggtgtttacaccayggcaattggcaaacacaacaaatacaggttgcctttctccctcagagccctagattaacaacagtttgttggtatcagtagaactgactgcagatgtttttaagatgcagtttaccatttgtcttgattacttagaggattaaatgttataattccaaactcatgaaatactgattttcaaaaaacttaatgctaggatttcatttccacccttttaaaacatgaatctcttttaaaatttatatataatgtcttcgctataatttagttgtctcagtaaattgaatgacataatttaattatgacctgatatcattattcctattacattttataagaactcatgaaagcatgattataacatggataacttttcttgcactaaaataagaattttgagttaaaatttaacattcaatgggtatgaaaaattttggctttaatgtttgacatatgaattaatgttattaaaaattcaccacaatgacaacttgattttatggatggaattgatcttagagggtaggtggatacttggctccaggatttttaagctgatgactgtagtctgtgagataaatattcacattaatggagagtccccaaaccagctggtcataccaaaatccatgggatagctgtagatatattctagaatgcaatgcaatatagtacatagttaacagcttaaagcgttttgtacagacatatatggaatcttagcatcatgtagacaagaaagtcacatatatttaaaatgtcacactttagtcagaaacgggatctccatgaagctataaaaattacttaggggaacggggcaccaataccattatttccctaggagaaggatgtagacatcctcacattggactagcagagtttcataaatcctggctccatattctattcaagtttgttggaaactttttcccaacaacaaaaaataaataaataaagctttattttaaaaatgacaatactaggaacatttgaatgattctcttctagctattgtgaaatatacaatcaattaatgttaactggtgatggatatcccaatttccctgatttggttatatgagtgtttcaaatgatcacaggtaccctgaaaatacatacattgaatatgcatcaataaaaagtaaataattaaataaaattacagcaaacagccatagggtaatggaattcattccaaaggaatgtgttcctttccggctttctgaaagataccttcatttcaagctcagtaaatggtttaaaatcaaaaccagcttaccgtggtaacataaagaaaagtgctcgcatggctcactgtctagcattttcatttaattaaaaaattaattttgcctctaaaacacacctaataaaagagaagaaattctcataacagccacttatgagttaacagcatcagaaaggcagcacttggctttcatcatcactagtaattttggtgagtacttgtcagatgcccttcctcatctaatcctcagaattaggatctaaagtgtcagaaatgaaatatcgaaggctgaagctgacctaatgtgagatgcagcatttccaaatttaagctcaccaggatctatcctgtgtttcagctgaccttatgaaaggacatattttcatcctactctgtaactgttgtagcaattaagaaaaagcacatatatgtaaaccatttcaaggataacttttaagtcttaggatttattttctctgtgaacacttcaaatgctgcattgccacaagcttttaatagttcaggcatgcagctattatttcactcatgtgcctgtgaagcccagtacaaggtacaacatttgtacttgtaattgtagcaacacaggatgatggtgtcctgggatgaacagaatttgctttggagatctaggaaaaggagtgatttatgaggttagaaaagatttcatagaacttttaattttttattaaatttattttatatcattatcatctagacacatcagtaacagcttaacttcccctaacagtcatttccaacagtggaaaaaaatcaccacataaatagattttgtgttttccaacatagcctattaaacatatattttcttatggaacttcatattaccttatagacagtatcagacaatatttgagataaacgttcacttttcaaccaaagttgtagtatgtctgatctaagattacactaatactgtggaagaaaaattcctggtcattacttttgataatttgctacaatgcaaacttacttccttatagaaacaaagtaaatcaaaattgaattttctttcttgaatacaaaaaaaaaaaaaaaagcgccaaaaaacttggtgtggctgaatgatcaaatgccctcttccatctaagcttggcacccagcttattctgatctttttgccaggggtcacttctgatcttttccccttgcattctccgtcctaccgtttcattgattttctacagtattttacacatctcttttccctgacttcaacacggggtgtctctcagttctcccgaaatgtctgcttatgtctctaaccccccgccagatttgctttcatatgctctcagacctggtgttttctaaatagacattttagttctaaccagggcatgcaatatttagcaattttttgtgtcttccttactttcgtatcttctgtacaaaaatgttttgtaggtggttatagacgtttccgtttgttaatctcatgttcttgaaatttgtcatctctttttgtgatcattatgtatcttttgaagacgtgcttgatgacagtaaacactgatgtttgttgcatatttactgtctgcccgacagtttgtcaagaacattgtatttgatatctcattagaagagattatgattatattagtttcagatttggctgtaacaaaaaacaataaaaaaaaacagtagtttacattagagagaagtttatatctccatctcatgggtgacatccagaggcgaatggtctacaaaatctctggggtgcagaatctttcaagcggcttttccacctcctgtagaatgtgacagcttcatcttcatggtgaatgatggttgtgtctaccctaaacgcatacaatggcgggacggatgggaaagatgagaagaaaaaagtgcatggctactacttcccaaggaagatagtcagactcttctcagaggccagaagttggtcacctgttcacacctagcttcacaggaggctgcaaaggagagttttgttatgggtgttcatgtacccagaggaacactcaatgactgtgggaggctggcggatcagctagctatctctcctcccagtgttattttttcccaattatagatggggagacagagaggtagaaggtcgcattactggcatacagttgcaaagttgatggccaagttgggatttgcaaccaacaccatttgcttttgagtctgtctcccattaatcgaaatgtcttcccctaagacaatatgttcttttactcacaattataaatcatgattcctccacctaaccgtgtatctggacatctctgtgcccccatgcactgagtccacgattcatccacatcctcttattccccaaatgtggacatccttggcatcatcaggtctcatactccttccactggctccatgcctggtcctcgtcctctcagctgccctcctccctctccatgaatgttctttcctgggggccaaatgacttatgccccctgcacaattcctgatgactgcccatttttgacaccaagcaatcccaaagcaaatgtacttccaagctctctgccttcctcactccgttatctgccatgatcagacagtaatctccagtgcctcacagtagtctgttggtccttcaggctggagatggtgcagagccattgtgtgatttcaggcaggatgctccgggtaggtcccgaggggactgtggagtgtatttggcttcttgtctgctcaccctggatttcataatgacagctggttcctcccctctctttccatcccttcctcctaataaccatcatctctttttttttttaaatttatccaacaatttttttttttgagatggagttttgctcttgtcgcccaggctgacatgcaatggcacgatctcggctcactgcaaactccacctccaggttcaagcgattctcctgtgccagcctcccgagtagctgggattacgggcgcccaccaccacgcccagctagtttttatatttttagtagagacggggtttcaccatgttggccaggctggtcttgaactcctgacctcaggtgatccaccccgcctcggcctcccaaagtgctgggattacaggtgagggccactgtgcctggccccaacaatttttattgggcctctattctatctaagatactaggcactacacatttaggagatgtgggagatatagtccctgccttcagagaggaaataatccagccagagaattggagacctcaagtgttgactgagtgatgaaaagtggtgagaggaacagaggaagactggtgacttccagctgggaattcagatgggtgcatggaggagaacacagcagggctttgaaggacagctagaatatcaatatggaggcaaggaagggaaagtgagggaagagtctcatatacatcctacacccactttgttccaggttatatatttctgtcccttaatatgcaaaacccaaggcttggtaaaagggagtattttgtcctcaaatactcaggcatcagttgggaaagcttgtgttgctctcaaattggctggctgtgaaacagatgcacccagccaccagagctgcttcctcatccttctcactgttgttgtatcgtgagctctggtactgccagctgcaggaagcaggcagaacttatctactgtcatcgattatatatcagccaagggctgaatagttagggggtttgtgctatggtaaacagatggcagtgaacctcaggggtcagaaacagagcttggggccaagatgcttttggtgagtgtgcatgtattaagttagaagacacatgatctatggaggctcaggtatggacacactgtaaaatctttgggtgtaagaaaagatttgaggcattagtgtggggtatctggatgagactagggtaatgtatggaacaattttttaggtggatcgcaggagtaggagggcaccatgagatgggttttcagacatcagttcagtggatgacattaacttttctgtaaacttactgagggggcaggcctagggttctttgtgtgggggttcctcacaatggaaaaatggaacagtatgtgaaatggttcttgaagaacttcaagatggcaacagaggtacatgctgccaagactgaaaacccaaaatatctgtgtataccttctatgatatatacatgcagtcttccaagcacccaaaataaatctcgccaaaactaccagttgaacatcattcatcaagggaagtttaaatctgagtgatacattaagagccactgtgttgaaaccatgtagatttattaatagttttccatatactttaagaatccttagcagaaaaaaaaatgtcttacgacatgtattacagtagcaacagattgaagggcagatggaaactgaattgtttcttgcgtaaattggctgcagctttctgttcacagctaactcatgtatagtctctactatagacccagcctccttctgacagcatcacatataggaaccaatttttaatcctcaaagcaatgctaccagggaagaactattattatgaacatttaacagaggagcagactgggacacagagaggtgagagcagctatgcccagcatcacgtatgtaagaaactgcagagctcggggttgaacctaaactattgatgctcagagctatgcccttaatcaagtcagtggcaggaaaaaccttggccgaagcacctgccctctagctagtgcgttctctctctctcttccccgcctaccgccagcaccccccgcccctcccgggactcctctgtctatgcaagtctcacatagcatcaggctaagaaaggcaaatgctcttttctaaagacattgctatcatcctagaacaagagagtcttcgggcccctggcaccaccccttctccatcatatttgtcctggaagagcacagcaactctacctgtctctgctttttctatactgcctatggatctttggtgcctttcctgtcctttagagctgttcattcattcatgcagtttatcaccacgccttgggacttgtgaggattgtctgtctcagtccagcttctggctcattttatcaaaaataaagtttgtcttattttatagcttagctctcagagggttcatgtgtagggagtggcgaatttgtgctatgataactattagccctgacatttcaggggctcagcccagcaaacatttattctcactcttgctgtagaacagagcttgtcaacctgggtactagtactattgacatctggggccagatcattctctgtgctggaggctgccctgtggattctagactgtggagcagcatccgtggcctctccctaccaggtatcagtagcaagtctgccccactgcagctatgaccacaaaatgtgtcttccgacacggccagaggttcaggagataactgtgttcagtgcctgtcatggtgggaaggtgggggtctaggaggagaaggttctgccatccatttgtcagggaccaccctgacagaggccccatcatctcgagtgtcaccagcagaagagacagctcctctgtgctgtggctgggaaaagacataccacatactgctcacgtttggccagaatgggccatgcggcctttctgacttcaaggaagctggaaggtgttctggagcgcttgaattactcagggtttattatccccaaaaaggaggtgtagtcttgtttttgtggcctcagagttccaggttgggggcaccttgctttagccgctgtgggttagaagcaggggccgtaagggcacactcacgttgtgtgatgcctctgagtgtctatcatgcgcgcagtgtctttacttgtgccgaacaggctttccagacctggttttgttttgtctcacgtgatggctctgagacttctgcaagacagcagtttaaacattcagagaggcctggaaatgagtgtcctggggtctggactgtgccgagctgtgttatggactgttgtgactgctctaagtagagaattcagaatgcaagatgtgagaggcttgcgtcactatgagaagccagaagcacttggggcccttgggataaagacagaatgaggccttcgaggacgttgttaaaatttgtaggcgatgtagcatgaccctgttcccggaccaaaccgagggtaggactgctatttctcgcagcccaacaaaaagatgcagatgaactggggagaaagagagtttttatttctgtaaccggttacagggagaaggcctggaaaatattgcccagaccaactcaaaattgcagttttccggagcttatatatcttctaagctattagtctatgtgtaagtgtgcattcatctaaagatataagtgatgaacttcttttaatctataaccaagatctgagtcctgaagaccttcctctggagccccagtaaattggcttaatctaaatgggtccaggtgctggggtgattacccttatcttgtctcctgctaaatcatggaggtttggggagttccttcagatctccagtaaacttgtttgtggaggtctggggagtttcttcagacccccagtaaaacttgtttaatcctaaacgagtcctgttaagaatccttcgttatcatgtcatgcttcaaggcccaggagaggcctgggcaaaactcctgatgggcttttgttccattccagcctttgtatgaggacactggctctttcagcttttaatagtaacttcaccactcggtcagtgccgaaacagatgtcatggaggcctgcgttagtgagacctggcctgccacaacccgactccaagacgttaagagggagcttgtgctagatactaatattgattttaaaaaatattttagtacataacgaaagttctggtttgcgccctctctatttttgttcttggggagcacatatgctcattttcggggcttccttgccagggctcccacttcctgtggctgagtcgctgtaatacgaagtaatagaaatcacaacgtctcttctgttccagggtcagaagcccctgtggtccccaggcaatcccagggaacccagatacctctttatttctctttgttcacagcttagtttatttttaataagatagctgttttaggatcctatgtggaggatgttgaatcagtttctggcttaggcatcaactttttctcacttcaattctatttgcctttttgtcaaatgacaataaactttcttctctcatgagttgagtcacattgtttagtggtgattttatataaaaatatgtttcaccagatgggtgatgatttcctaagcattttgttctagcacagtgacataacagtgctatatcatatgtcattgatatctttgaccatcacttgtgacaattcgttttcttaatttgggggaggatttttaaaatctcagtagaattattgtcctcaccactacttagactacttaaacaagtaaaaaaaaaaaaaaaaaaaaactgtccactttaatttccctgcattctttataccaaatttaatcattccttttccaggtcattggatctcagttataaatgagtctaagttcccagtttggtcaaaatacttatcgttttcagtggtgagggagaaacagtcttttatcagagcagttgatgataatttttaaaatacagtagtgaataaacattttttaaaaatttaacatttttctagtatatgaggatactcaggatgaagtatgttatcaagataattttggaatacaggactaaatatacctatgaaaaatataagatgatgctgggcatggtggctcacacctgtaatcccagtgctttgggaggccaaggcaggaggattgcttgagcccaggagttcgagaccagcctgggcaacatggagacaccccatttctacaaaaaaatttaaaatatagctgggcctggtggcatacacctgtggtcccagctacttaggaggctgaggcaggaggattgcttgagcccaggagttcaagactatagtgagctatgatcataccactgcactccagcctgagtgataatgcaagaccctgtctctagaaaatacaaatcgaaaatataaattaaacaaaagaagatgactctgccaggtgccttctgttttatctagtgactgagctgtgctatttatctttgaaatgacacctttggagatgtcagttgctgggttcctggtgaataatagaacaagcttccaaagtcggggttgttaccttgtgagccactgtacaataaaaagtgcagttctagttctctcttttcagtaaatctaaagtggtccagagaaacagcacagagactaagcaatctacctttttatgaaaagtttttaaaaatccaaatgaaaggataaaaaggcaagcaaccccagagcatgctaaataattctttagaataattaattcttagttctacacttgtctgaactacccagcaacaccactgccattcccaggccggggtgcctgcatctcttgactgggcctgatgtcaatctgatcttccagctcacacctgaggaggattgtgctctagtagtaatgacaggatcatttgagtggctttcaaaagcaagtggaaaatacaggctctttacatgaatttattccaggagcctgtattctcctggggttttaaacacaaagaggcttgactcgaatgtcaagttcaaaacgccctctagatttgcatcattgggagcatgagcaagagaggcttcctggctcgcttctctgtgtacccactttctctctcggctgaccctgatgaaggattctaagtggctgcaaatggcaggctctgtcagcctgtctccaaaaaggcttctgaaggaaatttctcataccctggaagaaagtgtgggatgagacgagtggatgggaagcatcttaaggttacttgctgcctttttaaaccctgctggagatggtaaccaagtcctggaattcttcctgcagcctggcgtgtctgtgtgtcagcttgaccttatctttctgaagcaggtgcactgagcccatgtaaagtgcacagatgtcatgtcctgctctcgcagaatcagctatgccacagactgcagtcgtctcattatgaatcttctttaatatattaatctaaacgtattcacctygctttccctgtctttctcagctttaaaaaaaacccacatacacaaagaggctgacttttaccatcactaaccttgtccaaggttaggggcgatttggggacaacacatgccctagtgactgttggtttaaaccgattgcattaatcagttttgcattttgatcagttgatcatgaaatgcctataattacaaaagtcacacatgccattatatgcacaaatgatcgggatgacttacacaggggtggagggcttcctaggaggaatgcctctttggttttatgtaaaagctgtaagggcattcacgttctgcacctgattctagtcggttcatgcattttaattctctgtttttatctgctacattttgcctacccatgaaacatgtttaggcctctcttagaaggtgtttgagagcagtcagctcctcagaaaatgataacattgtccgataagtaggaaatgaatcaattatttcataattattcatttgtttgtgaattagtttttcctagcaatttcaatattttggagtttattgaaatacagaacttacattttaaaaactaaccatcctattctggtgttgatgaattcccctaatttggaattcctagcagcttttaaaggtatacgttgcatgccattatattctaatttaaagatttttagaaaatgtatagagttgagcagtctactttcagaacatctccttcatcgccaaaagatcatttccattccccatttgtaatccctcctcaccatcacttctagcctcatttaattcttttttatttttgtttatttttgtgggtttgttttttgttttgttttgtttttttgagacggggtcttgctctgccacccaggctggagtgcagtggcatgatcatagctcactgcggtttcaactgcctaggttcacacaatcctcctgccttagcctctggagtagctgggactacagacacgtgccaccacacccagcttttttttttttttttttttaatttcttatagagatgggctttaactgtgttgcccaggctggtctcaaacccctacctaggctcaaggctcaagtgattcttccacctcggcctcccaaagtgctgatattacaagcatggagccgcttcacacggccctcatttaaatccttttttttttttttttttttttttttttttgagacagagtctcattctgtcgcccaggctggagtgcagtggcacaatctcagctcactgcaaccaccacctcccaggttcaagtgattcttttgcctcagcttcctgagtagctgggattacagggacctgccacaacacctggctaatttttgtattttttagcagagacggggtttcgccatgttggccaggctggtctcgaactcctgacctcaagtggtctatctgtctcggcctcccaaagttcatttaattcttgattcgacattttttggactttctggaaactgagaaaataaactgttaactatggtcctaccaagtttgacgctgttcctgctggctgtgtgtgtgggcgtctatgtgtggcttcataatctttcctgtacatattaacattgtgtctgcagccttatgatatcttcaccttcttaaagcacatggcagcataatttccgcatcactttttcatttgtggtacatacaaggatgcttcatacctaatgccgtttccatccttttaaaccacaggcacatccatctggaaggcctttttcttcacccccaacttcaaccccgtgggttccaacggatgctttgccacacacgtgtgcttctgtttcgggagttatgtcacccatcacgacccacctttactctttgatatttccaaagatcccagagagagaaacccactaactccagcatccgagccccggttttatgaaatcctcaaagtcatgcaggaagctgcggacagacacacccagaccctgccagaggtgccmgatcagttttcatggaacaactttctttggaagccctggcttcmgctgtgctgtccttccaccggcctgtcttgccagtgtgatagagaaaaacaggataagagactgagccgctagcagcgcctggggaccagacagacgcatgtggcaaagctcaccatcttcactacaaacacgcctgagagtggcactggggaaacataactccatctacaccttggatttggactgattctccattttatcacctgaaggcttgggccagagctcaacagctactcaactggaggggtgagggggataaggtctgtagtatacagacaggaagatggtaggtttatgccttctgtggccagagtcttggactcatggaaatagaatgaatagaggggcattcacaaggcacaccagtgcaagcagatgacaaaaaggtgcagaaggcaatcttaaaacagaaaggtgcaggaggtaccttaactcacccctcagcaaatacctatgtcaacagtataagttaccatttactctataatctgcagtgatgcaataaccagcataataaaaaggcaatcacataaaaaagagtttagtcgtctaaacataagtaactttaaggtgaatgaaagatcttctttaggaataatagatgatggtaagttccactttggttattggaaggcaagtcattattactggtattagttaaaacacatatcaaatgcttgctcttcatcatatatatagttatgcatacatacacacacacacatacagtatattctttcctcaaaagggttaagatgtctaaaatagggacctagaagcttaacactatttaagtaaatacagtagaagctcacaaatagatttctttgcacaatgattttttgcaaaattttacagtaataataatcccaaggcaaatctctcctgaactgctttccattccataatttgtagtataattcttggattccactgttttctttggggaatggaagttctgaattaaaagcccactgtggagatgctgtggttcatggaatctcttccagtgtaattcagaatcattggcctagaaagtctctgatatttggaggggaacaaaaatcactcacaagcaatccatgatctatacacataagcataatttcctttagttctagttagtcatcagagaacagtcatgtatgcaagttttgtgactgagaaatttctgtgcttccaatccacaatgagatgcatgattttgttttcatcccatttcccccaagcccctgtaaatcagggaaaatgcgcaactgatcgcctaggagagggcctcgtagtggcacagctggagatagtttcaaagtctaaaccaccagcccatcctgaggaaagcctcctatggaatgtaaagtgcaatcatttcttcagatataagactttccccaacaatgtgattggattcctttatggcaaaatcgagagaagctgccatccacctgcttatgcatttatctcttttgtggacttgtctgaccaccttctatttgcccagagtttgctcaattccaagacagtgcccatgaatgggacacctgtaatgtaacccacacagcggtttgcagagaatgttagccatgacttgggctttctgaaagttggctataatttctctatccctacccacaaccctgggaagttggagcaagaggggcatactattgggctgggaggatttgacagcatttccccagttgccctttaagttcttctatttcaaacgttaattttgcttctctttctaaaaaaaaaaaaaaaaaagaaagagaagaaagaagtgattcctaccccctacctccagagttgttgaaagctgaaaagcatacaagattcttccttttaacttggatttctcgttccagaaattgtgggataatctgtattcttgctttagaaaacattcttakagagggtactagcttactgatgatgtgttaggattgctactgatgctgtcatgtggaaactatttaaaggcactattataaatttatcctataagatgacaatgtttactcaaagtctaacatattcaatgcaagtaagactttctgaaaacacttgatgatgtggaaatgctgcaggattaaataacttgaagagcctttatagattatatgaatgcctatttgtgtctagaaccagttatttaacctgtaaaatgtcaatagcaaatgaaggatgaagtatatctctagatgcaaatacattgagtttaaaagtgcctcaaaataattgagatcacatttcaggacatttggaaatcaggtcgatttgtggtaactgtagtcatcttaaatttcaaaccatttaccatctgaaagttttgatttgaatgtaaaacaggaaattggaattcctttgtccaggagaaacctcacaaaccttctttaaggcatagttttgttgtttgtttgcttgtttgttgcaggctgtaaggcatggctgcttgtttacaaagcatctcattcatattacctgtggagttgcatatccaaaccttagtgagttttgaagctttaagcaaattcttttaaaaaattcttgtatttctagcattactagatattaaaagttaagcaaatagattaatgacgtatacataggcatcatttcacaaggtcagtaatgctgcaggaaaagcaaaattgcaatctacgtatctatggtactaaggaagtcctgtttttcaaaaatggaagcccacttctcagatttttytgaagggcatacaatgaaaagtgaaggggaaacacacacacrcaaaaaaacaagtatttggcttgtcacaggaatctgattgcattaagtgaaaggattatttagaatatgttaatgcaaagctaaaataaaattttccttggcaattaaaaatgctgtgcgctaataccctgctttctatcgtgactcaattcaacaatgtggggaatgtttactacatttccaacttgatgtcaagcaatggggaatacaagttccagttctgcaaagattcgtcaactttcttagctcaagagagaggctgagaaatgcagagaagaataagacataaaatagctccgacctccatgatccgagagtgggaaaaggcccgattattacccataaggcacactctctaaggccttttaaggggcctacaaaaatgttttattttataatcagaagaaaaggaaatgaacattggggattgaaaatcatattggtatttgcaccaacatagtcataaaatagtatgttaatatgtttttactttatatatttatatattaaaatatatttaatatgttttgcctttgtggcccatgaaagtcttactgggccctggggaaggtatcctaccctggtgaagcagctgctttgctctacaaatacctggggcagaaatttgatttgaaaagtattattctctcttctctttgtttcaactggattcctttggaaaaccaaactagtatcagaacaaaccccgaaacagtaagaaattggagtgagaagggcatggtattgggactaggatcggctctcattcgatcgagctattctcttaaaatgacaaaaagtgtccataaagaggctgctggagagtgcgtggccatagggagccgacatgcccgggaggaaaggtgttgattacatggatacttctaaaagctaaagccttgttgccttctctttaatgcctagagaatgggatgtgtgatgcaaatgctcaaaacctcttaaatcatagctgtctgacctctacggacctcacatccatctgaggcttcatggacaaagattctccacttggccaaactttagccaagctcctcaaccttctcccaggcccaatctgggcacttccttgtaaaatctagttttggcaagaagtctattaggtcagtttagcaagaacacctaacccccccatatctgttcaacctcagtatctgatcaggctcctcagcctccaccatcccccaggtgatgtctggtcaactggcctrccttcagctagaatcctgttaggtcggtttagatgaatgctccctgatatttcctcttggtaatcttccatccactgcccctgaccctgttccctgtctataaatccccagttttccatggtgtattcagagctgagtccagtctctctcccctactacaagtccccattgctgtggtccccgtacctgtcatgatggtcctaaataaagtcttactgtgctttaataggtagcattgaaaaatttttttctttgacatcattcatgacaacatgaaacctattgggacagcatgactgtgcagggtctttagagctcagctttctgaggccctgagcattcttggttttccgacatcgtgaacctgttctgtgttgcaagatatcactcaagccagtgttgcttaataccatctctttgtgtaatagatctgaataaagtaattgtaatacaccaatattttactttgttgagtattattttaatgggagcctttccaatgaaggaaacatcagctttccttgttagaatgcaagcagcttaaaaactacccatgtctttctggaaaggaaacattgccatgtaactatgtatcagttttctaagaacttcatgggccttccatataggagaccctcaaatctgggggttcatctgagagtggttctactcattaagttcaaatcctctaaaggattttttggtaagtgtatcttttttttttttttttttttttttcacagagtctcactctgtcgcccaggctggagtgcagtggtgcaatcttggctcactgcaaactccaccttctgggttcaagcgattctcccacttcagcctcccaagtcactgggactataggtgtgcaccaccacacctggctaatttttgtattttttagtagaaatggggtttcatcatgttggccaggctggtctcaaactcctgacctcaggtgatccacccaccctggcctcccaaagtgctggaattacaggtgtgagccactgcacctggccatggtaagtttatcttacctggcaaacacatcacatcttcaaagtagcaaattgtataatttcttacatacactttacacaataagcaaacacagtcacttttatattgaggtctgggctataaaatttgcttcactgagtatatgagtatctaaggtttgaaactaaattatacatggggattgtagtgtttttctaaaggtaaaattgttaatgaacatatttttagaaataggtactttgaattgcttgtcaatatttatactaatttaacaatgggtgcaaaaataaatacacaaagtaccatatttacaaagatatgcatattctccagtgcgcagggcccaatggttgctacatttggaatagaaactatctcatggttcaaatatacagattcatctcagtgagtgctgagcaagatgatattttcctgtttcccttatagtaatgttggcaccatatgagccactcgggcctggccataagtttcctgcataatcctctatggtgagagtccccacccccaggccacagaccactaccagtccatggcctgttaggaactgagacacaaagcaggaagtgagcggagggcaagtgagcaaagcttcatctatatttacggcctctctccattactcacgttaccacctgagcaccacctcctgtcagatgagcagccacattagattctcataagagcaagaaccctattgtaaactgcacatgcgagggatctaggttgtgcgctccttatgagaatcttatgcctgatgatctgtctctgtctcctgttacccccagatggaactgtctagttgcaggaaaactagctcagggctctcactgatcctacattatggtgagttgtataattattttattatatattagaatgtaataataataggaataaagtgtacaatgaatgtaatgtatttgaatcatccgaaaccatccgccacccccagtttgtggaaaaattgtcttttagtccctggtgccaaaaagtttgggaactgctgctctatgggtactctgcttgttgtcattgaatacagaaaattgagataagagctcagaggagggcctaagggatgaatggtaatatattagtccgttgtcatgctgctaataaagacatactcaagactgggtaatttataaagaaaagacgtttagttgactcacagttccacagagctggggaggcctcaggaaacttacaatcatgatggaaggggaagcaaaaacgtccttcttcacatggtggcagcaagaagcagtgcagagcaaaggggaggaaaagtcccttataaaaccatcagatctcataagaactcactatcacaagaacagcatggaggtaaccaccccccatgattcagttacctttcactgggtccctcccatgacatgtggtgattatgggaactacaattcaagatgagatttcagtggggacacagccaaaccatatcattctgcctctggcctctcccaaatctcacgtcctcacatttcaaaacacaatcatgctttcccaacagtctaactcattccagcattaactcaaaagtccacgtccaaagtctcatctgagacaaggtgagttccttctgcctatgagcctgtgaaatcaaaagcaagttagttacttcctacatacaatggggatacagacattgggtaaatacacacccattccaaatgggataaattggtcaaaacaaaggggttaccggccccatacaagtccgaaatccaatagggcagtcattaaatcttaaagccccaaaatcatctcctttgactccatgtctcacatccaggttatgctgatgcaagaggtgggctcccatgaccttgggcagctctgcccctgtggctttgcagggtacagcctccctcctggctgctttcatgggctggtgtggagtgtctgcggcttttccaggtgcacagtgcaagctgcaaacattttatgatagttctttggatttcaaaaagatgatagttctttggatttcaaaaagatgctttgatttactggtactgttttaaatagaagtcctgtgcattaattctttaaaggctatcagctgtgtgaaggtggaagtcagataaacttaaagataaaaatatagtggagtctaccatcaattaattgtggcccaggattgattataagtgattctgcaattctagtataaatgagtgaaaatgcagagttgattaatctgagcaacaaacataattattacgactattactaaatattgaggttcttttgaaatattgtattttgtttcactggattctatgaggataatagatttcaaaatatattacacatatggaaagatgatgttgtttttaatggcatttgaaaattttgaattttccaatgaatatgtttttataatatattatttgaattccctataaactttgtcacttttgaaatactttttaaaatagtgcctgtgtagtactctagtagatgcaatattttagttctgttgatcagatcttagtcttagcaaaatatcaaacaatgacataatatttaaagccacgctatttcatcaacctttgaaataataccatgcaactcgtgtttaatatttctaattagttcatgagattcttgcatcttgtgcttttctttcaaagtcaggttgtaaactatgctgttaatgcaaagtgtaggctctgtgttaaaatctgaaggcattctgcagcaaggtttgaaagtacccttgtctagtgcctctcggactgatgtgcatgaaggtgacaagtactataggaaaaggctggggaaagtcagagcttgaaataattcaggaaagggcactggtggcactggtggcattttatcagacaagggaaatgcatcgggtcagtaactactaagagaaagccggatcagacaggccatccattagagcttgtatcagggagagctgttcacattgtcacatcaggggcagagacaaagtgagctctgtagcacatcccattgcactgaagggaagaagagggcagtgtctgggtccacatgcaggtgttacaggcagggatatggatggtggttgatgagtctcatggatcccagacatggttctaagtgcttcagtggattcgtctatttaatcttcactgtacatctgttagatagctgttattattgtcctcttacatatgaggatccaggcacaaaaaaacagtacatacattgctttatgcttagatttatggaatgcttttttggttaataaaaaaagaaatggatagattcatgaccttcwtatatgactgtgcatgctgtgtactgcacaactccaggaggcagcattaacataatccgcagtgggaagaacattttctaaatttgtgcagtgcacaacctgtgccaccatatgtagcaatatccattagatagtgatgttgcaaaaatagatggatatgtaagtaatggacacaactgactaccttgatttttctagcaagggacacaggagtacggtttgtaaaacccatggatgaatctatgaactaatgtattgacatgagacattctggagtgaaaagggtaatccaagcgtacagatcattaaaatagagctaaaattcaccaagagttgatgtattgcgttgagggaaaaaacggcacatagttttgtggttatctgttggttcactgttccctgggcatcaccacactgtctgctaaaggttttcagcttactatgctgctcagacaaatggtaggactgcactctggcccttcgtgagccgtgaggagacatgtcacaggctacttcagagctacagcatctgtcaccagcactttctcaacatcccacacagaggctgctccctccgggtggtctcagagttaagatgacaccaaacagagtccagataacttaggagtaatacacagtgtgaacaagaaagaaagctttgttgctgaagccactgagatttggatatttttcctgcagcctagatacattcatcctgagcaacttatattaccattctgtttctgcaaaggaatgagtattacattttgcaaaatatttcatttcccatttttatccctcagggagtttatagctaaaggatcctgggatattttggaccatggaatatccgaggcttaatcagacttggaaaaataattcagatagttggaggaaaggaaaaatgagaatggctttgggccaggtaaaaacaaaacaaaactaatgttgagactcactgtatcttcagaaatatacacatctactaacttttactgagtgaatcttagggaggtgaatggcacttcatttggtaacatcttatgccacacggaaattgaaggattgtacaacttcagatccctatgtttcaacaactatagcaagccctgcattttaatgtcactttaaatgtgtttaaaatatttaatcctacttaattgtatgttaaattttttgacaatccttttaaaatgaaaataatatctagtaggaacaataatattcgtgtgcatcctacttattagtgctttgaatgcaagtaaatggtcttttgaccctttctcatttaaattgttcgccttttattcatcccagtcatgctgagtgaattctggtgtttaaaaaattatatagtgctattattttccatgacaatgctttaaagggtaacttgtgtgaggaagcatatttaaaattttattgtattatttccatcacaacaaagcaatgttaaaccttttccagggttataatggctccttttgtgtaaagttcattaaattcaacagtgatgacacttagaagagagctaccagccccaaatgagacaaggacttctgtgtcaaaatgggagaagggaatggaaaggcaagagaaagattagtaggagacacgtaggcaaaccttagtcatcccacgtctgtttatgatgcagttatcttaaagataaaatagagggtgagagaaccaacatgctatcagtctcagggtgacaattaccctgtaatagtctatcttcaactatcttagataatgcataagaaagtgcttgatgaatgattccatcctaaccactatttaagctccagggcagagaaaagaaccagaatttcagatccttacccctcactgtcttgtgtgtctaaaatgtgcagagatctaatatcagctcatcacttaccatggcataaaaataaatatttctctgcaaaagttcatctcggcacctctctgctccacagaagttttctaaaaataagagaaatcccttttggagatgcagagatttattctagaaaatgacaatgctcttggattatctttcagtgagatttggcaatgagcagtgtccctaacagctagatgacttgatgccctttctggaatataatggcaatgacaaatctatttttgcttcagcccaggcagctatgttaatgtgcactctgtgagtgctgaagacacttagtactgcccatccattttgaaacctttaataagaagcctggagttagatctgtcctctttccttctgttgtatatcaagagactaacctctgtggctaagc

SEQ ID NO: 95684 - DNA, 75452 bp, Homo sapiens
  misc_feature (1)...(75452): n = A,T,C or G
tatctctccccatgatgcctaaggcagagctgtcaagagtttttcccctcgtatgaatgtaacttcacttgtgtgtctaacatgctgggccagagatgaagatcagcatacaataatttgtcctcatctcacaacctcatcttttttttttttctgagacggagtctcgttctgtcgcccaggctggagtgcagtggctcgatcctggctcactgtaagctctgcctcctgggttcacaccattctcctgcctcagcctcccaacgtagctgggataacaggcgcccaccaccacacctggctaattttttgtattttgagtagagactgggtttcaccatgttagccaggatggtcttgatctgctgacctcatgacccgcccacctctgcctcccaaagtgctggcattacaggcgtgagccacagcacccggcctctcgcaacctgatcttctaactctagcctttggctttgatatgagttgccatcagagctggatggagcaggtcagaatccttcaaactcaatgactactgaagaaaagaatgagaaactctgtctagagagacgtaggattgcatacctttgcttaagctagtgtaagcttgattttggaatcagccagtgggaatacttttctgtggctgtaatttttttttttttggtttatgtgtatccgaggttagtttgtttaccagtttatttctgtattcaatgtgtagacatctaataatagcaggtgaatcatctctttggttttcattctgtaacactggagttacatgactgagatttcctttgtttggttgtaggtaaaaattaatggacccaaatgcttaattaaggcagctctaagattaaatgtttatttatgtaatataagaacagcctatatatttcacataggcctagtatatacattttccccttcaaaactcttctatatttattttagaacttttttttctgaatttttcaaatcaggaccaaggggcaaatgttttctcatattaagacagcaacatataaatgtatttttagaaagtaaaaaatatttttaatggtcaaaactaggtaaatggctaggtccttattttaaatgttttggagattaaaggacagagaatattctggactttctcccctgcctgttcagtcaatctcccccttttcccattgatgcgactccactccaagcactgtaaaagagctgggggctataaagataaataagacatagttcctggcataaataagtttagcaaaaaaaaaaaaaaaatcaaaatattaaaaatagtgttaggagtagctgccatttaattaacttgacttaagagctttatgagaataatcttatttaatcttcagtatgttcactgtcctttattcccctatacactgtgttctccctgctctcttaaggagcttagatcccttgcttcatcctcagttcccttgagtttttctctcccttctcagcactcatcttaaagagcccacattcaattccacaccctacctgctccttgcctgcacatatgctactgtaagtggctggaggaacatccacaaccaggcttactggtctctctttaaatttatggtcaccgtttgaagggaatctttactgctgctattaccggaaaggggtctcgatccagaccctaagagagggttcttggatcttgtgcaagaaagaattcagggtgagtccatagagtaatgaaagcaagtgtattaagaaagtaaaggaacaaaagaatggctgctccataaacagagcagccccgaggatctgctggttgcctgtttttatgattctttcttgatgatatgctaaacaaggggtggattattcatgcctcccctttttagaccatctagggtaacttccgacgttgccatggtatttgtaaactgtcatggcgctggtgggagtgtagcagtgaggacgaccaaaggtcactcttgtcgccatcttggttttggtgggatttagccagcttctttagtgcaacctgttttatcaggaaggtctttatgacctgtatcttgtgccgacctcctctctcatcctgtgacttagaatgccttaaccatctgggaatgcagcccagtaggtctcaggtctcggcctcattttacacagctcctattcaagatggagttgctctggttaacacgcctctgacactgccagataatcataccatattttcctagttcctttactgtcctggaaaatgattttcatatgaactcctcctccctctcccaataccttctttcctagatggtcttagctgatggcagaaaaaatagatggagtcagaagacaaattccatgaagtccttcccggaaatatacccagctactggactctgtgcaaagatattctcctcttcagtgactgtggaggaaccagtcttgtttctagctaagggcaagccctccactcaaacaataaatgtcacctgagttgcctattctggaactttcatagagccattgacctacttctctcctgcctcataaagtttcctctcctgactgaatcagcctcattggcataaaactaatcagtgcccaggtaccaattctactctactgagcctttctttggcccatatgttgctctgaaatttttggactgtatcatattagcaaagtgattcttcgccatcttaattcatctgctctgaaatctagaatcaggaaactctaaaaatgcatagagaagcaaatatagatactgtaaaatctacattctaactacatgccctttagttccagaaaagttcttcttcacctatttaatctttctccagatgcaattttaaaaaattcttacattcactcccctaataattattgagcaatttctatggacaaggctctatttcaggcattcagtaaataaacagacacatcacataccctcaaatagcttatattctggtgatggggagaatattcaataataaattaatatgtcatgtggtaaaaagtattatgaagataaagcaggaaagggggctagcaagtgacaggtggtgtaataaggatatgcgttattattatataataagaagaatacgaagtaaactccatgatatttgggacttattattcacctccattgcactaacactgataaaaataatggcacatagtaagcacaaggtaaatattgtgtgaatattttgagaatgaatgaatgaatgaatgaatgaatgagtgatggtgaggaagagaacccagttaggaggttacaataattcaggtgatagccaaatgatggctaaacacaggaagaaactttgcaaatcatgagaggagaccatagtctggatacatttaaaagatagaactggctgggtgcggtggttcatgcctgtaatcccagcactttgggaggctgaggcaagcagatcacatgaggtcaggagttcgagaccagcatggccaacatggtgaaaccccctctctactaaaagtacaaaaattagccaggtgtggtggcagacacctgtaatgccagctactcaggaggatgaggcgggagaattgcttaaacctgggaggcggaggttgctgtgagccgagatcaccccactgcactccagcctgggcaacaagagcgagactctgtctcaaaaaaaaaaaaaaaaaaaaaaaaaatagaatcagtagcatttgctgaaagattgtctgtggagagtaggggcatgattgaaggagagaaatcaaggatggtgccaaacctttcgcctgagcaactggaatggagtacccattgatttaagtgtggaaatctgtggtgtggcaggtgtggtagccaaaattaagtttctttgggactgtaaatcaagtctatttctacatcttcctctccctctttcagtttactgagatacctaaagccaagcactgctgtgtatccaaggaaaaccattcagagtcattctactgtggaaaacatccatactggttccattcttctctctcttggccagacacagaggcatcctgtgttgatggctgcctttcttatggccaaggaaggctttttccttcaaattcatcttagaggctttattttggttcaagaaagtgaaagataattgaaggggatgaaacaaggaaaatagtgtttgttgtacatttctgatgatggcaacagcttgaatcaatttgctgtgtttctgtgtctggctggtcacagcagccggatccagaagaacacattgcaattgccattcagcatggcctcttgcatgcaaacctgacctcaaaaaagcttaaccaagtcttgttatttgaaacaacacacacacacacacacacacacaatcaagtgatcaaaaatatggtataaatctatttagtaaagagtgttctggattataatgatggtaacagaggagataactcagatgtaagaaaggcaaagaaacttgtaaaattaaaaaaaaaggcagcagcagcggtattttttttttaggattgtaaatgtcccctacatatttttgcttttcttgagaaaaatgtgcaagatcctttccagcaagtttggggcagtaaaatctacaggaaagatgcagagagagagagctctgctggtttccatagtatgtagttaattctccttttactctgttctaaatataatcctgctcatttgcatgccaatccccagaatgctttgtaatttcacaactcttggctagtggtctcagcacttacgctttaagaacaaagcaaaatgtttagggcgtgcctttggcccagtctttttattcccccttgtgttttgcaagagtatagggaggtgatctttgcttggcattcatcctcctttgcagagtatcacagaaataaagtggagactgctgtggacttttcttgcgaagactgcattcagtccaattaaccataaataaccagaagcttggattaactcacttgagagggagtgtttaaggggggctttgtgtgtccttggattatgtgaccagtctggttcgtttcgggtttatggaaagcccaagccggagtattctgtattctctttctgtggatgccttatatagtttctttatcgcaagcacgycttcactttaatgacaagatgtctagaattgccatcagtgggctgccttatggaaacgtgaattcaagattcaacacagctttagtcatgcttagtgacatacaggatttctatttaatagaacattaagattgacaattggggagcggtgggaaaattgtcttcaaagggttttataattttttttgcatagcaagtctttttttggttccttaaattttatgtttggaattatttgtcgtgagagttgaggagctccctcacccccagccaccactcagaccccacccacagtggcctctccaaatatgtctccctttggccgtttgattttagcaggtagctaaaggacaatgtattccatcgccgaagggccatggttttgcttgtaataacatataaaccttcgtctgtcagccctgcctaaagtaaactcgggattgtgagcagtgcacgtggttcattactgatggggagcaatagcagttctactccaaatccatggctgcgcaccaggaacgtgtctgggctactgccttcccactccacaggtgttttctactttttactcacagagcagcattcatgttctttctttgattctgagactcagtcaggcagtggagtttctttaacaagatactacttggatattttttaaatacagggaatggttgagtccactgctaccgtgccccttgcagcctctgagagcgagtcacggctttccattttctaatgtgtatgttccgggtctggggaccccagcaggcccgccaggttgcagagtcggaccagtctccggcgtctgaaggggctgcgccgctgtttaccaccccgcgagcagcagaggcggcgcccagccctcctctcgaacaaaggcgcggccgccgcattcgacccgcgccatggcagaggagagcgggtgccgggagggaagccgggaaccgtctccattctgaaactagggcggggaaggtaggagatccgacgaggagctggctgggggcggcggcgcccgcaactcggccccgcggccgggagggcgtagctgatgctcccacccccgggactcagcctccgctcccgaaaagcccctcgcgccccctggtggctgtggagcagcctgactccgcagcactcgcgaatcagaaaaaaaaaaaaaagaaagaaaaagaaaaagtgggtgaggcagatgcaaagaggaaaatcaatagggataagagagaagagggaggagtcgcagatcagccattcttgtcttatggggtcccagctggcgcagcaaaagaaaaaaaaaaacaaaacccgggcgtgaacgcgggtggaggagggtgtgcgtgggggggcgggggtgaaagggggaccggggagatttactattgtctctggcagccgccgcgggagcccgggaggggggcggaggcgggcggaggcggcggcgcggccagcgcaccattcactccacctgatctcggggcgctgtgcgctgaggaaggcgcgggcgagycggagcagaagaaggagggagggagccagccgctgcagccaccaccgccaccatgtcctaccaaggcaagaagaacatcccgcggatcacggtgagtccgggcgccgctgctccctccctcctcgctcgctccctgtccgctgcgctgcgggcggggtcggctcggatsccgccggcttcyctggcctggtccccggggagggacggagacccggggtccgggtggcggagcgcggcggtcagtccagccggcgccacacagactgagcgaycctggggtttggggaaaacaaaacaaagaggaaacccaaacagtggcacggagaactttggattatttatcctcccttcccaccgccggtagttccccaggagcgcggggctcgcggctctcccaggaccactgctccgcctggagtgtcggtttttgccgccccaggttgaggtgtgctttttgtctaaggatccttttggccgtgctgggtttggagagatgacacctttccccaggggtacttggcagcccgaccgcgcccctctcccagctccagccccacggctctgacccctgcgccgcgagggtggcagggtgtctggaccacctgtcctcgccgtgtccccttcttgcctgcgttcagtccgactcatgtttcaatgtatcgtttatgggactggacagctaacgtggctgcagtgggaakgatcaactttatgtgtgtgtgtgtgtgtgtgtgtgtgtgtgtgtgtgtgtgtgtgtgccttcgatgcactttacatttttcatttcttttctccctcacatcaaagaaaaggccgagtttttagagcagattttagtttactgtcgcgggcgcacgctgtatgcatgcagtgttcaacccattgtgtgcaagacggagacaccgcgactggcgggtgtcagatgcgctagggtgtgcctagggcggggtggagaggggacgtgccattatcaggtacagaagccgcgtcttcaccggcgcccagcaaggctgggattccgtggtgatgcgctgtaatgatgcccccaaatagtaggcacatatggcaggctgggatggtcatttacaaaaatagaataaataaaaactaacgttttttagtttagcacgaagcagtgcggttgtgctttgtctatagtgaattggatggtgtgtgtgtgtgtgtgtgtgtgtgtgtgtgkagtgggggaatgggtggctactccatctttgcaagctgaacaaaggaagtgatcagctggcccctgggaggctctgcagccgccctagggcagagctttacctgccacagtagttgatttgcagggtccgccaggttttgttgtgggcatgagtctgtttgcacttgttcccttaggcttggaacatcctgtgcgtttgcgattgagatgcagaaccttcccctctgcaggcaggaagaagcctcccttgcgcctactatgttttattgtcaaatggtttatttcttttgccgcaccatacctttttcatgcaactgagcttcacttcacacaaatgcaccccacccctmccagcttcccagctggtgctggggaagaaacactccccagggagaagagttgaggccagcagggatccttttgcctggtagaggctttgggttttaactgatcctcctttaccactacctgatggcattcactttccattattgaagaaacatcgtgggtcttttacaatgcacagtattgtctagtgctgactgtcttgtctttccaaagagctgtggaaattatcatccaaaaaaagaaagaaagaaagaaaaaagaaaaaaagaaagagaaaaagctgaytgggacaaaagctcaatttttacttatctccccaactcaggagattgaaccacagctctcatgctattctatgctrgaggtatgccacatgtatctgccacttgctttaacatccagtatatatttgctagttttcctgtttgggataggcagagaaccgatattttttttccctcctagactgcagtggttcttcttctggactcagcctgtgacatgacattgagagccacacccattcttctaggtatcatttaagccacctttaaggaaagataaggaaattcagcattgataacttgccttaggagctccagtaaatgtggttgtgccccaatcccaggaccagatttgcagtggattcccttttgtctctggttgaatgatcttccctggggtacatccttcattttcagtgcggcttccatcctttctctctgtgtgtggggcgtggtgctgcatagcagcctctgccttgaagctggggctgtatctccagcagctgttaacaggagtagacagtggttgtgaatttcttcaaaccaggctgccttgaattcattggttttaacaaccaaggggatgaaaaggaagggcatggcaggaggcggatgttggtctttggggataaggaatccatttgtaaattttctcatgcttcgtttttgcatttccatgaacaaggaatctattttagaataaaatatttatgtatgtttgcatgtctatagaagattatagttgtctatatactgtgaaggttgaggtaccttttctagatatagttgtaaatataacaatgtagacatagatattcatgtgcagcaaatatgattaaagatctaagtataacatataccccctaccatcaattctagtacattttaaaaatggtaacatggaatttgaattgaattttctatgccacctctattcctttctgtgaaggcagccccacccagtagctgaagtgtcactacaatctgaggactagtgggggcagtctttcttggcctggtaccctttgccttcctgggaactactttctaccactgttttgggtccaagataggattggttgtttttgttttgttttgttttttcctccttccacctatttttattgccctcctgagattaaggcattcttactatccttgttttattggtttcctgtggtagggctggaaatgagggggagatttctgtgtccctgttggagttggctcggagtagctacctttctcccgagtagctcccaagacttcagatcttcattgtcccctctcagggcagctatgtggattatctgttctacctcaacacaagccttgcttctaattatcagagactggcagttttgggggttcgacagatcacagcaagggatcttcactgtctcgcgatgggcctggtttacagatacataatgattatcacttaaatggatkaattgatttaaaattgttcctaataatagcccatacctgttgagtgtttattttgtcaggtattatgtttttttatgccttacatgccttgtttcgttgaatccttgactcagtcaatactgtctgagagggactatagttacccctattttacaagttaaaaaaatcttagaaaataaaaaataatttgctcagggtcagagatttagtaagtgttggaggccagacttaaacctacatacccaactgaaattaaaatgcatgtccctcaccatcacactctttttggtgtctccgcctctgcctctctaccattgctgttacttgrcattggtagggcaaatggtttccagaccatctgcactgctgggaggcatatttttcttgtcactgtcaacaaatcccacaacatggtctttcctaccttttatattaagtacatataagaacacgtttttgaaatagtagtcaccatcaattctacaggtaggaacttttgataagttacagttattgttttcctctgacatacgttacaacttgaagctgaccacaggaatgggccaggtcctaatacttaggcacttaggttccagtgttttatatgtattttcatattagaacctccacagataatcatttcccagttaaggaaggacattgaaatatggttaggtgaagtcagttatttagagttgcctggtgagaatattggggcaaagctagcaatcaaagctaggccttgtccagcttcaaagctgaggctgccatggtgcagcagctgcctcttggaggcacgtgcagctgagatgttgaaagttgtggaaacagctccagaattccctctaggagacaaattatagagaactggtcttttccaaccactgattggatttctgtaaacattgtcttgcagataatgcatttgttttgcattgaaagtttggttgtgtgtgtggtatttgggaattgctggaagacgtatccccagttaggaatacaacttgcaaagttcggtctagggcgtgtagtcagagctctgtgatctcccttgaaagggtgtgattgtgagtgtagtaggtgccactggaatttattttctttttcggagaagtgaagggaccttatgaactggagtaacacccagatctctgcagcagttaagctgggggcctagaactagactagagctagaagaagggacaaatgcaatccgacctttggatctacacattcctcttgcttcaatgggtgtcatttaagaattagaggaaaatattaggagatggagaactagagttgaggaaaccaaaagaagaggagtcacagaaaaccagctctctctgtgcaaggcatcttgaaaggggaattccagagtcaaagacagaagaaaaatagcaaacacttaagaatggaaagcatcttagatatctgatcatggaagtctcagcccagtctcagccctgcctaaagtgttcatttgttattttaaattttgagcaggtatgtgctgattcttagccaggttattccttttcctcaaatactaggagaaggcctcaggtatakaaagagccctgaacattagtagctgtgaccaagccagctgggcattgggaggaattctgaagaaatagatttcctgagagaattcaagtctatgtggcaagaccctcagtttgtaaataaaaaaccttcctgcttattgcactgagctactaagaggctcaaatagtggccatgaaagtggtctgtgaactctggatgtgttcaagagagcagatgctgatttatatttataaaatctcaactactttggaatgtggaaattaataaaagaagacttgacaatggtctggtttagaaagagactacttaggaaatgattttgtaaaaataagagttttccaaaacaaaaataaacagcgttatataaaaacttttttgttgttgtttagttacgttacagtgttcctaagaattttatgcttgtcatctctgacagtccgacacaggccattagaccgcctttgaacttttgatacagagactctcccttaacctgaatagagggcattttcctaaattaattgaactctgtatcattttttagtcctgatcaccttctagcctagagtgacacatgttatgaagatcctttcagctgtttcttcataactcgttttttagtggcttgwctgctcttttttcttcagttggaaaaaaataaaactaaatttgaaaagaacaacaaccaaaagaaaaaaaaacccctcctgtcctaatgggccctctgttctttacctattgacatattttatagggccatttgtgtttgcttattacatttgaaaaacggcaaaatgtttacagtagtaggaatgagtctctaaggtgtaaatgttttcatcctttgatgaaatcagtgcatctaatcagaaggagacaggaaatttgaatatgtcattacctcttgtgatggatatwtktgtttgtttgtttgtcttttgttttttgagacggaggtttgctcttgttgcccaggctggagtgcagtggcgcgatctcagctcacggcaacctccgcctcctgagtagctgggattacagacatgtgccaccatgcccagctgattttgtatttttagtagagacagggtttctccatgttggtcaggctggtctcgaactcccgacctcaggtgatccacctgcctcagcctcccaaagtgctgggattacaggcgtgagccaccgcacctggcctgtgatggatgttaataggagaggcgaactgctccctggttactccctcctcaaatcaatgctcaactttgccttttctcccactttctctaggcaaatgagaaacaaataagaaagaccttggaaaacccagagaaatcgactcctgtattttcagactccttttgctgtgaagtccctctttcatcaacatatgcctatttcaatatacgaaacacaggtatcctcccatccctcaaaaaaagccaaagctagtttggtggaatagaatgaacctctcaatttggcctcttcttttggttccagtccctacatgaagcccagtataaaaactacttttcttgaggaactttcttctgttaattagattgtagggaacacagtggtaagaaatatgggactaagcatggtggagctattattgttaactgtcttagtaaaagctacatggattatctcatttaactcacagcaactcttatagctacagttattaaccatcattttgcattctggagagaggctcagagaaactaagtaatttggctaaagtcacagagctgaaaaagcaagatcctgggattgatccctgcaaaggtgaattcgtttcataggcaagaaagcagtagttccataggcacaggtgactacctcctcccgccattagccattatctccagctgtccacacctgttagctcctaaatgtgggtcagtattcacagggtggaaggattggggatggtctggccaaccctgtcacatcactattggaacaacaagtgagttgtgtgtcctcttgacagtggttcatgcattgcttctgccagctgtctgagttagcttctggcttttgcccaggagcatgtatgagtacagggtggaaaagcagatgctgtttttctgccttgcttcagagcagatctgggtctaaggccctttctcactctctatccctgtcttcttcccagacatagccaggctgtctgtttcccttcagtcacgcggagaaacattaacaggacacacccagcactttaagctagatggggaagctccacagtagaatggtccaggaaccyatttggaacatctrgaattcaaggacaacatttctcatggcctaattactatttcttttctctggaagtgctggacaatgagattttaagggtaaaacgagattttattttttaagagaagagttcctcggactagaagagcaaaagaaccatcttgttcttggatgcggaataaggaagcgaaccctggagggagtatcagcacactgtgcttcaggcctgcctttgcctctaatttacttgtcactttgggcaaacccttattatccctctcagattctgcatcagtaaaatgagggcattgaaccagatgatccttgaggtccctgccagtgcaaatgaccctgtgagccagcccctcctcactttgttccaaattcacagagaggagttctaaggccttcctgtgagggaaaagagagtagggagaaagtggatgagagcgaccattgttggctgaaactcagagggaccagccaacatctgtgttggatataagcggctttggttgctttttacacttaaaatcccagtctttttctcattcagggagtagacttaattaatagattttgtgcagaggagaaatggaataatgatgactgagatcctctgcctagtagagcgttagtattaattcagatgaacattattaaagtgatatcatgattcatttgctgtcacatacagtctttctttaggataaggctactattgataagggcatgaaggcgataattgcccaaaatctagactggccaaacaaacaagaaaacaaaccaaaaacaactcggagtctgtatctgctcaccaggctcttttttcagctgctcttgctaatattttaaatatgatggctgccatccaatggaaataatctacccccaaaggcccaatcatgccatgtacatgccatgaggatagggatggtttttgttttgttaccactgaatctccagcacttaatctttggttgtcacatattaggccctctgtatttgctgaatgagtggatatatttaacacttacctacaggaatgatttcaagagagaagatcacctgaaagtgtaccaatttgttcttgtacataagcttccctttgacatctttctagaatattaacttctaaataaggccagactcttaaggcataggatcactgggccaagagaaacatgacagctctttagcagaacaagcaagtcattgtaatgcagggcctgacctgggcacatgtgccagaaagtccatccatcacttggacttctttcttgtctggcctccagtcctctttttcttccagcttctgcatctgggctcattctgagcttgtttcaggggcctacctggatacttattgcctgcaacaaagacatcatttctcttactgcaaatgatttgaaagaattaatgcagacctttatgtcgtctttcatatagaggaaactgtcaccatgactctttgaaccagaatacaacatagatcttaattgaggtctctttctgcctttgcacgtaaactacaaagtcattagagttattagcagcaactagatagaccaatctgcatttgtaaagcaaacttggtattttggaagtattggttaagaagcagctcatagttctttttgtttccctattagggctggacatttacatggaatggttttgtgtctgtgtgtttcaaaagatttttagtctcttaccccactgcacctgtcagctttctctgagctacatttggagctattcttattactcgtttttattctaaatgtaattctttggtttgaggggtggggccagttaacacagattttaccaggcttatctctgggtacaaaccagagagtttatggtttcaataggtttatgtgtaatggtaatcactagagccttttaaagggaggacaaaatgggagaatcaaagtatattcatggaaccaaaaacctttgattagaaagtgtttgaagaactatgtgtgttataagagtgtcatatataatataatcaggtatgataaaagcattttgctattttttattgcataaaagatatttattgaccataagctctggcaaaagttagtttaataataagaataattcacatttattgtaccctgtgtaaagtgctttttattcattatctcacttaattatcaaaacaacttaattaggtagatagatttttcaccaggtctttctttccattttattgatgaggaaatttagagagattaagtaatttgcctaatatcacacaaggcttaaatgatggaaccaaaattcaaacttaagtttatgtgacttagagcccccattcttaaccccacggtatggtgctaccttaaattatccctccggagggataataacttatccctctcccacctctggagtcacaagactttgattccaattggagttcacttacttcaagtccaggggtaagtccttctctgcacctgtttcctataaggtatgagtggtgtaggttatgggggacatggaaaacagttggtgcccctcttctgcaagggggatggactccttagcactgcttggcatcaggaagccctctagccctcctgttaagagcggctttgtttctggcatgtccaaagctgctccacactgttatacttacacaaacaacttgccagggagattcccaccactctcagcatctttgcattgaattagcaaaactaccaattagggattcttcctaacgtgaatttaaatgccaccttctcatttcatactccacactgcatgccccattctcttaaatatatcttaagtaagattcttttgaggtttgacttactatggctctgtaaaattcatactttcagagtctccatggagataacttttttctttatctctccttaaaaaaaaaaaaacgggatacatgtgcagaacgtgcaggtttgttacataggtatacatgtgccgtggtggttggctgcacctattgacccatcctctgagttccctcccatcacccccccaacccccaacaggccctggtgtgtgttgttctcctctctgtgtccatgtgttctcaatgttcaactctcacttataagtgagaacatgcggtgtctggttttctgttcctgtgttagcttgctgagaacgatggcttctagcttcatccatgtccctgcaaaggacatgatctcattcctttttatggctgcatagtattccatggtgtatatgtaccacatwttctttatccagtctatcattggttctatgtctttgctattgtaaatagtgctgcaataaacatacgtgtgcatgtgtctttatagtaggatgatttatatttctttgggtatatacccagtaatgggattgctgggtcaatattttttttaagtctaatgccccatcttatgaataataaaaccaacacccaagtggtacccacctaattagtgtttttgctactatctgttttactgtgggacacaaggattttaaaattaactaaggctttttttccattacaaaataagtatgctggttgtagaaaaatttaccaaaatcacaaacaataaggacaataaaaataagctacaatgaaattactcagagagaaccactgtaaactttcagtatacccatctagatttttttttttgactatatttgccatttattaaaatgattccacatattgtttacgctgttttatgccttacttttcattgcacaatatattacgacatctttccatgttttaaatatccttccataatttaatttttaatagctatatattattacattccttggaaaatctagttaaatgaatctcattttttttgcattgttttgattttttccgagatctttgcattaacaacaaaaatgaaatgacagatttattgtcggttgttttttagttgaagccaaactaaaaactgcctcaggatgagaggttgagtaatcttcccgaagtcactcagctcacgagtatcagactacagattgaaatcccagtgtctttactcttagccttatattcttgtcaccactcattccttcattagttgtgccattttacatggaaaactctgctttctctcatttcctcccgctcttgaatgagcacatttgttttctcaccgccacctttgccttcctccctgtcttgctgaggctgttgacatttgtagaggtacactgtgtcttgggacctgaagctacgcagctggagaggaaacatggccagttcttccccactccttactggctcaacctataagcttggaagctggttttaattttacattttctgtgtgtatgtgtgtttgtttttaaaacttttttccacttaattctttcaaggagacctttatttgaaatcatgcactttttcccgcaaagcgaatctgtgcctcaaatcttgatgagattactttgtttggggatattgataaattcatagtggggtttttggtttatccaattaaattggtttaaattatggccttatagagagaaagggcctcagaaaacttagagggttttaaggcaattgaatataatctgcttctagggacttcatcctgggtttattccacaaagaaggtatgttctgtttgtttccttttcatttcacttacttcattgcatgctctatctcagaaccctttttgctatgagaaattgtgggaaaaaacagccttgcttggctaggggcaggaagagaaaagggacctgttattccaaccccttcatttgaatgattgagaaaatgtggatcaaaaagggaaaataatttgccaaggtcatacggtaaaataggtttaaaaaagtatgaggcataggactcatttttccttgctcttctgataacttttgttatgagaagttatagtgcttttctcgtaattttgttgaggaaggcagagagtgagggggagagtgaattatgtcccctacccagtaattaaagtcttaaccctcagtaccttacaacatgactgtattggaggcagggtcttcagagaggtaattaagttaaatgaggtcattaggatgggccctaatccactctgactggggagttttataagaagaatagattaggacacagacacgcacagagggaagaccatgtgaggacacaaggattaggggagtttgatctatataccaaggagagaggattcagaagaaaccaagcctgctgacaccctgatctcagacttctagcattcataactttgggaagataagtttctgttgttaaaaccatcagcctgtggtactttgttatggcagccctagcagagtcataaagggagaaagtgaagaacaaagaatgaaaaaattaaaaacttaaaacttgagaagttctcagagagcagaaaagggagccccaaataaaatttataagaaattatggcaggccagagcccatgctaactgattttcaaccataattgtgtatatggcatttcattcaattctattaccatgccgagatcatagttattattaacccactttacaaatggggaaattgaagctcagaaagttaatttacctcaagttacatcattattaactaactggcagaactaagtccaaattcacctcttgtcagccttgaaaaccctcacttactgtactgttctatctccttttaagaaggttaatgtaagctgcttaggaaacattacttatcaagttatttaatgttaggagaaataaaaaaatgtactccaaagtctcagtgacctggaatccacttaattgattagacaggaaatatttggcccctgattttaggataaaaagagagattggggaaatttaaaaagatagcataattagatttcagtacagtcttccccatggctgcactttcacatgtctaaatgaacagctacacataatgaagaattaatgttcatagtgatgtgccgtgggccgtgaagacatctgatccatcagagagaatcaacaactgtcactaggttgcatttgctaaagcaggaaaccagatccataaatctataacatgaggagacttggaagctgtctatgtcagagttttacaaagacataatttcagtgattagatagataaatatgcaatcaatccaaaagaataatcaaaataacctgagctgctggtaaacccagatgttatgttttttgtttttatttttgaggtggagtctcactctgtcacccaggctggagtgtagtggcgtgatctaggctcactgcaagctccgcctcccaggttcatgccattctcctgcctcagcctcccgagtagctgggactacaggcgcctgtcaccatgcctggctaatttttttgtatttttagtagagacggggtttcacagtgttagccaggatgggctcgatctcctgacctcgtgatctgcctgcctcggcctcccaaagtgctgggattacaggcgtgagccgctgtgcctggcccacccagatgttataatatgggaactatgaagcactttcaatattgaatgcagatggctctgtcgaagctgccttctcactgttttaaagttgtgaagtctatcaatcctgaaatatatagattaaatttacttggatatttagtaatgacacagtcaaggtaagaggtggacaggcattgttttcaacagatactgggatcgagtcccagctaactgtatattagctgtgcatatttgttggttctacctttagagtagaatattaagccaaccacttctcaccatttttcatcactgtcatcaccctcactcaagcctctgtcatcttactccaagaactcttctaacttttctctgtggtttcactttgcctacccctaaattcgttctctattcatgataaccaggtggtcctctaaaaatgtaaatcaaaccaagtcactcccctgctcaaatatctcctattacacctcaactaaaacccagaccatggctcttgaggtcccatgtggagtggccctgcctacttctctggtctccagtcctgccactgactgtcagtgactcagcatcagccatcctcccattatgacactttcatgtccagctcaaagcttctgtacttgttgtttttttttttctccctaggactcagattattcacatctgttcaggagacagctccttagacatgccctctttgaaaatgtaaccaaatgtcccagactctcttcccagcctccaccgtccccttatcctttttctaaatttcacttatcactgttgaaattacgctatttatttagtaacttacttattctttgcactttcagccactgcagtgccttattttattttgttcactattgtatcaatagtactgtgaacaggaggcatttacaaatattagatgaaggaatgaatgaattaatttagactaatgtttctttccctgggttaagtggtttggcgagaacagttgtcaaggaaacagggttatcaaaaggctgttagtctgtctgctccatgatcctagggactctgtgtcataccccactgtatcaccaaaacctagctcagtctacccctgaatgaatggaatgataaatgaaagatgaagacttggggcaacaggggaagagtgataacacataggtgaaaactggctgtgtctgagatgactgacaaagatgataacttgtttgctattttttggacaaaatttaatacatgttacaacatacatcttgctttgatagacataaaacatgtaactgtaaacttcagtctgaaacatttctgagcagagacacatcacaaaagagtagactattccaaaagaagattattcacctgttgttagactcatagaatgttaaatagtgatcattgggaagagaagtgggcagctttatggctttgcaggtaagggatgaagtcttggaggttctaagcacagagaatgtattcccataatgttaacatggtctttgccgatagtaagcggtcttgaatacattccaggaggtgcctagtatgagtaaagccttagatctttattgaaggcgaagaaaccttttgttctaggattaactacccacttgtctctgatttttgagttctgataatttttaagtggtgtctcgtttgtatttagttcaagtgtttgtttcattcaaggtctgcctgacctcttgaagtccttgttctcagagcatctgcagttttatctatcaatacaacttgaagaagttcagggccaaagaatcaaaaatagcctctgctttgataaccacctctctatccaatgaaagcagagttgcgggtgtataggtttttagacagacagatggaagcctgtaaccaagaaaatcagtcatcaccattgtctgctttgtcaagaaggaaccagaaaaaaagagcgaactcttccctttctttccttacccatattcttttatagaaggtgtgtttgggttgttgtagaaaggtagttaagatatgtggtatgaatcaaaccaacctaaaaagaaatgaaaagtcaagttacttttcagggataaaggagagggaagrtaggcactaggtggaaggctttgacctgagaagatttagggagattctagcttctaaaggaactcacatttattgagaatctgggcttcatcctcacagcattcctttgaaaaagatattattttcctcgctttacagtcaggactccaaagcccttcyctttcccaccattycatcaggctaactggcactgattcatcacttgaattcttggactgctttaacaatgaggaccctctttgcactcctgtatgatagacctaatctttgaggtctggactacaaggcagagcaaactggaagacatctgtggtctttgagacaattccttccttccacactctccatggggccctcttcatggccgcctggtgtgactggagcaccacagctgagtgttctgttagacttgcacaccacggacagttttaggaagttacataagccagtggttgtgtgcttatgaccacaatccccaagaagctcccacaagctttaaaaatacaatgtcagacttgaagaagaatccctgtggcctccacaaatagatggggagctattgcctgtcatttgaaggtgcttctcacacattccaaggcctgagcccgcattcctcctctgggagttgcattttggcgggctttcagatttggtgaaaaggtttcttgtttctgagaagcaatagggtgggaattcactcgacgtctttgtcattgtaaaggccctgtcaaagccagctgtcagtcagaaaagatgaaaagagagagctgcttcttaagagggagctgggtaccattaacggcacagcctcttggaaaggcgaaggggatcacagaactttgaccggaatccttggctcccgactcccattctagggatctttccacccttcttttctgcctttcagttggcacagccattttcagcgtggcattaactcaagcccgtccactaacacctgacctttctcttaaatcccaggccaccatttcagtgacctgctacattgctgtatggttgaccagtacctcaaaattattcttagtcttacacttcaattttgttagtcctttttctgtttcctgtgtctattaatgggtcctctgtagacatgctgctttaaaactcagtctggtttggcacgtctgcatctgcgtcactttcccttcctcttcagttacttagttgattgacactttcttctgcagtatgccattgcattttctaatccatattcttcctgtcacactggaccacagcaattaccacattcttttacttttttataattttctttattaagttccttttaaaagttataaagtacattacgcatatgcaactagagaaataatgtaaataaatagaagagagagaagaaaaagtttaaaaggacccctacaacctctctctgcatcctttccttctacaacatccaatgttaataatatgatgtgcatccttctggaactttcttccagatcagctcacacaaaaatataataaacatatttacatacagcattttttgtttgctttgacaagaactacatcatattttgcatattgctccagaacttacttattttagatatttcttcagttcatgatatagatttaaaggtggccataataatcataatccatatttgtggtgatatcatagtttattaaatcacatcccattgttggctattcagggcctgggctgggtatttcctgcttgcatccccagatatcctctccacctttgtctaccctgctccatactccgtgtatggtgtgccttagttggtttctttgcccttgggcttctggttgcatttagctcttagggcaccaataggagattagagggagagtgaacaatgaagtcggggtattttcccctgattccttcctatcactaggtcattgtggggcagctgcatgtctctgctgaaggttacggctcctgccaggcagccctctccatacagctacagtctccacttccaataaccactccctcccctttccctcttctggccttggcaatggctccctgatgctggtaggccctggatgctgcatatccatttatttgccctaaacactgcccacactttgttaagtaatttctttgttaaattctccttaataacttcttaataattttatctgtttcctgctggcacccagcatgctaaaggtcttttcttattttgttttgttttttttccccctgccacttgctgtttctaagtttttccttcctttatctccagcatgggcctctgtcagcttgattttttgaccctatgattgactattttacttattttttgaagatccttctagggctactacatagtaaaggtcaaacttcctagttggcagccgtttgcatcccttattccagtatcttaagctttggaagaaggagggtgcctaactccacaatctcttatagagatgcatttcttgcatcgataccattggttctcccaatgattggttgtgtaatattggaccatgagctaacctccctaagcttccatgtcttcatcaatgcaataggaatgacagtagcatataattcatagcacttgaagattgattgaacaacatgtacttaaagcttctacctgttttcagcaaataagaagttttcagtaaatggtaattatgaattattgtaacacgctgtgatcataattgccgttggccatacccacgtgtacaaatcagctatttaccttagattcacttaggcaaggcctctgtggatcctttaatctctgccagacaaaagatttttctgcctgcctctctcctctctctctctcttccccccacctttcttaattaatagactttgttttttagagaagttttaggcttacagaaaaattgtgcacaaagtacagagagctcccatagactctttctcactccctcctcacccccaagtttcctctcttattaacaccttacattggtgtggtatgcttgttacaatagatgaaccaatattgatacattgaagagagtccagtttacattagaactcactcattgttgagtagttctaygggtcttaacaaatgaaaaatgtcatgtgtctatcattgcagtatcgtctaggacagtttcactgctctgagccacttcagtgctccgcttactcaccagttcatcccctccctgttcccctaccccccgccccaactggtaaccactgatcattttactgtctttctatagttttactcttcgtcattttaggtcacattactatttgcgatcctggcttacttttctaactgttttatctttacttctctattcaccttctgtattcaacttcatggctagtagttacactagcatatgtttcaggaatgaattattaaactcgtttacccttagaataaagacttaggttgaatttaggcacttcttcctgatggaataggcatttggcttttgcacaggcccaggggctcaagggacaagagatcctgtttgattgaagctggatgtcacttctctagtccgcatatgtaagagagcttccacccatggcacgtgtatttgaggcctaaaaaggaacaatgcaaagcaaaacaaacaagtaataaaacacaaaactatcatataaatccagaccaaagagggacatgaattagctctctaaagcactgacttggctttaatctgtactggactttatactctggtcctgagctacagatttctcaagcagcttgtataaaatggtaatagctgccttgtatttgtactgtaatttggatttgattttaacagtacatcgatattacaagagcagtagaatagaagttgtagcaaggtggtaggagcagtagtaatatgtgtaatacctaccacttaggagtcttttttttttttttgagacggagttttgctctgtcaccaggctggagtgcagtggtgcaatctcagctcactgcaacctctgactccctggttcaagcgattctcctgcctcagcctcctgagtagctgggattacagggatgccaccacgcccagttaatttttgtatttttagtagagacggggtttcaccatgttggccaggatggtctcgatctcctgacctcgtgatccgcccgccttggccgcccagagtgctgggattacaggcgtgagccactgcgcctggccaggagtcttttgtgagtaccaaccctgcatcatgtctttaactctcacagtagccctgtgaggtaagcattattatctatactttacagatatataaatgtacctttttagaaagatttaccttcactcagctgaagaagctgaggcacaaagaagcatcaagttagttgcctaaaaatcacagaataacttaatggcagagatgctaatgtagccctggcttctggactccctcagttgctacctacagttctgggggtagcttcaaaaactgctattaggctggttttcttcccaggcaggaacctttctattttttccaaccaaaagcccagttaaagatttgccatatgtcttcacttacccatatctggtttcctgttttctgataaggcatctttgttcctacacctgaccctaccccaccctgcctctttccccatccacccaagcttcggacccagagcatggtccccagtaatctcatccttctactgtactgcctgatgtgggtggtccccgtcactctactttgagtcctactcttgcttctcacaggcccatgtggacacatatggacctatacttcaatagcagagatggttccagctgtttcataagatcattttagggggttgtggaagaaggcattaaataacatggaatcacataatgacaaattttgtcccttttctagttctttttcaaatcttctgagtagatcaaggaaaaagtctccgtttactactagtttctcattaacatctccctgatccgtgataatcttcctttttaacaaaataacagatccaagatcatcctttagagccctctcgaaggcagcagaatgtagacaaaatttagtgatgtttttattgtattcattcctaggttcactgtttagttttggcaagtaatactagtttagaatttatgagactaagatagtgttttcttttaaaatacatttatataaggataatattaagcaaataacagcacagtttattgcaggctgtgtcagatatcatgcaggtagtgcacaaatgactgaggtttgagctacacagacccagctgacctttctcgttgagaatggaatctctctagggctcctcttgtccagtgctgtccctctcctccacattctcttgcttctggcgtgttatctatttgtacttatctgtgtctggaacgctgttgaagattaacagaccattatcgggrgctaggattagggtgctccccacagtccattcccccatccactgtgacccagggcaggccacatcacttgtcaggccctttgataatgacatctttaaaatggttaacatgaagttctggggagggaagaatgcacatagctggctttgattctccagttcagacaacagagcagccactctgccctgattaatgctgccctgggctactgctgcctccacattgctgtttttcctaccttgtgtctgtccgtctagggctaaaccaaagataataaagaaagtgaagacagtgctttccatgtgttatgtattctgcttcgtgggttgcattttgaagggagtgccccaggttgacctacttccagcacacctcagtggtcattaagtatgtttaggtgatgaggaaagggaggagtgtttgagactctcatctgtagcagttcagaggtttggaatagccaaccctggtaaactatgcccaatttcaatgaagactcggagccaagaaactgcattgctcctcaagatgtctatcttctcccaggcctttctgtttgtctcaatggcatgcttgtcatcgagggtcctagaaacacacccatgtactggagggagcgtgggtgggaggcagctttaagaccttactgccctctctacagtcctgctggaagagtgtagattgttatctcctcacaagggcttatttccagaggaaaaatgacctggaggggccatgggaacttgccctgtggggttgggtttaaaaggggaagtcttggctgaccttggctgctggtggcaggagctgagaacagttgctgaggcttagctggggactggcgtctctggaattccctttatggcaaggtctgttatattttgattaacaaagtgttagttcagtccttcttgagtatttgtgagagaggagttttacaatggctggttataattgtaagaaataataatgatgatggtagctcacacatattgagcatttatagtgtgccaagcagagttcaaccctttatatatagtatgccccacaatccttgtttgcaccctcagaaaaaggtatcattgtccccattgttcactgatgaggtaactgaagcccacccagagaggtgaagtcatttatccaaacacgggtagtgttggtgctagaagtcaagctcatgtctgcatgtctcacccaaggcaacatatttaataacagagccaggatgagaacttgagtctcctgagagcatatttagtaccttttcctaaataccaccttgagtcaactggactatcttagaatgtctggtttttcctctcttcttgaactgatgctgctttggggaagaaaaacaagatttcatccatgcagtctatccatcctgatgttttcttaagagtgaaagtgttttaggaaatcaaatctaattgcccaaatgggaatttattttaaataaccacctgcaccttcatctggattttaaaaggatcttgaatccccactgagaaggtcacagtctgtgctttgttaatgcaggtaacaaaatatttgattttgggagtctcatccttcattttatatcctctttataggattatagtttttactctgagctgctggaatgtctgcggagtgtggaacagatgtgtcttaagcgctgttctcagtctgactttattgactgggaagaagtccatggagggctttggtttctctgagaggcatgttctcattacctcagatagacaaaggtggtaatttatgttctctaagttgaagactaggggaggaaaactaaaatggagaccaacatctctagtaggcttttagctcaagattctgtcttttcattccctattttactttgcatctgtcattcttaacattccttatagcatttattacatcttccagttctctctccccgccctttcctctctttctccttttctccctcctttccttcctttcttttttctttttccttttttttctttttttttttttttgagaccgagtctcactctgttgcctaggccggagtgcaatggtgcgatcttggctcactgcaatctctgcctcccaggttcaagtgattctcctgcctcaacctcccaagtagctgggattacagacgcctgccatgatgcctggctattttttttctttttctttttgtatttttagtagatacagggtttcaccatgttggccaggctgctctcgaactcctgacctcaggtgacccacccgcctcggcctcccaaaatgctgggattacaggcgtgagccgccacacctggcccccatccttcttttttcttccctcctttcctccctcccttcctccctacctttttccctccctctcttttgctttctctctctctttttacttccttcctttattcatttctttgttcctctctctttcattctccttctcccgcactgagttttttatggttagttttcctaatcagtatcataccctagtgaaggaaaagatgttagacttatatcacactttaaagtcctgtgccaagctggattgcaaagtagatccctttataaactacattaacacattcaggccattaaggggcaggtgtattgcactgattttatcagtagtggcttgaaagttactgaattcctaaagctacctacctgagagaactggacgcagtttggacactggaacgaattcagtatcaaatagagaagagagccctgtcagaaagagctgcttgtcataaggtttaaagacacttggtacggtgtcctaggagaaatcagtgatgtgccaggagatgggagacatgggtttacttcaaattggaactaatctactctgtcatttggagaaggtcactcacctctctgtatatatctccccatttggaaaatagaaatagtctctcaccaacatacttaaggcttaaaaacattcaaagtattataaataatattaatggaataaatgtaatatttattagctatttacttgtgtgctagattatacacgcacacacacacgcacactggcagccaccctgtgatgtgagctaagtattactatccactctgggctgatgaaaaaaaacgatgctctgagaggttaagtcccaactcaagatcacacacgtagttaagtggtgtgtctgattctcccagcagtggcaaaacctagctggacccaaacttgccagctggtatgcctagaaccctgctgggctgcaagacagtgacacacgtagctcttggtagctgtgcagggcctaaggcaggtcagtggcgggttgcttcaggctctgaatacgttcattttgggttccagatacccttcagattaccacagcatgccctagtggtatcatcattctttatatatatacataattacattagaaagattgctaactttgtagacaagaccatttaacctcctcagacatcagctcatggacgcttggcagtcttggctgccaggaacagaaggtgaagaggcccactgagccatattcatcactgagggaacttttattttattttattttaagttctgggatacatgtacgggatgcacaggtttgttacataggtaaacatgtgccatggtggtttgctgcatctatcaacccatcacctaggtattaagcccagcatgcattagctatttatcctgatgctctccctcctccccgcaccccacccaccgtgacgggccccagtgtgtgttgttttcctccctgtgtccatgtgttctcattgtatgtagtgtttgattttctattcctgtgttagtttgctaaggataatggcttccagctccatccatgtccctgccaaggagagagcaacttttaatcagagatgttgggtttgttcattttgttggcttttgatcttagcatgtgttaatctatcaggctcatccatgaattcatagacaaacacttttttgtgtccagtggggtttgattttatgtgacctgggggtggtcagtggttatgtcataccccacgctcacattccccagtgccaagcctaagaattgcctttcagattcctctttgttgatgactgatttgcctaggccgccatttatagtggatcccccttccatggaaagagttaaaattggggaggatagcagggcaagctgaagacccatagaggaagcatttatttgagctctttaagttcaggttttgatatttttgctctgcrtggtgaaaacaaattaataatgttaatatttgtagcccatggagaaaactcttcttaatctcttctctgaaacctacaccaggcctatgattcatctttgggctctgtttagattcctgattattgagccagaaagattttatttaattactatttgaaaagtttccaatgacaccatctcaatggtgttaattccacttggatcagtgcttactatccccctgatgttcacaggtctggatatagcatttgcccctttgctgacatttcatgcttgttgaagggagtgatgatcacaccagtggctcagggctgcrtgtccttaggctggtcatatttcataactggtctcagttcagacagaaactggcccctttccaaaacccagtttagttcagttctttgctgggaagatgaagaaaatcaggaaagcattgagttatgagagggagggtactcttacagttaccaagattgttattattatgaagttcctgttgaagatgttctgtcaccttcctggacacacatagaactgtggggtggggttgggggcaggcaggagggcagtggttccttgtgctggtctgtgacttggtactgggctgcctgatggctgcataaggagcttataaaatgcagatttggtgatgtagagcacagcctgggaatatgtatttttctaatgtgtacacactagtttggaagcacagacctaggactgcctcatataattttgcagtactgttaaaatagtatatcacaaagccatcatttattttctcaaaactctaatttttggccgcttcccacaatattctgacccagacacctttacatcatgtggatataatacaacctcctgtgtcccacccttcacctattcattcaaccaatatggaatagctgtctaggatgagctccaggaactaaggtagaaatatcaaaagatacattgttccaggactaaaggagtctttggtttagtcaggagatagcttgagtaataaataaatcagctacagtagaacattgttatttttccaactaacttgcagtgggagcaggtgaaatttgctggaaggtcaggtcacacatcgtggaggaaaagccctttggagccttgacaaaggagatgactgctagatgccaggtgattatatgagaaggcagagagaacatttttgtaaatgcctagtggacagagagcctgataatgtgacaagaactgcatgttctgtcattttaaaatataggccacacatgatagaaatgagggtggacatattaacagaccagatcatgaggggcttgtatatcatgtgtggtggacctttgtatttgacctcataggcatatcttccttgccacatatgtagtttgttttggaacacttcattgatctgtatctttaaaaaaataatttcccctgacaatatgatatgatgaaatttcttcttatgcaataccttagaagagcagaggaagctaggtggtaattttctgtatcccagatggggcctaccttcaaatctcattctctggccctttcatttctgaagccagaagtcagctggttttggggctccgtcctccataaactttatatcctctttgaaagctgacgttctcaaacaggggctacagaatcagcatcaagggaatgatgaccatggttggccctgcatatgatgtctccctgcccttgaccccttaatcagtgactcttaatcctcatagtcaaatagccatggagaacattggccctgagcagtgcattctagagctgacttctcaacacaggtcttcacccctctgcttgcaatcctgacatatgtctcagtgtattttcattcaaactcaaactcttaccaaacccagcatgagtagcctgcctacctccccaacctgatttaatgccactttcttccttgaaccctaagctccttccacattgagctttttcaggttttcagagaaacaaaacttagtcctacctccaggcttgtgcacatgctattccttctacctagagaagttcttcacctccacctccatctaaattgctcttccctgaaaagacattttccagcctctaaacaagcccactcccctgtattttgtgacacgtaatataattttagattgcttgatttgttttgtttactttatttctctattgccagactttccctttaagctccataaaatcaatgacctgggaatgaatggatggatgaatggatggatggatggatggatggatggatggatggatggatggttggagttgaaatatctttgtgaagctgaattcttcacaaagtccaccctctcattctttattcatgctgtagctacactcagccagactcctgggaattgttttctcctccatgaacccaacaaagcttaatccatccctcatactccagcctaagctccattcatttaatgaaacttgtgatctgtcaggttgacactgatttgtccctctcctgacttatatataaagtatatatttactttgttaataacttcattaactttgttaataacttgcattgtttcctgtcgggtaactcaaatttcatctaagttatagtttttaaaaaggctttatttttctcataattaaagcaataaagaaatgcactcagaaaatgtgaggaatattgagtataatgagataaatataaatcctgcataatttctccactgtaagttaaatactatagatactttgccttttccccttctagcggttttattacacattttacaacattgtgtgtacttgtgcatacatttgtaagtatcctgaattttagacataaccatgatctgagcatgccctcgtgtaattgcaaatacttctaaaagcttctttccttgtacgcctaaccataagttctatttttgagaatcaccattgagtgtcaacagagtactagagagtgcactagccactgaggcatatgttatcccactttaaatatttagtgcctactgaatcagaaaatataatataaaggatgtctcmcttacttgagtagatatgtttccaggtggctataatattaatacattgcagaagcaagaggtgaaaccctagaataatttgaattaagggcaaacaagaaagaccggatccccaacaaatacacctactttaaatgttgagtgcattgagcacacatatgtctttggtaaatgtgtttctactagacatctagaacaatgaattgggaaaaccttggcagatcactcttctctgaaatcatacctgtgataacaactcatgttttccttcttttctagagtgaccgtctccttatcaagggaggcagaatcgtcaatgatgatcagtccttttatgctgatatttacatggaagatggcttaataaagtatgtatatggaattcttctctttattgttttgcacttcctccttcattaatggctcataaaggaggttgnattacatgaatgtagtgaaaaaaatcttaatttaatcaacagaatgaagtgagatactgagggcaaatttgggcagaaagtattgatgagcattctacgggtcatggaaaagtggaagatgtggccatcatccttaaggatactggaaaatgtgcacaaattacagcaccctaaaaatataaggctttgtgcaataggtatcaaaggagttgaagtcgggataagtgatttagaagtacaaagaagaagaaatttatttagaagtaatgctttggggtagagagagtatttaatctgaaccttgacttaaggataggacttagatgggcagagcacagataggacatagatttcatgcaagatttgcaaataaattcattagggatgtataattacattctaaaatgtatactattggatgcctgtaagtggcacagccaggtaagttttatgtgtaggtttcctacatagtgaactttaaaagaagatttgatttacatagtgtttcatcacaaaaaacaaagtacactaccctgcaaagatgttgtaaaagactgggtgtatccaacccattctattagccctgtctggcctcttttagttttatttttatatgacttaacttcattgactagttaaagattttggttacaagagatctcttgcttctctttgaaaaattggcttacatatagttttctgcaggcaaactttttttaccagcccccaagtctaggctagctttcccttctgtgtgctttcaaaacagcttgcggtcggccgggcatggcggctgtaattaagtgcctgtaatcccagcactttgggaggccgaggcggacagatcacttgagctcaggagtatgagatcagcctgggcaacatggtgaaaccctgtctttactaatacaaaaattacccgggtgtgctggtgtatgcctgcagtcccagctactcagggacctgaggcaagggaatcacttgaacccaggaggtagaggttgcagtgagccaakatggcgccactgcactccagcactccaccctgggtgacagagctaggctctgtctcaaaaacaaacaaacaaacaaacaaamaaaaccagcttgtgctttcatcaatcatagcaattctgacactgttagtctcctttgagagtaaggagacttacttactctcatatcttacatatcttgtttattccacatcccaattcttaacccaggacttagcacaaaaaattttgataagagctactttttattgagtgtgtagtatgtgccaggcacaatgttaaatgttttgcatgctttctctcaatcagccagcagccctctgaagtaagtactgtactattattattctgtttcctgagatgaggagaaagcagcacatagagtgtaaataacttgctaaaagttaatgtattagtcaaataacattgaatgaatgagtgagtgaatgaatgaatgaatgaacaaatccaagaaccaaaaatatttgttcatagttaccttgccaatttacattattactttcttatattggaagtaagaaaaatggaaacaatgggaaaaccaaaatatatgacaataatttcttcaaaatataagccacaattgattttatgtttttctattaactaaaaaattattatatatagttggctctattcagaggtagcaagctctctcatttggagagaatgggaaaaatttgttaccaaatgcttcctcatttcagagctcatcataggcagcactaattgttcacagaacttttttattattattattattatactttaagttctgggatacatgtgcagaacgtgcaggtttgttacataggtatacatgtgccatggtggtttgctgcacccatcagcctgtcatctacattaggtatttctcctaatgctatccctcccctttcccccacccccaacaggccctggtgtttgatgttcgcctccccgtgcccatatgttctcattgttcaagtcccacttataagtgtgaacatgcggtgtttggtttcctgttcctgtgttagtttactaagaatgatggtttccagcttcatccatgtccctgcaaaggacatgaactcattctttttttttatggctgcatagtatttcatgatgtatatgtgccacattttccttatccagtctgtcatcaatgggcatttgggttggttctaagtctttgctgttgtgaatagtggtgcaataaacatacgtgtgcatgtgtctttatagtagaatgatttatattcctctgggtatatacccagtaatgggattgctgggccaaatgctatttctggttctagatccctgaggaattgccacactgtcttccacaatggttgaactagtttacactcccaccaacagtgtaaaagcattcctatttctccaaatcctytccagcatctgttgtttcctgacttcttaatgatcgccattctaactggcgtgagatggtatctcattatggttttgatttgcatttctctagtgaccagtaatgatgagctttttttcatatgttttttggccacatgaatgtcttcttttaagaagtgtctgttcatatcctttgcccatttttttgatggggttgtttgtttttttcttgtaaagttgtttaagttccttgtagattctgggtattacccctttgtcagatggatagattgcaaaaattttctcccatgcctgttcactctgatgatagtttcttttgctgtgcagaagctctttagtttaattagatcctgtttgtctattttggcttttgttgccattgcttttggtgttttagtcatgaagtctttgcccatgcctatgccctgagtggtattgcctaggttttcttctagggtttttatggttttacgtcttacatttaagtctttaatccatcttgagttaattttgtacaaggtgtaaggaaggggtccagttcctgttttctgcatatggctagccagttttcccaacaccgtttattcaataggaaatccttttcccgttgcttacttttgtcgggtttgtcaaggatcaaatagttgtagatgtgtggtgttatttctgtggcctctgctctgttccattggtctatgtatctgttttgctaccagtaccatgctgttttggttactgtgaaattatagtgtagtttgaagtcaggtagtatgatgcctccagctttgttctttttacttaggattgtcttggatatacaagctgtttttcagttccatatgaaatttaaagtagttttttctaattctgtgaagaaaatcaatggtagcttgatgggaatagcattgaatctataaattacttggggcaatatggccattttcattatattgattcttcctatctgtgagcatggatttttttcccatttgtttgtgtcttatttccttgagcagtggattatagttctccttgaagaggtccttcacatcccttgtaagttgtattcctaggtattttattctctttgtagtaattgtgaatgggagtttgctcatgatttggctctctatttgtccattactggtgtataggaatgcttgtgatttttgcacattgatttttatcctgagactttgctgaagttgcttatcagcttaaggagtttttgggctgagatgatggggttttctaaatatacaattatgtcatctgcaaacagagactatttgacttcctctcttcctatttgaatacgctttatttctttctcttgtctgatttccctggccagaacttccaatacgatgttgaataggagtggcgctacggccataccaccctgaacatgcctgatcttgtctgatcacagaactttttacaattgagccttaaatacaggtttagaatccatcttcacatggtgcttcagggatctacaaccagggttgaaggtgtaagatgattccttttcgccatttctattagaaagactgaaaggccacttgccaaggatgttgtaggaggaatttaaccatcagatgtgtgtgttggtggtggagagaaggttgagttaaatgatcataattcaatcctgaaattttgtatgtctccaacaacattcttaactcacagagcataagaacagaaataacctcctctaactatcacatagttgtttgtctgtctgtgaatatttgtggaatacttgttatgtgccaggcaattttttgagatattggactcatgctatgtcacacggtatggtactcattatcaaggcccaaatcatcatgctgtcttcccccgggaccttttagtcttttaggggaactgagatatctgtatatatgcaaaggacctagcattaccaaggagtggcatatcaagtattatattcatagaacaggtgagattcagagaagggagtggactgattattaattatagtagctgacatttattgaattcttagttacctaacagtgttttatgggcttaacatatattcacatttaatctgcagcacaaccctatggaggaggcatctttattacattttacagaggaaagaattgaagcatggtaaggtaatttggccaaggttatacagctagtagctagcagagccaggattgtgaatccagatagcccacatccagtctcactcattattagacttggattttgctagaaacttgatgaaggagggaagatggaagctgagccttgagggattaatgcggccttcgttggtggagcagtgacgaagggggaagccatttctatttcaggcttggtattaaactagttgtcaaaatggatgaaaacacacacacaagccaggcaactcttcatgcccttggttctcaattttccttaaaggagaacctgtgagagagaaaaatgagaacagaattggccagtatctgaactagaatggacttaggatcagaggctgcattttaccagtatattttgaattatggtggctctggaatggcccagtggtgatgtggtaaagttgaactcttagagatgtcaggaatactttattttagtcgcagaacttggagtttgagaggccagtggtagacttcttactgccccaagagagtgtctttcttggctgtccgtggataaaaggggaaaatattcatgcaatggacagtgaggtacagatatcccaaggtaggagatttttaatggtcatatagaggcttatgaatcataggtctccctgttatccatagtggacatgtttaaccagctattttaatcaaaaatgtgataccacgtataagccaagcaatactggctgatctataagcagcattgtgtggggactagttgtatttgtcactttccttggaggcttgcctttgagatactcattggcttccttctgcctgagtctcccccctattcctccctaagatgctctgaagcttcctgggcgaagccgtgtctagtggcggttctcataatcactcagctcggctaaaagcttctactgggacactgaccatgtcataaaggcagctggtgctggaggcatctgcatctttgacttcctcctggtgaatctgccatcagctgtgattggctgataaatggtcaggaaagggtggaattgggagtgaagacttaggtgggaaataacccagacagaatcttttgttaggagcaaagatgaccccacttaaaagatagctgagttcccatacctgttctttaaatgatttactattatcttcttcagtctcttctaacagtgcactattttatactctttagattcttctccaaatgttatttctcaccttaacttaaagaacaaaatgaaaggaataataaaaatatttatatgaaaaaagtattacacacactatattctagacactatcagacccctggggttatagtactaaaccaggacacgtggtcccaccgaatggcatatcagatcattctgtgactataaacattgttttctgtgtatatctatctttgtttatagattgctaagcttgtgagtcacttgcaaagtttaatttgataaatacaagtaacactgtttaaaatccttataccactatatttgtcttggaaattgcacttttaaatgaccaagtgtttgatcatttttttgtttgtttgtttcaccagacaaattggagacaatctgattgttcctggaggagtgaagaccattgaagccaatgggaagatggtgatccctggaggcatcgatgtccatactcacttccagatgccatataagggaatgaccacagtagatgacttcttccaagggacaaaggcggccttagcaggtggcaccaccatgatcagtaagtcttcatattttacacactcctgtttctcagaagtgtgtgtttaatgaatgtgttatctccagaactctcttactataacttgtatacttgtcccagttcagtttatagatgtgttgcctgatgggacctgagaaaagcagattgagctgaggaaatgggcagctccctgtaactaaagaggagattcatgaggctcttggtcatggcagcacctgccctcttgtctaccttagcagcaggcgctggctcctgcaatgagtggagaataggaaatagcatctctgggctagtaagaggtgaaagtagacttaaaaagttatggatagaagatgaaacattatttcaaaactgcccacttgggtctgagaaaggagggcagagcagcgtgaatggagctaaggagtatcacggagagagggattatggagaattacatttctcggaaattttgtaaacttcagtgggtaaagctgtgtctggtggaggttttcaaaatcgctgagcttggtttaaagcttctactgggacgctggtcatgtcataaaagcaactggcgctggaggcatctgcatctttgacttccacttgcatttagtgcttatggtctgcrctgtattttgaccaattcatatctttaacatttggcaagctgtaggagtggtttctcttgtttttaaattttgttttgttttgttttttctattgcaattccaaaaaaaatctagggagttgcatgccattggattactgaaccaatagcattccagggcagtccttcctgtcccaaaggaatcctgatgaattgggycccatcccagtgctggccccaaacttggtcaggcagagagcactgtttattttaacaccatatacatcccctgagaacacaggacagcctgagctgtagaattattcactgtcttttacttccttttgacaggagcataagcagggttcagcttcagctagttgggtgtggaagcccagaaaaattgcaccaaagccataaaaggtgcaattcagggtgcaattctccagctgaagggtggaagcctgctgacttctcagcagctgcctgctgaygaaagycctggtgttgccccagacattagtaatgtagctccacgcatttgctttccgataagtgcactcaggctgcttttgatagaagactacgggaatgagtgatcttggcttggctttctgccatctgggcaaggagttggacctgtttggcatccttgagatttgtattatgcttggccatctgcattagggaagtcagattccccgtgacgagagtaaaacttacaaagaaccacaaaagcaattgtgtccttcatagataaattaggaaacctagagatgcaaaaagaaaataaacctcctaatcccacatcgctgtkagagtttggctgtatattgtacacatttttaaaatcctatttggccaaactaggatcacagtatatgtattatattttaaccttccatttttgctaaataatatgtcatgggtatctttgcattcatttttgttctaccccaacatttaaagtggattcctagtcatccattttataaagcatttatgtatttaacctaacttctctattgttaacaatttcaattgtttccaatttttcacttagataaataagtagcaaacatccttggaaccaaaattttgtatacagcctcatttatttccctaggaataattcgtaggtgtgggaataaatgttgggttaaggtttgaaaaatgtccgggttttttatgtatatttcagagctgctctctggaaagttgtccttagctgtactttgtccttacttgtactttgcctcagctgttcaggggaactatgaaagtgtaacttttgccttttcttcatcaactgtagatgccattgtttaaaaaaaatgtatccatggttgtgggtgaaagagtagatttgggcctcaaagaaaccagattcttgacaagaagtttccatggaaataagatctgcgggcccagtatcaggtttatgtaactgacaccagctttgtcctatagcagagagcctcaatgtcttatgccctaacttagctttaaacctcgctttcgcccttggaagagagtctgacctttttcactagcagtgacctccccacagtactagtaataatgacacatagtaggcactcattgatggctaacatttattgagcacttaccatgagccaggcattagatgaagtactttacatgcattttcccatttaatcttataaattcagaagaaaggcactagtaacaccctgactcccaccccacttggcaccaacttaaaggaaagaaaactgagatttagggaagctagtaatttgccccaaatcacatagctttgtgacatttaagtgatcagcattcttgaaactatcagggaaccccttcaaaagttaattccatgctcaggaaatagagattctgcagtcacagctaagcaagcaggagcaggcctgggcagaggggagcaaaggctgtgtctgagagtgactcatctggggtctctgtcattcagttgaccatgtggtgcctgagcctgagtccagcctgactgaggcctatgagaaatggagagagtgggctgatgggaagagttgctgtgactatgccctgcatgtggacatcacccactggaatgacagcgtcaagcaggaagtgcagaacctcatcaaggacaaaggtgagcccggacatgccgtcctccctcctctcttagcttcttcttgccagtccttccaacaccatccactcatttcagtcactgtcttttacttggagcctggaaccttgagtgtgagcactggatgtagggataacacaatgttccaggcactttatttacttcttacaggatccccatgagatagtgattgttttccccactttgcagatggagaaactgaggctcagaataagcagcccaagatcatagcattagtaagcagtaggtgtatccaaattctatgctcttcacctccatgcaatattgcccattctgaagaggaagaaactgaggttaggagaggctaactaatcttacataaggttgtatggctagtatgacctatgagattagggatttttaacctgtatcatttttgctgtagagatcaaacccttactatcatataacaatggcatccttagacaaggmtaaggcatttctaggagcaaggatgtattggtactcaggctgggagcttagggtgtgaaaacatgttcatgtatatgtatatatgtttctgtgtgtttgccagcgtgtgtcctctcagtgagtacatgatttaggttccactgtcttcttagattcctccattctctgcttctttttgatcaacagatattgcaaacccctcccccccacatacaggcacacatatgcacaatgtgctcagcattgtaaggcggcctgggggtcttagagaagtgtaagtaatggcctttgctgaacacccaaggcraaagaaaacaggctcatgaagaacaacagaataaatgtcatagtgtgcaagaaccattaccaaaggagtagtctagacacaaatgctaggagtccactggaagagtgtgccctgggatggcagggaaaggatgaccccctcagaggatgatattttctttccatcccctccttaccccacaagccctgcaaaatctttggtgacacagaaygtgagattaactccttctttctgtatttgcgtttatactgggcatctcaaccggcgtagaaaatcgaacggctttaacwctcacttctttatcaaagagcctggatcattccatggataatgtagaggcttttgggaagggtagtgtttgggaagactgccctgagttgaaccactctgggtagggaagttctcaaattacaacccasttttggcccagaatactgtgggctgagaaggctctaatggttagagaccaaaattatccccctttcctcaaaatgattctcagttccccagtcccacctatttctgtaaatcactgtattagtagtttatttggggwgagatctaaatagatctttacatataaaccttacaacttaagatatttaagcacaaggtaaaacctgcccattagttccctaagggtaggatctgtatcttagttctcctttctgatccaacaccctgcacagtaaaatgaactgatcccaggagatccattaattggaaaccaaatatgtgccaagcctggtgctaagagctctgtatgtattctctcctttaatattcacaaccactttatgaagtagggtattgttatttttccatttaacaggtgaggaaaccgaggtctggagaggttaagtatcccaagctcactgaactagtatgtggtggatttcagtggtgcagcccccagggtatgaacacaactggtgtgctagagtgattcttaatgccacctactactgccttgagcaataacaaagtttattgaccttctgggctaggggatgctggacaggggagtttagaaagaggcacagaagaagagaccattctgctatgacatctgttaggaattgttgattttatggggcaagggtgggcagagcaaaatgctcttgaagaatataaatatctgctttatgttggacaggagcccgggtaatgcagctgggtgctatggtcgatggaagtgggagcaaaggatggaggacagtcatgataatgttgtctttctcttgtttttcctcctgtccctcttttgcaggggttaactccttcatggtttatatggcttataaggatttgtatcaagtatctaacacagaggtaacaacccatttgctatgtggtttggggtatctggatgggtttcctattgttgttgatgaccttggcccttgtaacatgaatcactgtggtcactgtgggagaccactgggccagaatgcttcttgaagcctttgcagtccacgctacattttaaataaggtaacaggcagggtgcccatggcaagacagacagggagctagagtttccactggcagcagctttcttaaacggcaagaggaggaacatgcctaaatttccatctaccaaacaagctccaaacccctcataagcccagtgaaagtgtgaggctcttcrcctgcaggaccaggagggccttctgctgattggaataatcctactgccttgcctctgactctccccctaagaaattcatgacatgcgtttgctttagacagaggctatgttttcagaggaaatacaagaaatgaattcccatgcctcctgcttagaggtgaaggtatgtctgccttcacaggttaagagataagggtttcagtttttgtgtttgtttctggcctggctgtagtggttttctagagcatttgttgagaagaattctgagactgtctctcagctcaatgggaaaataattccattaaaaatgtgtgctagaggcagaggagaggagttggtggtactttattatatatttgctctgccagcctagggaacatggtaggttctttatatagtcagagtttcctgggatttctttggactagcactcctctttggtcatgcctatgtaatatatatttctgccctagtgacttatttcctctgctttatcccatctgttttagcttgggctctggtaattggcccttctgtggggctgctaaaagtgcttgcaagagtgacaaagactcatttctatttcagctctatgagatcttcacctgcctgggagagctgggggccattgctcaagttcatgctgagaatggggatatcattgcccaggtaacaccrtgcagctccctggagcrtgctttgggtctgcattccattttcttcttcatttcttcagtgctgcttgagctctcartatgtgcaaggcaccatcataagtaccttgctaaagacagaacctgctccaaggtacctcasaatttaggtggaagaaacagaggggaatgtagacaagcaatgaaactagaagatgaggtaaaacagaaagagggctggccattgttggagaatcagaaaaggcatcctggaagaggaggatttcaaattggaacatttaatgggagagcatttgctgattctcttctgaaaatgtgtcaaagctacaagacattctctgtcataaagaaagaccgtaaggcagcatttctcagaagccagagattggatccaagtctgtggaactcayagccttagataatagagaatttaggtctcatgaggagcaaaggtctcactggattcctagaaatcatattgagaaacttgaggaaagagtgacgaaagtgagggccccaaggcccaaattgatcatttgtaaggaagaaggaagcagttatctctccatctcctgggctgcttaatggaatagatggacagatgtgtcttaggaagggttttgtttctcagaaacatctcaagattggcctttgctaggaggagacagcccgaaaaaaaaagagtgagctttcttcatccatttgataatgttggcaacaagaaaccgttattcattccttcaaagagtatttcctgagcactttgtgccaggcagtagctattgaagtgagccaaaacagatgcattccatagctcactaatacttgggctgtgcttttattttagaagttgaccagaacttggtgaatgtggtcagcaggggtgtaggaacaatgtctaggcctcccctcatctcggaccattagtttcctgatagcaggtgccgtttggtgagcactgactactgtgtgccaggaactagtaaattttctggtgtattctcatttaattttcacccaaccctttaaagatgctatcatcctccctattttatacatgagaccatccaggctcagaaagattacgtcactggcccaaggatcacagcaaataactaggaaaacgaaatctttgcccctaaggtgatatacctcagtgggtatctttactcagagatggcatatctgggatcccttgcctcccaagcccagctgcaggcttgtgggcaggcagtaycccagccatgcagggctccagctgttgtgatttcagactctccatgttgtcttgctggtgggggaggtgaggtaagtgtacagtttcctctcaccatgaccaaggaggctaattagtcaggaccctgacagcactttcgcccacttccaccacacacccaaagataatgaaatcattttctttagagagcccaaatgccttggtcccgtgggaggcaacccagtgatattagaactgtactcctccctttatccaagttttcagggcagcagccagaggtcccagccctgctttcagcttccctggaaaccaaactctctggcagttaattctagcccctgaggaggcagatggacttcaatccaaagtctgcgttctcagtttatttcctcttgtgaatccttagagtggaagtttctctggtttcccctcccgctrctatttccctaccttgggaagatctgttctcagtcaggaaaagagtaggggcatttttccatttggatgagtttattgtgtgtgtttattaaattcagcttgagcagaaagatttttatcacattgtttaaatgaaggcagctgctatactcagaatttcttgctgcacttattcaaaagtgartatatgagagaggaatctttgcctttgggtacaaacaaggatgattttcaagaatttcaagttggcaaaacagtctaagacgacagcatctttagccattcgttcaacaaatatttgttgagcatctactatacgccaagccttggacggggaagatgtaaaagacarggttcctttcctcatggaccaagctacagttgtgtcatgacccaaactgtgatgtaactgtagctgtgatgaatgccacaacaggcccactgctatccccatgtaaggtagcatcagtggggctttactgctgttcttaatctctcagctatagggacatcatggcttcagaataggacttcctagcctgaacagtgcattagaatcaccaaatttttctaattccaggtattctggaattaggaaaagtcagtagcagagttcaggcaagtgtattttgaaaataatcccctggtgatttaaatgtgcttggaagccacctcttgagcttagctttgtcctgtgcattatcctggtgcactcaaacaagacagaagcacaagtgtcacctaagacagagattctttagttggagaccttaacccttgtgtgactggaggcaatttagagtagaaactcactagactttagaagaaatttaattcagttcaagtttcaataagtgagaatggtaagaatgaaaagtggaggtgcttttctggaaaaataagcctgtaacctttctttgttttctgtagagctggagatagtgaccatttcacttctcatggttrcttttagtatgtgcattttcctttctactcctcttttagagatttctattactaaaaacaaaaaacagaacgttcttttccaggtggtaagaatccttacctttctaaatgcctcacagtttcaaagtgagactaggcttgttgcattcaccatttttcctatgtgtctcacacattaccagagtactcccaggtcactaggccaggactgctggtgcagaggttcatagggaccagtcttaataatttcagagtgaatgccagtaacgctgaagaaatggtggcttgggatttctgccagttccaatcagttcatgtgtgtgtgctcactgcccagctacctgcttcttccataaagaggctagaagtctgaggaattttgccatcaaccacaagggacatgcacttcttctgccatgtccacaacttggttaaacagaatttcaccaagacactaacttaggtaatgctgtttggaggcactattttgtttcgttaaattttgaatccattcatttaagccatagatttaaaacatcaaaactcctgagtggcttattaaaatatgcatttctaggattcaacctgacatcttctgatatgttaggctaggatgggtgagaaatctgcatttctacaaaaacaattcaggcaattctgatgtaagtgatgagtggcccacacttygggaaacatagcactaaattataagccccgtgaggtcaggggmtaacattgctttaatgcaggtacttacccagagcctaggaggaagcagttgctcaawacattttgttgagtgaaatggcttaaagagcatgartgaatwaacaaatgagataagcaagtatagtttcagaggcagctgagactgagagagatgaacaataagtgacctggtatgattcttgaagggcartatagacaaaaaatagtctaacagacaactatctttcttctaataaaaacaaatcacccttgaatgttttttctttttatccttttagttgagtctaccctatattgcaactccaaatataggattaatacatctgttcaacatacgcatatttattctttagatctttagatcagaacataccagcgtaatttttccaaatctcacttgagcttattgaagaactattttcttttttcatttcaggagcaaacscgcatgttggaaatgggrataactggcccagaaggccatgtactgagcaggccagaagaggtaagttacaggggatgaaggtgcacacacaackcatgaataaacattgttaaaaggcgacgagaatgtgagtaccaggttgcagtattggaacatttcttccaaagaccacttctgattgactctaactcaggagcccgtgagaaaattagaaaggaatgtaagagacatgcttatttctgacccctaatctccctacagataacacaagttggagtgtccttcacagctattcaggagtgttaaatttctaatccctttcttaaggaaatctcagtgtgaatctcatagacatttccacttattcccttatttcgagtcctgcaaaatattggcatatagataagatgttgaatgggttttttatatacattatactcatcaatttgtataaggtgatgattatgtccaggtatggaagtttctcatatataaaatgaatgcttatttatgtctgtacttagcagccaaacaacaaatcaaaggtgactagaggctggttccatgtctccgagatgtcagcagcttcacctactggcacggagcacagagctgggaattggctgcccatgtacctgaaagcacattggctttggaagggcagcctgggtctagcacctagagcaaagtcaaggccctccatatcagtgaagcgagtcctgtttctgtcctgtcattccaaaccctacaacagggagaagaaggaatcataaccagaaatgattcccatatcctgtctcttttagagtcttatttaaaatataaatagaacacatatagaaaaaaatgtttctatcctaaggaggcaatgaattttcacaaaccagatacacttagctagtgttacactagttatactagtataactagcacccatagaaggaaacagattatcagcacctcagaaactcctttgtatctagtgatatttttattgccatttaaataatttataattttgtgattagggttccagtcacatacagcatccctgaagtctgtctccttaataatactaggtcacttctatggaatgcattcatctggtatgtgctgattgcatacgttatctcagttctcgctgccgctgctctgtgtggttggcattgttgcgcaggtaaagaagctgaagctcagagaggttaagcccctggctgatcacacttgaaggactggaaaatggtttactcatcgtgaagagaccagggtaatcagcattgtttttgaagtttttcttaaatgctggtcactgtggagatgtgctggcaagacggatttccagcagcagccaggggatttcagagcaaagtctatttttgttccttggtttgttttttcaacctccccttagccytaccaccccaccctcctccttattcctgtctcctttttagtaaaaaagcctctcagccgcaaacctctatagccgtggaaggccatttgggtgaagttggagggtgatgtaaccttccaaagatagtcatgttgtcaaagtgctgaaaaacctgtagtgcttgggaggaatgagatcaaagggaccaggacagaggtcctgggggagctgaagtggtcagcatgggtgtgaagtgggaggagtgatcataggaggagccagcccctgttcaattcaagcatacccagacaccacctcaagtgatgctgttcagagagctgggaccccaggcatagagacagccgctccagagtacaaaattctgggtgcttcaggaaggtgtccatattcacatatgaccaggggcctccaaggtcccatccacatgcaataaagtgcagcttgggggaggccagctcagccagccaagttcttaggtctgtctgctgagctacacccacaatggacagtgactggtttgcattatacagccattgggcatctgcaagctatttttggtattttttttaagtgttgggctccacaggctaaccagaatgtcatatccataaaaaaatgaagtgttgccaattgaatggaagaatgtcaaagtctctgctctgtgctgaattggactaacttacacaagttgagagtagaccacttgagagtaacacagaccctcaactggttagaaaatattatcaacaataatatcagtagccaaccctcaaggggcacttaccttgtttccccattaggaatgagctaactgctttataaggatgaactcatttaatcctcaccacagcccaacatgtcagatcctattatcctcaatttacagacaaggaaactgaggctttgggaggttgtgcmatgtacccraggtcacctagcttataagtgtcagaaccaggactcagaaccaggccatctgagagagcctcagctctcagaccctgctttgttaataaaataagggaaaacttctaatttcttaataaatgccactgggttggttagcatatttgaaaacatgaattctacattagggtaagatgggagagatcaatwataaaacaagtctttgtgttgagaaacctgggaattattttcgtaagaaatgcctcctaaaattaaccctttgctgaccacttactgctgcaggaaaggatttgaggaaccatgatgcctaactgccttggctggttattttagacataatggtttgctattgtgtttgcccagagattctgtcctgagaagaytgaggagcaaaggctttcattcagatgtcacctttgtgataaccacagaggctaaggaaaaagtacttaccctctgccagacattgctctcagatgacaatgctgtgctatactattttactagtgagggatagaggcactgggaagctgagtaaagtgacacagttaggaagtggtagatctgagatgkggatataggctatctaattccagatcctgccaaaattatccataacctttgtgcagcactgcatcctcacagttcgtggaggtgggagccaccagtttgagaggttcatgtttctattgactcctggagactttttcttgcagctggaagctgaggctgtgttccgtgccatcaccattgccagccaaaccaattgccctctctacgtcacaaaggtcatgagcaagagtgcagctgacctcatctcacaagccaggaaaaaaggtgatttgtgtttccaagatctcggagcccctgatggcactgtgtggctccttccctctctggttgtcctgtgtaatataaatggtgcctactttgctcattgccttgctccctaggaagccgctctccacatcctgtgtggatgggaggatcctgggatttctcccacttggcatttaagtaaactgaggctcaggaaggttagatgagttgtccaagatgacacagcttgaaccagttcttctgagactttgtgcatcttacttctccccttgatctttgattttcagttcaccttgtctgagttttataaacggacatatcagtcaggattaaattgggtgcaaaattcaaagatcctgctcaaactggcttaaacaaacacaagtgaataaccgattgtaggtgtttcaggtatggctagattgaggggcctcaacaatggtattaggtgtttgtcacgcttactcctttcttggctctctttcctctgtttggtttatgttcagtatgaacagttacagaatagatgctgagaggcccctgttgtcctcaatttttggcagagagcatgatgggaaagtaaaatacaccttttccagcaggtcaagcaaaagtccctaggagcactgtgactggtctggcttgggtcatgtgctcatccctggaccagtaaacaccccggggatgatataatctggccaggattgaggccacagtgcagatgcaggtcacacctcctgagccactgagactaacacaagttattttagagaaggggttgagtrggtctccaaagcatattggccaccatggccttcatgaccctggctgtgtccctgctccctgttgacttctgcttcttttctccactggtgttaacttgggcttcctttgcttgccttgtgcttagctaaagttttcagagctttcttttctgtttctggttctcatcctcagtgtcagactcgtgggctcagttgtgaggctgggtaagggacgagtgcaggtgagaagctgcagatgtgtggctctgtgttgggttgtgagaggatttaccaggcccagtgatgtggttgctactgctgcgtgccagtggccattctggtagtagagaggcccaacatgggtgattcatctaccaaactggcctgtgaaactccacgtgtgagtgattgcagtagctaaaaatagtctcagctgacgctgatggctgagtgttcagmtgcctggccttctggcacagggtgaccctatttttcttacaagaggggaggctttcacattgtctagacactcttcctagctgacagattctggggcacctccttccttcctctgttctycgtaggcctgctgttttctccttagcttttagaagtttcaactgacatrgagtggttgctccactgggtatgagtcattgggcgagaaccaggaaagcagcccagtgctcctcactcattcttggagaaaagcaaagaaaagwaaaagaagaagtgtgtaggaactccttctgccctcacccagtgccgcacacacacacccctgccaactgtgaccacccaccgccctcatgccctctgctgaggctgcattctgcccgggacccattcttagggtgacctagggccgctcgggacagggtgttttagttatatgctggtcttattttaaacttcatggacaaaaattcctaaccctgagccttttggcacataattctctggcgagcagaactagtacagctgtgtctccggggtggaatgggggtattatttcagggatgaaaaactggctgctgagattgaagtcagtaaacaactcatggaccgtcattctcagggaaacacccaagagcattctttgcaagacaaagtgtagcagggtttgcacttccctcctgagcaggatatggttgaagtctcagtgtgtttagtcaccaatcatcagggctctttaactatatggctgctcagaattaatattagaaagctacaatttaatgaggaacagctatgtgccctgcactgacataaatactttaatttttttattgtgtagaattctcaaagaactctgagaaataggcatttctcagaaatgccttttttcagatgaaattgcagcacaacttgtccaggatctcccagctgggagagctggtattcaaatctaggtgtaattactatcttagcttcttttactcttccatgctaaacatagtccagagggagatttcttccacttttaagattctatttctttcaatagtagttgagtgcttgctgtgactttcatttcttcatatctttatggtcctgtatcctttagtgtgtaagtatttttggagagcccttgaattctcatcacttggatttttttttactctcacccccaaaagcagggctgtccaatgtgaatcattgccatcgcttccttcttttgcctatggcagacattactaattaatcatgagtcttttctactgagaccccgcgcattattagaatttttcccttcatggaattctaggcaactattaccagttgaatggagttgaaacaaggcaaaatctatttgtgatcctggccatagagtgcaaacttgtggagaatttaactgtggaagttggaggaccaaagttaaagaagtgcagggctgtatagggtagctttggccccagattttggcatagagaaacttggtaccaaccacctagctatgagctagcatttgctttctatatcactattccttcttcttaaagaagctaaacagcttagatcagtgtatattccaatagcctttatcccctctccatggtttgggtagttaggcctctaatttttgaggcagaatccaagaagctagtctcatatttgatgtgtcctaggttattgggtgacttttaccaagtcatcatgttaggagtaacaaacatgataaaaaaaaaagtcataggccgggcgcggtggctcacgcctgtaatcccagcactttgggaggccgaggcgggcggatcacgaggtcaggagatcaagaccatcctggctaacacggtgaaaccccgtctctactaaaaatacaaaaaattagccgggcgtggtggcgggcgcctgtagtcccagctactcgggaggctgaggcaggagaatggcgtgaacccgggaggcggagcttgcagtgagccgagatcgcgccactgcactccagcctgggcgacagagcgagactccgtctcaaaaaaaaaaagaaaaaaaaaaaagtcatgagagtctctaatccacaggaatggattttactttgtggaaccaaagcatatcattataatgggagcatctagcaattcccagtggtgggtgcacatttgggactttgggcccctactgtgggaaggcataacaggtaaagaaagcgatatttaccaaacatcctctaggtgccagatgcttcacgtatgccatatcttttcattttcacaagcctaagaagtagacatcatcttgtttcatcaatttcagaatatatctatttcagccttggtatacatggaacccattactagagcaagaactggagcattttagtatttctgaaatgaggatgaatcttgaaatcaatatgtatattttattttcttttgcctcaaattttaatttgcctcaaaatttgagaattaacactgcatctaacaaccaatggcttcttttaatctagagaatacaaactkggtcacatttagcagataggaaagcaggggctttaaaaaggtgggaacatggacttgaacccaggtcagtctgactctgagacacagtcctgggtaggcttaggagctaaattaaataggcttggcccagtgcagcatatactttatgctaaccccttgtctgtttcctgccccttctaggaaatgtagtctttggtgagcccatcactgccagcctcggcatagatggaacccattattggagcaagaactgggccaaggcggctgcatttgtgacatccccacccctgagccctgacccaactactccggactacatcaactccttgctggccaggttggtgcaggaatgcccagcagcaggcgttttgtgaaaacatctcttgagtccagctgggggttgaggacaggagcagtcccatctataaacttgaccagagtctgcagtgtgaacagtgtattgggaattcttttacagtcttgagcgtagaaagcaggctcttccccatcctgttttaaacattaatacagtcataatattaataatggtaatagyagttaaaacctattatgtaccaagctctatggtaagactacactcacaatctcatttatttctcctaacaactttatgagtgaggcactcttatcagcatttacatattaagcaactgaaggtcagagaagctaaatcatttgcctaagttcaaatagttggtcatgatgacaatcaaaattatagggagactcctttgttgctgccctctgcagacatataggatcatgacattgctcatttgagtacattttattttgctacaaaagagatgagctaatcccaccccctcactttctagatggggtaactgagcccagggaggggaagaaactcatccaagctcatatatctagtaagagrtagaggaggcattccaaacccaaatagtcagagtgcaaaccctcacagtaaacacaagactctaagctcccagtgtgcctccagccatctcccctgttcatgtggagcttttctyctttgccagcggggatctgcagctatctgggagtgcccactgcaccttcagcactgcccagaaagcaattgggaaggacaacttcacagccattcctgagggcaccaatggtgtggaggagcggatgtctgtyatctgggacaaggctgtggtaaggcatggaggtcatgggagggtggccagagccaaaacatccatgggccagatcakaacctcctgccaccagttgggctggtgacactgcgagtgcagatgggatctcgtacttgctgagatgtctctggaaccatgtggctctggcagtgtggaaaatttccttctagtgtgatgaatcctaaggcctagcattctgaaggaggcttccttatstagactgttaggactaggaaccagacmtgcaactccttcatctgagtgtaygaatagcctgtacttaaaataatagtgagttaattctttttgtttggatagttttatgacttcttttgaaagaactggatataatcctttgaaatgataagcaatgagtctgtgtctagaccaaagtcatcttgcttatcaaggacgccctgtactgagggcatgtggtcattcaggcgatacaagtgattgtctctaaatgtcttctggcaagtggcctgttttattttccttgttcacatcacaaggactgacgaaagaaatagccattcaaattaagactctttcaaagattttagtaaaatcaataattatctyattattaagttgattactgctctatgtttcatttcaaaaatcctaaaaacattcttatcaragttatgtatactaaagcctcattaatctacacagtgtaatttcactgagttttctttttcttctttgctcccaggaagctcagagctaggttttaaactcaattctttccgtaaagaggctttttggtttgaaaagagggaaaatataaatattgttgtctgttctctcacatagtgtttcctttttcatatactgcagagcagtacgtatgtatttatcctggcactatttggaatagttccaagataatatatatttttaaattaccaacatgacacatgctcagtaaagaatatttggaaactacagacaagcacacacttgaaagaaaacaaaaatatctcaattccacaacccagggaacccattgttatcatttgggtraggttcttttgtatttattctatgcatacaacatatgcaaacacaaatacatatctaaaggatgggattataatcacatttgtttttactgtgaactctccataatcctttttgaaattagaagaagaaaatgagtaagtaaatgtaagaacatatagaaaaaaatgcatacttcggggcagtaacttctatcttaaaccatgtgtttgaccattttacctgagtagtcacracagcccagctaattcgagcttgctgagtgaggttctgtagctcaccagcttttcaggtggctcctttttgtatttctatgcctttgtgggttgtctttctctgagttcagaagccctgarttgatatatatgtagctatagatatagatataatttcttatatttcaataggccacagggaaaatggacgaaaaccagttcgtggctgtgacaagcacaaacgctgccaagatcttcaacctgtatccccgcaagggaagaatatctgtsggttctgacagcgacctcgtcatctgggatccagatgctgtgaagatcgtctctgccaagaaccaccagtctgtaaggcccgctctggtgggagtrgagtagaatggagaatgcatgcaaggaacttggtcaggagaaatgtgtttatgtggtgtgccagggtagttagactaggacgggttgcaataataatccatcccctaaatctcagtggctcaaaacctcaactgtgtttctcctgctttccaaagcagatgggctctgcccattccagtcactcagggacagaggccaatagaggcttcctctctacatatgttttcatgattgctgagacaggggaacatgacctggtgaatggtctactggctctgaaagcttcccctagaygtggtgtacgtcactgcctctcacatggcactrgtcttagccagtcctgtggctatacctaacttccggaagtcaggrcgtgcaatgatcctttgtgcctggaaagggaaagaataggaaataactggtaaacagcastgatgacttcttcacgatgagtttcacatggaggatgataattaaagtgcagtacctaacagaaacgggctcgacactgttgttaaaaatagttaatatttttaagcacttatgtttcaggcactgtgctttgaattcactggatttccatagtagtcttctacaggtagggactattatcctccgttttatagattaaaaattggaggtacagaaaaattaaataatttgtgcagcaagcgaatggtgaagctagcattgaaacccagacaagctgactctaaactgatgttcttaattattggcagtacagtaatgcctcttgctgrttgagtaaatgaaggaggtagggagaaatcccatttttggtggcaatggcctttgcttaaatattgtgtcatctcatgttatttaatttggagctagagggacctaaaggccacataacctctctgcccacctgctcaatacaagacagtgatgtacagcatcctggatagttatccagcttctctttgaacactacccaagacaaaagttgacttccacttgaggaccttattaaagaccggacacttctktttgctaggaagtttagtcttgtcttagtaaatctgtctccggtgccttctacccactggatgcttgcagatgcatggtgagcttttcctggcttacctggtgaatcagcagcaaatgacactgaaggtctcaaggagagaaggtacgttcctctttctctacccttactgtggctttgcttctcacccctgcctctaggcggcagagtacaacatctttgaagggatggagctgcgcgggkctcctctggttgtcatctgccagggcaagatcatgctggaagatggcaacctgcacgtgacccagggggctggccgcttcataccctgcagcccgttctccgactatgtctacaagcgcattaaagcacggaggaaggtaaaaagcattggagctctgaggtggtgcaggagctttgygttccactcacgctcagagatagtaaccatgaacacagggcactgtgatctctagactctcacagagaaattcagtgacagtcttgtccccaagaacaactacacagacttaatgtactattaaagagggtgttgaaaatttttgttcaaagagagctttttttcccaaatgacttttccmacatttttrtagtactttatkaaaaataatttaaattcgaataattcaaaataaggccagtgtatttttttaaaaaataaatgactcttcaagtctgaaggtgagaaccgagaatccacaccgacacatccctgtgtcattctgtccagtgctgctccacaggggcaaacacttataacattttagctactgtattttcaataaaactttatttctctgattttatatataaacacacacagagatatgtgtgtatatatatatatataggtctatagatacatacatgtgtgcaaatgtatgcatgcgtataaaaaatggaggtgcagagaaattaaatatatatttacaatatatgtattatatttatatatacttaatatataaatatagaataatatataaatatataaataaacatttatatatttatattgtattgtgtattgtattataacaatacaataaatataattaaaaacaaaaatgcgtataaataaatatattcacatatttatatttattgtatttattgtattatactttctatacacacactatatatatatatatatatwcacacatatacagatatacgtatatatatgtgtttgtatatatatgtgtattagccctaccctaggattgtggaatttgagctccacactccagtttgggcctaatagagaaggagacttccccaatattgaccctttatttctatgagtgtgatttagattctgaaaccagggaagtgttgatgatgtagagttcttggttttggggagtacagatacagtcatcacatcactagaatcattagcatctgcacatttgatgggctcggcttctgtgctggcatttgagtcactaacagggaaggaggctctgacaggacttcttgtgatgatccatcctgcacggtcaggctcctctggcagcgcgtcctcattgcctcccctctggccaaagttaagaaatgggtggaggttgtgtgccgctgccatgggtggtcttgcagtgtttgtccagttgactgtaagcccctttgcaggaggtaccrtgtttcccatggccaaaggccctagtgcctggcacaaggcctagcagagcatgtgctgggtggaagttgctggctggctccacagtcccagggmaagttcacagccacagacagaggtcagtgggtcagaccacagacactcacttcaaggcctgcccaccctggtgtgtgctgaagagtgtgagggtggagctcccatgtgatcccatcctggccaggacctgygacctcgtgtcatgacctacccttcctatccctctgctccagctgtactgctgttcttctatttcataatcactcccacttcagctgtctgcccttgctcttctctttgctggcttctctgtcatccacaccactccccggtatccctccaacctcctccctctggcaaccccaaccccatagcaaygtcctttgatccttctgatcgaagctcatctatttagaarggccttcactgaccacntccattgtcactctatcatcacatcctcctttatttattttatactacttctcccttcctcaaattatctttattattgttaattcctakctcccacsacacactgtattcactaatatatttatgatacctagaacagaccctaaaatgctgaatgaatgaawggtgacatgctcttctctggctgcagatggcagacctgcatgccgtcccaaggggcatgtacgatgggcctgtgtttgacctgaccaccacccccaaaggtggcacccccgcagkctctgctcggggctctcctactcggccgaacccacctgtgaggaatcttcatcagtcgggatttagcctgtcaggtgagtgggacaggctcatcaaaagataagagaagggggaaggggaagatcaatgttctgaggccacagggtrttcctcagaactcaacctgaaggagttttccagcctagcactggtgtcaactttagggagaaggttactggggcaagcaggaagggtccctgaattgacaaggggtcctggtaagaaagtaagacaaggcagtcaggccgaagaccaggtttaagtggtaactgattctgcctagagatcagccctggttgggggcagggtcggggagctggtcccctctatgaattgatagtgatttccagcattagcctatgagcgctatgcaacatagtatgttttctttatttgtccagattaaaagatagcttaaattatttttatgctcaaattgcagtagcgtcttctaacctaggatttttattatattctcccattcctagtaattataataatgctaacactagctaccactgattgaacatctactatgtgttagccatgtgattagtcttacctrttctttacgaactctctgatataattagaaaataatcattcagttgctccataaccagtagtcttaaaatggagaaaaataaatgtagattcgcattcctataatgaataatttaaatgtgaaggaagtaagataacaagaaaagaaagacatttaaaggtaaaattacagcatatgaggaaagggtawggaatgggagaaacagaaacatgggagaaagaggtaagggagacctaggggaagaaagacaaaggaaaagagtttaaagtttggaggtaactttgccagaggtcacattctgctagtcataagcaatttttttcaaagtttttgcctttttttttttgttgttgttgttctctggctaccttaattcttaagcttttagaggctcctttctgaatagacccaagcacacattgaaatttctttttgtgctgttgtcacaaagacctgaccatcactgctttgcactgtgggatcttgggcaagtgacctaacctttcagaacctcagttatctcctctgtaaaacagataagggcacctctctcaaaccatggtggtgaggattaaaggagataatggttaagcacggaaaacattgcctgccacaatgagtgtcacgtctttgtcattgttcttcttcccagtattattatcatgctctgggtcagatgaaatctagataagaacttggcttttcctaccagaggctagttttcggggccataagaaaagtctagaagacctgatagactggaatggaagtttcttgggaggtgagrccagcaaggcacttcatatcttgcactcttaaaattaacccagtttctctcttgcccacatccccctacccgccactctgttttttttttccccctgggaatttatttccaactgtaggcacycaagtggatgagggggttcgctcagccagcaagcgcatcgtggcgcccccaggcggccgttctaatatcacatctctgagttaagcaagccttcctcaaagagaggggcagaagcaagaagagattgttttgaagccaaaatggtacaccgatatttaagaaggaaagcgaatccaaacggttgtgatctaaagaatcaataagcctcaagccttatgtttctccaatgttacgctcgcttgcctagctttacgaatattgctttgttttctgtttatgcatagccttgatttgtttgactcccctccccccatttacatgcatgcaatcagacaggccactaaggtaaaagagtctgctctatcatagtgttgagagcgtgtgtagtgctgcatcttatgacaaggggacagacaagctgggacgtcagggaaatgaacaaaagggacgcaggttatttggggtgagtgggtggtgggagcctggagcaaggtggagggtgcagaggggctggggtagggcatgtaggagggaggtgggtgggtcaggtgagtggaaggggtgttgtatattgtgttgatgacgtacgttatttccatggaagatagccgctgtggcagctgtcacatcaccacagctccctagrgtctgccgagaaggcaggcagtctttgggttctgttctttgtcaygtcccctacaagtaaattttgtytctttgaacgtttattaaaatgccaagacccaaccatttcttccacctgcttgattgtgccagtgtttgctcaggcctctttcttagtgttgctttcaaatccttctctttcctgggttgggaaggccaggcagggacagagcaaatgacacttctcttcctcttgccctccctgcctctttggtgctcttaaaagccagcagctgagaacatagcacaggcccacgtggtgagggcacccacagcttaaagacgcttccttctaaacacggcgaggtcacctctcactcttctgtctttgcaaaccgagaagagtggcatgcttctggcatcccaagtcaggattttagctcagatgaggcagaatgaagggcctctcttacaggcagtttgtgtttgattctctcgatcctggcacatccatgataaataggagtttttgaaagttggttttattaggtgttccctaatttttaccgtaataggtcatctcagcttatatgaaagtcaagtggggaactgggaaagccaaagtcagtcttgagcagagggagcacattttgtggacctggttccacctttccattccaaaccacctgtttccccttccattagcagaaactctgggggaactttgtgtctcagtcctagaatctccccaagtgagtggaagtgacatgatgcagtcttcctcatggggcacctgaaagaaattagtgtgggtgcttcgatctaccttgtctgtcagagttgaatatctctttccctatcatgctgcttctgaaaattcagttttggagcaagtcctgtgagcaagataagaatctatagaaccaagatgctcattttcagaagaaatatgttcaacctgggatcagacttccatgctctggggaatccaagtggtagcacctgtaaccctgtgtactaagtgctttgaagagaagagcaggcctcagacaccttttaattgcttaggagaaaccattrtctctgactgcaggtttgaataagttgaagaccagagaaaagtacacactgggctacaaaggaatttggagatagccaaggaacaggatttcccctagcaagctaccttctgttcaaatcatgaaaaaagactatttccccttagaatagggaagcttgctattttaaagctcttgtagtgcttttcttttaagggagatgtagtaaaagggaaaatgtagctcttartttacacttcaaagatgtgggggtctttcagagaactaagaataacagttttatgtgcagagagagtttgccagatctgaagcatatacctcattgactaggctgttactttgggataggttgcagtaccagccacagccagcagatagaggaaaagacacacataaactcgcttctgagsgtccacttctgcactctctgctctgctgttactcagcccctgagtctgactcatctctgcacaacctctctgtgccatgaagataagtcttccatggccaaatcggtcatccgcactgcccttgggacttccgaagtgaaccattccaccagaacctttgattctgcacaagatttccttgctctgggaacaacccccaaatgcccttgggaggaacaacatgagctcaggaagcctctctttcttcacttaccattactaactctccaagcatagaaatccctgggaattgcgagaataactcccactattttaaaatttatattcagatttgtttcgtttcataagacacatcaaacaggcctatacaaaaggtttaggaaaagaaaacaatggtgagtcccggccctcttcgaattcactggcacctcatgcaagtgtaggaaggcacgctggatcgtctakctgattccaaagctgtcctttgccatctcatcccttggcctgccccccaaccctgaggatgcccctgccatccccccaacctcctcatattgcctctgaacccagatggcaatccatcccggttctctctgagggccacgggcttgggtagtggaaagggtgtttgggaaattgttaaatcagttacccgtagtagagctatttcttgtacttctaagttttctagaagtggaaggattgtagtcatcctgaaaatgggtttacttcaaaatccctcagccttgttcttcacgactgtctatactgagagtgtcatgtttccacaaagggctgacacctgagcctggattttcactcayccctgagaagccctttccagtagggtgggcaattcccaacttccttgccacaagcttcccaggctttctcccctggaaaactccagcttgagtcccagatacactcatgggctgcccygggcagccagcattcattgtaagttccctctttgaaaactggtgtgtgggtgttcagttctgtgtctggtgggtatggacagacagtaatctcctgtgatctgtgctagctgtgaggcagctctggaacgtgaagagctgtttkgtttgaaccgtgaacaaaactgtgttttgagtttagctgacattaaagaaaaaagttcatcacgtgactgttaatgtaaacctggttattaaaataactatgaaattaccaacattgttctccagtcttcttctttgtgtgatgtgcattttcacctataatattaaaattgcccagtagaactgaaagggttagtaagaggggcaggcagatctgctgataacagagttgtctggagaaaaattgggggcttctatttttgaaattgagttgttagttttgaccaccaagcttgatggccattttgaaactttggagaatgagtaagtttttttcttctgtggatcatcaaatttagtattatatgccatttgggataaatctagctaagtccagaacagagccataaagctttttgttttgggttttttttttttttttggtctttcccctaaagccttgctatttgattgttttggaagcattttctgcttctttttaatagcctagacttgaagaaaaactcaaattacacccataccaaagtatattctttatcaaatggatcccaaggagtaaaatcagtgtacggaagcattatttgctatatctgctcttcttagagctttcaggtacatatcggcaacttgaagactctgagaaatcccgtgataaaggtctttcaaagtttgcctaattcagggttctcaagcttttgactactgaacccttctatcccatcccatcttttagcatcccaccaaacctattatactacacccttttgagggaaacactgctgaatccagttgtaatttgttgtgcagatcatattttcattgcaaaagttaaactagtttaccagggggaaattggaaagtggaattttaaagtctggtgcaactataaagttcagtcaggcagactcaagtgtagttggatctaagtgctagaccctgacatcagagcgttgcttctttccacttcggccctgtgtgccttcagtaagtgcttccttcttaggaaagctctttttttattattttatttgagatgagtgtccctctgttgcccaggctggagtgcagtggcaccatctcagctcactacaacctccacttcctgggttgaagcgattctcctgtctcagtctcctgagtagctgggactacaggcacrcgccaccacaacccggctaattttttgtattttcagtagagacagggtttcaccatgttggccaggctggtcttgaactcctgacctcaagtaatccacccgcctcggcctctcaaagtgctgggattacacctggccaggaaagctctttttatgtgggacaaagttggttgtcagcatctccaggttttcatttcacctgcttagtaacctcagaagagggagagagtccctcaatagttcccgctaaaaagactgattcagtctggcttggggcatgtactcatcattgacctagtcactgtggccagaagagcacgtgggaccaattggccacaccggataacatacctggcccctgagccacctgaaccacatggactcccaataactccacaaagaaaatcaatttgtgataactgaagagggatggatgcaaggaaggcaaaaagagccgtggctgtggcaccattcgcaagcttgcagggcatgaatgttttgcctggtgatgtggaagttgggacgggtggggaggagatgggataccaggggatggccatttctgattaattgcttttatatgtgatgaccccctgttggtctgatagaacaatgcccttgatacaggagcatagagtgattataccttttaacacagaagctcagaatcccagtcacaagctactctaagtgcataaagaattaattattttacagttgaagttcgagttttgatgtttaataagctttggtttatagccccattttatggctctaactcaggattggtgaagtgcctctccctgctcatgaccgaggcagcagctgagctctgtttaggatttgagtgggtttaaaggcaatagtcagcacttaaactcaggatgcagcagtctgaaaggcatgaagtggttttcttcttaaatggtgaaagatacacattgactttcacatctcttccttcagggtggagctgttcagtggctgagtcacgttgaccaggtggggaatgagaatgctgagtaggagactaaaaagggccctctggttccaaataactttctggaatcagctcttctaccaccaacccatcacaaaggagaccccgaccatgagcaggagatgggggataaaaaggccaaagtaacctgaggaaatgagatcacatgcttaaggctggtacttttcagaatctgaagagttctagatcctgccctttgctcagatggctgctaagcacacagcaggacacttaacatgacctggacaacagggtacttcgcatgcagaacttcggaggccacaaaacttacaacagcctactatttcaggacaagcccatggagccagcagcttgctggctgcccacccactgtgggtctgagaggtggtgacagtgccctttgttctctcctaaagcagaggttgcttttagctgcaagagttcagagttgcctgttaactttctgtcccaggtgatggaccttagaacttctgcctgctgctttggtatatggaatggggcacggatgttgaggggtaggaaggcagagtgctaaagaaagaggtgcataggctgcccatggacttagggacatagtgaaaggcagaaactggaattctgggctgtgttccctgaaatgcgactactagagaggtaaggatttttagtttttatacatgtgggtcaagtaagctatactgcattccatagttgcagaacatcatctctgtcacagaatattatttctggtaagggacattcctcacaataggaaatagacataagaacgggttactttgggcacccgcaatgctatctctggagaaaacaattacacacacacacatacacacacacagctgacaaagaagggtcagtggctcattgtttacagaagacattttaatacacataggcacatttatattatatatgctacagctcaacagaagcacttgtttcccattcgagggctgccagatcagctgcctgttcacaacagcacagataagtgaagtttgaaattttaatatcagtgtttaatatcagtcagacacactgaatttgtaataaacaggaatcacagacagatagcaggaaacaggattttatgtagacaatacagggacaactgggtacagaaacaagcttgaagtgctttttgtgccttttcattctgcttttgaagagctaaagccttagcattactgcctcagccacaagcagcaacactggtccctactagctacattaatactctttcttcctacttattcttccatccaatctacaaaagctatgataatagaacatctagtggtttctggttgaaactttcctatcagaagaagcctagctactaattaattagattactgtaattaatttagcaatgctctgtgctggttgctgttcattcctgccctagcaatgacctcaggcaaaaccagtgccaccatggcagtgggttagccattagcagacgacttcctggaattagggttgtggcataagttgccgggtttgactgccctacgcatctactcgaggtcactgagggtgtactggaggtgggcagctctgtcacagtgcaagagccttatagctgggatgctcttggacttcaaaacctgctcagactttgcagatgctccatacaggcaagggaagcactgggagaaaaacattcaagaataccaggccaaaggatttaatagtcatcttgttttctaaaaatcacagctctgagcctcggttgtcacaactccggaagagacatgttccacctagtgggatattaacgtttagcccaagttatagaataaaaccaaaggatctgatgtcaacaactagcaatgaccacaaagatttaggaaaagtttaaattttggaaaagttttttgttctcatgtttaaaatgcacagtggtgggaggtgattacaatcagcactgtcagataccatggttttgcttttcaaacttgaaatacactgtgtgtcattcacctggctagcactagaaatccatcttactctctgagcctgtgctctctcatctgtgcatccatggttcccaaaagcccacagaggtgcttcagtcacagaagcagctcactggaaataaaactagggattcagcctacagagattgtatcgggttcccatcccatcataaatgtatacgtgtgaaatggcactatggcttaactctcatcacagtggagatcctaatggttccatggctctttggtaagtgtaattacagaaaaatttcccaaagcctcttcttgggaaggatgcaaacaaggttgcagcgagaggaggaacctggttacttagggaggtgagtccacagcacataaaggcttgaatcaaaacaaatgaaggatagaagtaaacatgcaagtagtccctgacactcgtggggttaccagactgcagcagaatctggtcactttcttattcttgctctttccaacacatccccttctctgaaatcgagtcagggcaattgcttcaagtttatagtgtttggagaaaaacagaatagcacagacaaatgatgtgggaactgtagggaaaaggaatcaaacaaacaacaaaagagctggcttttaattatgtaacaataatatggttgctattagagaagcactatttcacagctctgcccgaaactctgggcctattagctcagtgaagagaaaactgtgaatgccaagctgaagtttagctctggctttctacacatacttggttgccccagtgtaacctctttatggaaaagccctgcataaaagacagccatctctgtttcttcggtccattttcacttgcctggcttcccaaatgggcatcagtcaggtcttcgcagttgccagcttactgccatcttggtgtgacacatgctctccataagtaaggacaggtttaggtactctgagtagccaagaggtgaaaacaatcccccaccaagcctgttcacttctggaccctacccaggggcataggggttgccaaaaatagttcttctgtaaagatctgtgtatctgtacagtggagttacatcatatgcacgtctcacttaggtgaattaaactttgtggcaaatcaataaataaaatataaagaaaaagagtgagacatcagtgatattttaaataagtagggaattctgcctgccattcttgtagtaagcacaagggagaagggagacatgataccactgttcccttagtctccatgaacttgcctgtcttggatgtgtgggcattccactgttctaagagtaattctaaggccaggtttggtggctcacgcctgtaatcccagcactttgggaggccaaggtgggcggatcacttgagaccaggagtttgaaaccaacctggccagcttagcaaaatcctatctctactaaaaatacaaaaaattagctacacatggtggcacacacatgcgatcccagctacttaggaggctgagacacaagaatcacttgaacccgggaggcagatgtagtgagcagagatcatgccactgcactccagcctgggtgacagagtgagactctgcctgaaaagaaaaaaaagagtaattctagtctataaaaacaagtataatttgttcaacattttagctcatctggtattagccaaaatgagaccaaaaataaaaataactaagtcaaaacaaaacaaaagcaatggcttgtttcattagtgaaaggtgacactgtattgggctttactgagaaaagatacttcccatatactttatgggtaatttaaggggtttttcaacggtaaattttactatcttctaaattcatttctaacttagacaataaaccccatataagatgcaacttttctgaactgcaaggtggacatactttcagtgtgatgacattcttttctgatcctctc

SEQ ID NO: 95685 - DNA, 54370 bp, Homo sapiens
  misc_feature (1)...(54370): n = A,T,C or G
atccaggatgactctgcccttgcccctaaggtcggtggcactggcttgctgtacccttctgctctccaactcctgccatcttcctggcaccgtgcatgtggataactaaactcccttactttcttgaccttcctgaagccaagcacttttacagcaatttgactcagggacccactcccatggccacatatggctctttacatatacttggaaatgcctgtccttggacatgtaaaaacaacaaaagtacatttctcactcctgccatattccacccatcttgttcctctcccattctgtcagttctgctgccacgttgcaacctctcgttcactgagcctctcactatttccccacccagagaaacacacaggggtcccatgaccaatggggcatcagctctctttcttatttgccccttaactgaagtcatgctgccaatccctatccctggatgactgcaatcaccggcttctcctccctgctgtcaggccactcagctcagtgcccaggggaaactgtatcaatccacgagcgggattttcagtctcttccttaatgtctttgacagatgtattgtcctctcaacaacataacaagacaccagtacttacctatttctatgtgtgttgaaaggccacacggtgaacctctatggcagagagaacccaacatgatcagcaggccaggccacaacctgaaagcagacatgctctcattgcccaccggcttctctggtgacgtgggaatgctcagagctgcagcagcactgggactccaaaatccaggtgcagacccaccgcttctctctaagcaggtcactgaccgaggaaaccaagcctcatttcaaaataatatcgttttccaatgaagtcaactgtccaactactgtttagcttcaccagaacagcaaacaaactctgtgctcctggggggtggggttgggaggataaactgaaatctgaaaagccttaggccagaagcactgcatcttctgaccgaggttttttctggatttcattttaacatgaaatttgtgtagagatgcaagcaaagttgtctccagatattttttgctttctataaaaaggctcacctgtgcagatagtcaacatattagaccacctcaccttacaagggtggatctctcatgcatcctttctacacatttatcaggctgtcctgcttcctccgcctcccaagccacaagtgctgggaaagttttatggtaatcagctggaactggcttccttttcagtatttggcaacagatactgacacttgtatgggattacacaagagcagccactcctggtctctctacctctggctgttctaatagggcttatccagagcctgttgcaaggtcagattcctgcagctgaagcaaagatgtcaattccacttgggaggtggaaggaagggggcagatttagggccaagaaacagggtttggaaaatgttaagctcacgatatattattaggtacccacttacacttcatccatgggaaaaattaagctcttcatgaaactgatggtaatcttaaaacacaaattatgcatattttacattaaaagcaagagatgggctcctaaaagagtgggaggaaatagtattcacttcaggtttgccaaatgaaaggatgaatagaaagtgggatgatttggctgggcgtggcggcccacacctgtaatcccagcactctgggaggctgaggctggtggatcacctgaggtcaggagtttgagaccagcgtgatcaacatagtgaagaccccgtctctactaaaaatacaaaaattagccaggtgtggtggcacgtgactgtagtcccagctactggggaggctgaggtgggaggatctcttgaacccaggaggtggagattgcggtgagccgagattgcaccactgcactctagcctgggtgacagagcaagaccctgtctcaaaaaaaaaaaaagaaaagaaaaaaagaaagtggaatgatttgacaacagttgtcgccccaacagtttcccctgtaagcttaacacagccatgtgcacagccccaaggaaagaaatcccgcagctacccccagacctgaggggcagtaggcccagctactcctgattagtccagaggccatatgcctacgtgttttgtttggctaacaggatgttttataaacttaaatcaagtttatgaactttttctaaatgagaaaattcacgtagaaatctagatttctggctctcttaaaaacaaaagaactggcatcatgaactgacgctcccatgtgacacgacaaccagctgcagccaaagagccagctgccccctgatagagcatgtcctgctcctccagtccccaccatccatgcaatgtgtgcaggtttccacaccccttctggccaccagaggcctttgagtttgcctccctgtcactctgggccttctacagactgtgcgtgagggagtcacaattattaattgggactttggatattgtctctcagaacatccaagagcagtcaatcaatggttacaggggaaaaaaatactgctagaaaagatatctaaccatatataatacaacaaacccatccaaaaagcaccaaagaaatgggttcagaacaggtgtggtggctcacgcctataatcccagcactttaggaggccaaggcgggcagatggcttgaggccaggagttcaaaaccagcctgtgcaacatggcaaaatcccgtctctaccaagaaaaaaacaaaaacaaaaattagccgggcatggtggcatgcacttatggtccaagctactcaggaggctgaggcgggaacatcgcctgtacctgggaagtgaaggttgcagtgagctgagatcacaccactgcactccagcctgggcaagaccccacctcaaaaaaaaaaaaggaatgggttcagttaccaaacaatactaatcccaaatgtctcaatttctcattatgcatttttttgtatttgagattcagaatgacataaacgtataaatgtaataaaataagaggaaattatttgcttagtgtgatagttatgaatatggtctttatatgacaatattgcttgcagttttatgaagtttgtattactttggtaacaataaaaacatcaaagatatgactttaaagaaagttaaaacgtagctcacaatattactatctgacaaataataagcatatggaaatatttttctttctgccccacacccccctttcctaatataggtggctttgttataaacaagacagcatgattctaccatttagaactcttctggaaatagagacccaaggtgaaaagtaaacatacagttacattaaggagtgagtagggagaatacaggtttgaaagccagagggtctcaagctttatgtgggccagtctagaaaatgggggagaagaggctgggcacagtgtctcatgcctgtaatcccagcactttgggaggccgaggtgggcagatcacctgaggtcaggagttcaagaccagcctggccaacatggtgaaaccccatctctactaaacaatacaaaaattagccaggcatggtggcgcgcacctgtactcccagctactctggaggctgaggcaggagaatcacttgaacccaggaggcagacgttgcaatgagctgagatcgtgccattgcactccagcctgggcgacagagtaagaccctgactcaaaaaaaaaaaaaaaaaaagtgaaagaaaaaaaagaaaaagaaaatgggggagaggatgaataagggtgggaactggggagtggaggttcccaggacaagggcagccaaaggagaaaggagggaagaggtccctctcacctgatggtcttgtccttgtaggccctggtaaggacagacacccagccaggcgctagggggcatcaggacaggctggaagtaagacaggagccaggaggaaattgtttacactctgaatgggggcttgaagaggggcacaaaactgagggaaaaggggagggccacattgtgaactttctaagctccaggcgcttttgcctttgtgaagtacttcctgtcacaaaaataagtaaacaataaatagaaatcacattttacatctgcattggtgtaagattaacatattaatatgccacctaaaacttcttttcttcagattttagaataaattaaacatttgtgagtgctcctaaaagttttatgggcccttggcatcgtacctactgtgcgtaatggataagtcatctgggaaagggagtgggtaccgtttgaaatagaaccttaaaaaggtaagtgggctagggtaatttttgaacaagagaggcagccacaattaacttggcttttctgggcctcagttgattgaggcctcaattgaatgatttccccaggccagtagaaatgagccctgtaatcccagcactttgggaggccaaggagggcggataacttgaggtcaggcattcaagaccagcctggccaacacggtgaaaacctgtctctactaaaaatacaaaaattagctgggcttggtggcacacacctgtagccccatctactcgggaggctgaggcaggagaatcgcttgaacccgggaggcggaagttgcagggagctgaaatcgcaccactgcactccaccctgggtgacagaatgagtctgtcggtctcacaagaacaaaacaaacaaaaaacaaaaaccaccaccaaaaacaaaacaaaacaaaaacaaaaactccctccgcaggcaggagatgtaaacacgccagctccccagccccacctgtgatacctactggcccacatccctattaggactccctggttctccccagttcctgcaacaaaatacagagcaaaatagtgtgaaattgattaaactctactgttatcacttctgccatatgtgactggctcaaaactcaatggatctgactcagcaaaagacaaagtcaaaatttaaagttactgcctcggcattttgcaaatgtcctagaaaaaaattcaacgtcctagaaaaaggtgaaagctagcaagatactctcaacgctgtaggagttgagaaagggagatatgtaacctaaaatcaatgcatagggctgggcttcatttgcacccacaaattcccagcatacgcctgctatttttatttttatcctcattaggttttaagcttccctgctgctttcagagtcttaagcccaagtctaattttttaacggatgaagaatgctgtttaaaggtgctcaaataccttggttggatagtatgctcaatccttataccttggttgattcaattttgacaaatgcttccatttactagttggtgacccaactttaatcttactagtggcttgactagggtagctagtatgactttgaacgctatattgaatttaatgtggcaactgtaatgagcattttacgttatctcacaacaaaatggggtagatatggttctattttataagtgactggacgaaggttaacctgtcggtcacacagcttgtcggcaacagacttgagtttggatcctagtctgtttatttccaaagcgctgttatttatcgggagcaaccctaggagaatgcctagacacacacccaaaaaagcagccaggcagcagaacgcggggtcacacttcgacccctcagagaacgatcgctcccaatcaatactacgtgctcaggagctacaactgaagaagcgtgatcacggccttggcatttagggcaggcaccagcgcatctatggaccgcgcacaaattccggggatgccgaatttgggggatgctaaggggagagagtgggtctctagcagcgattgggggctcaggagcagttagtgacaaatgagcacccgaaaagtgaaaaggtgacagcagtccgcaggtgcatctactggcgagccttctccatccccgaacccaaccctcccccgggagaaggtcgcgccaggagagaagccgcgcggcgcttagggcaaggtgcagagggcggcgcggcggtgcagcgagaaagacgcggagagagggcgctgctctgtggctctgcaaccttccgccagctcccacgctttccccgcgcgtccccggcgcctcctcgctcctcttgcttccccgcgacccctgcgttcccgtgcgcgcgcgcccgcttgcctgtttcctgtcgccgtcgttgcccgggccatggcgacctgcatttggctgcggagctgtggggcccggcgcctcgggtcgacgtttccaggctgccgcctccgcccccgcgccggcggcctggtccctgcctccgggcctgcgcccggcccggcccagctccgctgctacgctgggcgcctggcgggcctctctgcggcgctgctgcgcaccgacagcttcgtgggcggccgctggctcccggccgccgccaccttccccgtgcaagacccggccagcggcgccgctctgggcatggtagccgactgcggggtgcgagaggcccgcgccgccgtgcgcgctgcctacgaggctttctgccgctggagggaggtctccgccaaggtgagagagcccggatgcagggggccagagctggccggggacacggcggggagcagagggggctttaccccaaagtgacaccagccgcgtcgcctccctcctgtgctcagttccccagggtatacaaagtggaaagtcagagcaacaagggagacgaccgacaaataagtttggagcttccactttgagccgggcactagggacacgacccctgccctcaagcctcatcaagttatgcactgcccagtaggggaggcagaacgtgagcgcctaatacaagcgagctgcttgttatggtcaacaagcctaaccgtggaggggcggggagaaaggggaggggtgtcagggaagtgagagcacgtgtggcccttcagagtagctgaaatatctccgcagctgcagggagcccacgcaggaggctgcttcagcggcccttgagaaggctggtagtgagggcccctggccagaatcatggratcggaaacggagagaactgtagaaagatttgggttttgtgcaggggaagagagaaatccaggagcgttctccaggttttcaccctaaatggataaatgctgctattggccattgcatagagaacactggagaattgggagtaaggggtggagggccattaaatgggaagaatagagtaagaagaaaactaagaaagtagtttcttccttctaatattatattattaaacctggagtcaacgcagtgaaattttttaccstgtccttcaaagctctccctctgaaggaatgcatccagcgatccctacgagtacaagagagtcttagcactcattcatccatcagctgtttactgagcacctgctgtatgccctgcactgttggaggtgcttgggatacctcagttaaacgaaagaaggattctgcccttatggagctcacatggggtggaaggggagcagaagagagatcagaactctaaacaacaaacataatatctaagcaaataagtatgtgagagatgctgagtgcaatatggaaaaaaggtagaagcaggagaggatccgggccagagggaaggggcaagatgcagcatcaacagtgtgaccaggcatattcctctgctagggctgccatagcaaagtaccacagactgggtggcctgaacaacagacatttctcattttaccgctctggagggtagaaatcccagatcgaggtgttgtcagagttggtttcttctaaggcctctcattggcttgcagagagctcagyttttgtctttgtatctcatcagacctcaattttagactcatggagtctgagatgtctgttcacgcccaagtgaggatgtaaagtaagcagttggttatatgaatgaatcttccctgtgtgtctccacatggtctttcctctgtgtgtatatgtgtcctaatctcttcttcttttaaaaacaggagtcagattggattggggcccaccagaatgacctcatcataacttaattccctttttaaagaccctatttccaaatgcactcacattctgagatactggggggttaggacttcgacatgtcaattttgccaggagcaccattcagcccgtaacatcagggtaggtctcattgaggacatgagatacaaagaccaaaggaggtaagtgtgtccggagttggttcctgccggtaggtttgtggcctcgctgacttcaaaaatggagccgcggacctttgcagtgagtgttacagctcttaaagatggcatggacccaaagaatgagtggtagcaacatttattgtgaagagcaaaagaagaaagcttccacagcgyggaaggggacccgagtgggttgtcgctgctgggtgggtggggcgtggtggccagctttttattcccttatttatcccttccagtgttccgtttctgtcccatcagaatgcctttttttcaatcctccctgcgattggctacttttaggatcctgctgattggtgygttttacagagcgctgattggtgcattttacagagcgttgattggtgtattttacaatcctcttgctagctacagagcgctgattggtgtgttttttacagagcactgattggtgcattttacaatctccttggtagctccagatcgctgattggtgcattttacartcctcttgctagctacagggtgctgattggtgtgttttacagggcgctsgttggtgcattttacaatcctcttgtaagacagaaaagttctccaagtccccactcgacccaggaagtccagctggcttcacctctcataaggacattcagctagagccaaagtagaagcatggctgacacatttgcagaacagcaaggaggcccgtgtggactgagcaaaggggaagagttgtatcagaggaggtcatagggagaaggggaagagtgggtggaacatgtaggacctgtgagttattctaaggacttggtttttactttgagtaaagagggggctrtgtcagggttttaagcagagatatgatctgatttacattttgaaaggccactctaaccacagtgctgagaatagatgaagagtggtggaagcagagagacaggttaggaggttgttgcacggatttaggtgggaggccacggtggcttgaaccagggtggtagcagtggacaaggtgaagagttatcccataaaaggatgtattttgaaggtagagcccactggattttctgatggatcattatatagaaagtaggtgaaggagaggggttagtgatgactccagggcttttggcctgagcaattggaaggatgaggatagctgaattgaacagcattagggtgagatatcaagagttcagttttagacttattgagtttgagatgtcggttcacacccaagagaggatgtaaagtaagcagttgggtgtatgagtctgaggtttgagagcgaaccctaggctagaaatataaatgtgaaattcatacctgtgtgtactgcatacatacttacagctatggaaatggtgagatcacaggaaaggagtggaccagggcctgagccctggttcccctagcatcattctggagtcccacaaggccccacgaagatcaaggctgccatacaatggtgttacactgcaggggtctggaaagccttctagtctgtcagtgattgtttggcagctgcagggcgggtgttgggacctcttgctgacactagcagcattatcctgtgttcagatcacaccgcccatcctaatgtctgtgccccttgaacattacagtgatgtcagcttccatcttacaagggctaggatcttctcagggaaccttcctttttgaaaggaggggttcaggctgggcacggtggctaacgcctgtaatcccagcactttgggaggccaaggcgagtggatcacctgaggtcaggagttcgagaccagcctgtccaacatggtgaaacactgtctctactaaaaatacaaaaattggccagacacggtggctcacacttgtaatcccagcactttgggaggctaaggcaggtggatcacttgaggtcaggagttcaagtccagcctggccaacatggcgaaaccccayctctactaaaaaatacaaaaatcagctgggcgtggtggtgggcgcctgtaatcccagctactcaggaggctgagccaaggagaattgcttgaacctgggaggcggaggttgcagtgagccgagatcatgccaactgcactccagcctggtggacagagcaagactctgtctcaaaaaaaaaaaaaaaaaagaaaaaatacaaaaattagccaggcattgtggcatgcacctgtatgtaatcccagctactcaagaggctgaggcatgagaattgcttgagcccaggaggcggaggttggttgcagtgagccgagatggcgccactgtactccagcctgggtgacagagcgagactgtctcaaaaaacaaaaatgaaggtttttcttggctttgaatacacctgtgcagatgtgggaagctacagcctgagcagcgctctctttagagtgccttgatggcagcccaggtggcctagattctctaggccttcctcattttctttttttaagtggttttatgtgaatgaattaattttttttttaataagccatttcttccttttttcttttcttttttttctgagacagggtcttgctccattgcctaggctggagtacagtgatgctatcattggctcactgcagcctcaaactcataggcctaagcgattcccccacctcagccttctgagtagctgggaccacaagcatgcaccaccacacccagataatttcttttcttttttttttttttttgagacggagtctcgctctgtcacccgggctggagtgcagtggcgcagtctcggctcaactgcaacctccgcctcctaggttctcctgcctcagcctcccgagtagctgggactacaggcgcctgccaccatgcccgggtaatttttttgtatttttagtagagacggggtttcaccgtgttagccaggatggtctggatctcatgacctcatgatccgcccgcctcggcctcccgaagtgctgggattacaggcacgagccactgcgcccagccccacactcagataatttctgtgtgtgtgtgtgtagagacagatctcaccrcattgcccaagctggtgttgaactcctggccacaagcaaccctccctccttggccttccaaagtgttgtgattacgggcatgagccgccacacctggtcccataatattgttaataatccaatgtatccctktatctgttttttgttcattggaattttttaaattatggcaaaatatgcataacataacatttaccattttaaccatttttaagtgtacatttcagtggtattaagtgcattcatgttgttgtgcctgggccctcttcttaagtgtgtaaaaccctttcttatgcctcatgcatgccccagtccatatgtcagtctctgggacaaatccaggttgccagtgagccactataatagggaacaatacttgaagacactatgctgagtgaaataagccagtcacaaaagggcaaatgctgtatgattctacttaatatgaggtacctagagttgtcarattcatagagacagaaagtagaatggtccaggcatggtggctcatgattgtaatctcagcactttgggaggccaaggcaggaggatcgcttaaagccaggagtctgaggttgcagtgagctatgattgcrccactgcactccagcctgggcatcagatcaagaccgtatctaaaataataataataataataataataataataataacgtagggaactatatacctttgtatggtaaaattaaagttgttcttatttaccataagcaataatagctgtttccacaaaacttattttmtcttttataatttatgacgcagtatacctctttagatgcaacttgaaattggatctctattactcatcaaagaagggtcagttagcatgagcaatatagtgagaccttgtctgtacaaaaaaaatttttttttaattagctgagcatgatcatcctgtagatcctgttagcatgaaaagtctgtatggcatgacaacaacgactttaaggggaagataagatttctttctacttctaagtgatgctgtgataccttaagcactaaggcagagctagtaatgcttttttagtttcacagatcaaagtaatcttattttaacagatcaaggtaaaatgcttattttaacagatcaaggtaatcgttgtaagatgtatataacatgatgttaacttggtagtctaagtgtttagctatcaagcyggattccttagtagaccaaatcttgttatcgaagtgttcttgagctatacccttgatgtttagaaaaaaagtatttgttacctcttgtagggtctgctttttgaacttttcttcccctgtagttgccaattctgcatgtactagtcctctagaaataggttaaactgaatcaacttgatggaaggaactctccacagggcttgttttccaaagaaaastatagtttggagaagcaaagttacaagcctacctaagcatatcataaagctgttcagaaataactcagagccagtctcgtggatggaaatgtagtgcctgagtcacattctgcttaaagttgtaacagayacagaggagttaaaaaaatagctgagcgtgatgatgtgtgcctgtggtcccagctactcagtagtaggctgagctggggggatcacttgaaccaaggaagcagaggttgcagtgaggtatgatcacaccactgcacttcagcctgggtgacagaacaaaaccctgtctcttttttaaaatttttttaaatttttgattttttttatttgtgtgcttttcattgtccaaacccagaccctgtctcaaaaacaaacaatcaaaaaamacagaagktcaatgtatgtttccccaagcatcttactcagggttgtccagaaaaatagaaccaatgttttatatatatatatatatgtgtgtgtgtgtgtgtgtgggtgtayatatatatgtgtgtgtgtgtatatatatgtgtgtgtgtgtgtatatatataatcatagatatgtaggaatataggaagagacttcttataaaggactggctcatgtgactgtggatgctaagaagtcccaccctctgctgtctgcaagctggagacctaagaaagctgatatgtccagtctgagttccagactgggtccaaagtcctgagtaccaggaatgacaatgtctggtgtctgacaacaggaggaaatggatgtcctagctcatgcagagagtgaatttgctcttcctctgccactttgttcttttcaggttctcagcagattggatgatrcccacctgaatttktgaaggcaaatcttctttattcagtctactgattcaaatgctaatctcttccgaaaacactcacggacatacccagaaatgatgttttaccagctatctgggtctcccagtcaaatttacacataaaattaaccattacaaccaaggagaatgagaccatacagctaatattttaggatattgaattttatttagcattctgtcttacacttggcattttattacttttctgccttgttatttcttttgcaggagaggagttcattacttcggaagtggtacaatttaatgatacaaaataaggatgaccttgccagaataatcacagctgaaagtgtaagttcagggttctggcttggtgcactgagaaattctccaggaatttttacactaaacttgggaaagccgctgacttcccttcactgctggctgtagctgaagaatatgtgattccttctctactgatcaaataccaaatcattattgtgccagggtacttagatttgctaaaataatatttgtatgttctagtttattctttaatagtatccaaaaatagattttgtttgcaactatatgaataactgctgtttcaccattctgatttttttccatgttactgttttggttgtttttttttttaaacttgtttttgtacattttttaatgtaccaatacttcttccatagatataataaattatttcatatcgtggttacaatacttagaagatattgaaaggaggaaaaaattagatgtttcctaatttgtaaacatattgagaatgcaatgacttgtggtttagggtgatacattcatcattgtaattctgctttttaaaactcacaccaaagtcagaaattttccccactctatgggtatcgttataggagacttttctactcttgttgcatcttgaagaatttaggaacacagagccatgcttttattattagaaggtaatacgtgggttcttttctgatttaatttagggaaagccactgaaggaggcacatggagaaattctctattccgcctttttcctagagtggttctctgaggaagcccgccgtgtttacggagacattatcyacacccyggcaaaggacaggcgggccctggtcctcaagcagcccataggcgtggctgcagtcatcaccccggtaggtgacaggatcagcaagatcctagggtgggagattggatagggagttgggaaacaattcattcttcctcgtgagcaggtgtgctcatcctgttagttttgtcacctgttcctggtttcctgatgcttttgctggatgtggaagtgtgtttcctagtcctctgtgatgatgttaggtgtggtggcagtgagtggaatkatgcatttctaatgcctgcaaaagtgggatgagccrcaggaggacccaggggctcttctgacttggcatggaggcttcttcctggcattgcctagcacctctgaaaagatcttccagtatttatcatttttaaaaagacttaagatatgatacatttttaaacttgccatagtttggaaaaaagtgttatgcttaattgatggttatcatcaataacaaagcatttgtggacccactagcaggcactgggccaggttctagaggtaaaaaggctaagaaataaggtatcacatctgcctggatggggctgcagtatatttgtggaaygcccagctttccttctgggtcctgccttctactaggtcccatattaacytctctcctgtatctgtcagctggtctcgagacgtctgtgtttttcctgctcagcatagttacagasagaatccccctgattgcctagactggctaggtttgacttgaaggtcactatttactaamtgtgcaaccttggccaaattacttaactgcactgtctccgttttcttgaacttgcaaatgaggttaatatcaacctcattgggttgtgataaggatttaattaattttaattttgaagtacttagaaaaatacctgatacagagtaagtactatataatagagtttttcaaaataaaataaaatactgttattataggtatatgtataggcatttataaatatgtatgtggaaggaataataaatcatctgccattttcaaaaccattgctaatacttactcccatgggcctcaggccaaatccagcccactgcctatgtttgtaaataaagttttattgggacacagccacacccattcatacacctactatctgtggctgttttcacaatacagctgcagagttgagtaattgccatagaaaccatacattctacaaagcctaaaaaatttacgatctggcccttcacagaaaaagttggctgacccctggtctaactaattttttactgtgttaaattctaaaaatatttcctgtcttcaagagcctttatctcagagtccctcaagttggcgggggggtcaggtgttctgagagctcacctgtgcagccaaacgggtttgtcaatcagttgtgcaatgaaatttgttcactgacttcccaacntgccttcctttgcactaaggaggtggtccttcctctcacatacttcctctgctcttctaacyccagtgraatttccccagtgccatgatcacccggaaggtgggggccgccctggcagccggctgtactgtcgtggtgaagcctgccgaagacacgcccttctccgccctggccctggctgaggtgagccnctctccctgtgtttgtacaaagcagacaaagttcaaaaattgatgtttatctgggacagaaagaagcaattttggagcctacttctttgcttacgcctcctgatgcatggtgttgtgtattaatctactggtrattactttaagtcagctgtagctcttttgggaaaaaaatggatgagggatcttctgacatctgcaggccatatgttttcagcctactgtaaaatggtatctatccatcatcttcataaactaggcacttaaacatgggtgtttctcacatttaggaaacttcttatttcccattcccattcccagttcaatctgcattccattagatcttattcttttgtttgaaaacctcaagtggcctcttgtgtcactcactcagagtaaagtccagattccttagtggctttcaaggtcctataagatgtcacttcccacccccccagtatgtctctgacttcgtccatcacactggaacccctcactcttcattcatctgcttggaccactctggcccctgccgctttccagaccccgccagccttgccctccactcaaactttatactttccctctgtctggagcagtctcccccagatacccctataacttgcttcttcacgtcttcactcaaattcctctctcccagggaggccttccatggccaccctgtctaaaaatcacaatttggctgggcgtggtggctcacacttgtaatctcagaactatgggaggccaaggtgggcaaatcacttgaggtcaggagttcgagaccagcctgaccaacatgctgaaaccctgtctctactaaaaatacaaaattagctgggcgtggtggcatgtgcatgtaatcccagctactcaagaggctgaggcaggagaatcgcttgaaccctgggggcggagattgcagtgagccgagatggtgtcactgaactccagcctgggcaacagagtgagactcagtctcaaaaaaaaaaatcacaacctcacactctgatcctcctgatcccctcctctgctttgctttttcccccagaacacctaaaactacctaccctatcactatttgtaggccttttcagtgggcmsggctaggagatatacatatatgtgtacacatgtgtacacacacaataaaatgctgcagaaattcctatagaaacttcgaattcaaattcagtcctatagagtttttacttaatttattttatattatatctgcacctccttctttcctggttcctttttttttttttttttttttttttttttkgagacagtctcgctctgtcacccaggctggagtgcagggkcgcaatcttggctcactgcaacctctgcctcccaggttcaagcaattttctgcctcagcctcccgagtagctgggattacagatgcccgtcaccacacccagctaatttttgtattttttggagagactgggtttcaccatcttggccagactggtcttgaactcctgacctcgtgatccacccgcctcggcctcccaaagtgctgggattacaggcatgagccaccaygctcggcctctttcctggtttctaaagactcaggaaatgactgaattaatattctgtatgtactcattatacagaacaacagcttctgaatatyaattttatttgttttaaatattaattttaatatcaccaatgtgcctattgaaaatggtttacttttttggtattttctctttccattctcatttttagtaataaacttttattttagaatagttttacatttacagaaaaattgcrtagatgggctatttcccacataccccacattcaatttctcctaytactagcagcttacattagtatagtatatttgttacaattaatgaatcaatagtgatacgttgttattaactaaagtccatactttaaaatccattctcagattttwgtctgtacctagtctcctttttctgtttcaggatctggtccaggatatcccattacatttagttgccttgtctccttaatccctcttggctatgaacatttgtctgtattttaaaatagttatactgtatctgtgttgccaaaactacaaccattacatgctctactctctccagtttaaccctcctttagacttagttgaacaagcagttgtatgtttatgcttaccaccagtgcttatgttaatgtctctctggacatttggtgatccgaacctcagtctgtagtagattccttaggaatattttcccttcttaaatgttgacagtagtctgggcctatcgtgcttataaatcagttttgctaggtataaaatccttggctcacattttttttttttacttgattatcttaaatgtattctctattttcttctgatataaagcattgctcttgaaaattcagatggtaacctaagtttcttgcccttataagtcaacttttttttttacctagmtacacaaaagtgtttggtttggtttttttycccctttrtctttaaagaccartaatgtcactagaatatgtctttgtgatgattrctttgagtccatactctaggtatgcagtgtgctctttcagtatgtagtttccagactttttgttttatatctctataaagttttcaggatttgttcctcaccattggtttggttttactcccttaggaactcctgatatccatgagttgaatcttttttgtcactttctcttgtatctttttcatcttttccctaatttttaaaattatcttttatttctgggtgtaaaatgtctgattttatttttattttttaatttttatttccataggttattggggaacaggtggtatttggttacatgattaagttctttagtggtgatttgtgagattttggtgcatccatcacctgagcagtatatactgcacacaatttgtagtcttttatcccttgcccccttcctaccctttctccctgagtccccaaagtccactgtgtcattcttatgcctttgcttcctcacagcttagctcccacttatgagtgagaacatatgatgtttagttttccattcctgagttacttaacttagaataatactctccaggccaggcgcggtggctcacgcctgtaatcccagcactttgagaggctgaggcgggcagatcacaagctcaagagattgagaccatcctggccaacatagtgaaaccccgtctctactaaaaatacaaaaattagctgggcatggtggcacrcacctgtagtccctgctacttgggaggctgaggcaggagaatcacttgractgagaggcagaggttgcagtgagccaagatcatgccaccgtactccagccrggtgacagagcaagactccatctccaaaaaaaawaaaaaawaaaaaaaaaaaataatagtctctaatctcatccagcccactgcaaatgccattaattcattcctttttatggctgagtagtattccatcctatgtataaaccacataggatacagtttatccacttgttgattgatgggcatttgggtttgttccatgyttttgcaattgtgaattgtgctgctataaacgtgcatgtgcaagtatcttttctgtataatgacttcttttcctctgggtagatacccagtagtggggttgctggatcaaatggtagttctacttttagttctctaaggaatctccacactgttttccatagtggttgtactagtttacattcccaccagcaatgtagaaatgttccctgttcaccacatccacactgacatctattattttttaatttttttactatgaccaaccttgcaggagtaaggtggtattgcattgtggttttgatttgcatttccttgatcattagtgatgttgagcattttttcatatgtttgtgggccatttgtatatcttcttttgagaattgtctattatgttcttagcccactttttgatgggagtgttttctttgttgttaatttgtttgagtttgttgtagattctggatattagtcctttgtcagatgtatagattgtgaagactttctcctgctctgtgggttgtctgtttactctgctgactgttccttttgccatgcaaaagctctttagtttatttaagtcccagctatttatctttgttttagttgcatttgcttttgggttcttggtcatgaaatccttgcctaggccaatggctagaagggtttttccaatgttatcttctagaatttttatagtttcaggtcttagatttaagttcttgattcatcttgagtttattttgtataaggtgagcgatgaggatccagttttattttcccacatgtggcttgccaattatcccagcaccatttgttgagggaggattccctctttctctatcttgtggaatagtgtcaataggattgataccaattcttctttgaatgtctggtagaattctgctgtgaatctgtctggtcctgaactttttttggttggtaattattttactaccatttcagtctgttcgggatatctcgttcttcctgatttaagctaggagggctgtatatttccaggaatttatccatctcctctcggttttctagtttatgtgtgtaaaggtgttcagagtagccttgaatgatcttttgtacttctgtggtgtcagttgtaatatctcccatttcatttctaattgagattatttggattttctctcttctcttctaatggtctatcaattttatcttttcaaagaaccagctttttgtatcatttatattttgtatttttgtttatttctatttcatttagttctgctctgatcttggttatttcctttcttctgctgggtttgggtttggtttgttcttgtttctctagttctttgaggtgggaccttagattatttatttatgctctttcagactttttgatgtaagcatttagggccatgaacttggctcttggcaccacctttgctgtatcccagaggttttgatatgttgtatcactgttgtcattcagttcaaataattttttaatttccatcttgattccatttttgacctaatgatcattcaggagcaagttatttaatttctatgtatttgcatggttttgaaggttccttttggagttgatttccagctttattccactgtggtctgagagagtgcttgatataatttcaattttcttaaatttattgaggctcattttgtggcctatcatatggtctatcttggagaaagttccatgcactaataaatagaatgtatattctgcagctattggataatgttctgtaaatatctgctaagtccatttgttccagggtrtagtttaaatctagtgtttctttgttaactttctgtcttgatgacctgtctagtgctgtcaatggagtattgaaatccccyattattattgtgttgctgtctatctcatttcttaggtctaatagtaatcattttagaaatttgggagctccagtgttacatgcatatatatttaggattgtgatattttcctgttgaacgaggccttttatcaatatataatgtccctctctgtcttttttaactgctgttgctttaaagtttgttttgtctaatataagaatagctactcctgctcacttttggtgtccatttgattggaatgcctttttccacccctttaccttaagtttctgtgagtccttatgtattaggtgggtctcttaaaggcaacagaaagttggttggtgaactctcatccattctgcaattctgtatcttttaagtggagtatttaaggcatttacattcaatgtttgtattgagatgtgaggtactattccagtcatcatgctatttgttgcctgaatacttttgggttttgttttgttttgttttttaattgtatttttgttttataggtcctgtgagatttatgctttaaagaggttctgttttgatgtgtttccaggatttgtttcaagatttggagctccttttatcagttcttgtagtgttggtttggtagtggcgaattctctcagcatgtgtttgtctgaaaaagactgtatcttttcttcataaatgcagcttagtttctctggatacaaaattcttggctgataattgctttgtttgaggaggctgaagatagggccccagtcccttctagtttgtagggtttctgctgagaaatctgctaatctgataggttttcctttataggttacctggtgcttttgcctcacagcccttaagactctttccttcgtctgaacttcaggtaacctgatgacagcgtgcctaggggatgatctttttgtgatgaatttcccaggtgttctttgtgcttcttgtatttggatgtctaggtctctagcaaggctggagaagttttcctcgattattcccccaaatatgttttccaaacttttagaattctcttcttcctcaggaacacgtattattcttaggtttggttgtttaacataatcccagacttcttggaagctttgttcatattttcttatgcttttttctttgtctttgttgattgggttaatttgaaaaccttgtctttgagctttgacgttctttcttctgcttgttcaattctattgctgaggctttccagaacattttgcatttctataagtgcacccattgtttcctggagttttgattgttttttatttatgctatctatttcattgaaaacttctccccttatttcttgtatctttttttttttttttgtgacttccttaaattgggcttcgcctttctttgttgcctccctgattagcttaataaataactatctgaattctttttcaggtaaatcagggatttcttcttgatttggatccattgttggtgagctcatgtgatttttggggggtgttaaagaatcttgttttttcatattatcagagttggctttctggtttcttcttattggggtaggctctgtcagagggaaggtctagggctgaaggctgttgttcagattcttttgtcccacgggatgttcccttgatgtagtagctcccccttttcctagggatgtggcttcctgagagccgagctgtagtgattgttatctgtcttctggatctagccacccagcaagtctaccaggctccaggctgctactgagggttgtccgcacagagtcctgtgatgtgaaccatctgtgggtctctcagccgtagataccagcacagtatttggggtgtctcccaggtcctgcaggagcaatctgcttccttcacaggatctgtatgctctcccagttttcctgatttattcctgcagtcgttctggagcaaaagttcacaatgcaagcctccacatgctgttttgtccatccgagtgggagctgcaatctagtcctgcttcccatccaccatgatctctaaaattatctttcttttcaccttcgatttttcttgaggttatgtgttgtgtttgttcatgcttgtgttccttctaatttggttttcatttctgaaatgatttacttctttcttctgattctttcctatattccttcacctcatttccaaagttttctagcctcagttcatgttggttgttctttygtgtcttgatgtrattttcttgtcatcttttaccttgttttgaaattgtaagttacagtttgggtctggtttttaatgttgtttgttttgttttgttttgttttgtttttgagacagagtttcactcttgttgcccaggctggagtgaaatgacacagtcttggctcactgcaatctccgcctccctggttcaagcgattctccttcctcagccctccaagtagctggaattrcaggcacacaccatcatgcccgtctattttttgcatttttagtagagacggggttttgccatgttggccaggctggtctggaactcctcacctcaagtgatccacccaccttggcctcctaaaatgctgggattacaggtgtgagccaccgcacctggcccagtttgggtctgttttgtgggcatgtctttctggtatgcttttgttgtctatagggatattattctacttyttattattttttctatttttttcttttttttcttagacagaggctggagtactgtgttgctatcacggctcactgcagcctcgacctcccaggctcaagcgtttctcctgcctcagcctcccaagtagctgggactacaggtgtgcaccaccatacccagctaattttgttttttattttttcgtagagatagggtctcactatgttgcgtagcctggtatagaacttctgggctcaagcagtcctcccacatcagcctcccaaagtgctggggttacaagcatgagccaccacacccagcctcttttcttttaacaactttttatgggatttgacctcagtgttyttgtcagaattttatttttatgtgaagttagttttctgaacttttggaagaaggcccagttaggaatatagcttcttttccttcacagtgtaccttttgcttccttgtgtatcgtgttcaaagataaggtagcttgcttcctggctggctccatccccttcccctgtttttatcagggcctcctcatctttcatcacacggctcccaggggctggactctccatgcccttcattccttattgcagcatcccatgtactcacctactattgacattgcagcatcccatgtactcacctactattgatagggcaaggccctcccacttacagctgctgttctcagaggaacagctgtggactatttggggttctctgttattgggtataccacacggcccgttgctgccccctgcttcctctcacacaggtgctgatatgacggtcaggtcttgtcaacacaggtggtatattcttacccacttgtaatttgtggtttgtggagataccttgttgtaaatgtttgttgtaattgtcttgtgaatgtctctgagatttggggtttgctgtctaattgctgttttcatgaggatattgagggagactcacaaactcatcttcccagaatctccagtcagatttatgtaataagctaattgttaatggaatccagaaattaaaataattcaggatatgtcttatccaaagggaatctctatggaaagagcatgagtgtccagatcaggtagctgtgggtttgcatgcgggttctgttactagctgtggccttggctgcattcttctctgctatgcctccctttcttcatcatccccctgggaaatcacctatggaaaggctttgcactgctgccctgcacctagtaggtgctcattaaatgccccttttcactttcccacccttgattctacaggtgmatcaagtaacttttttcttggcatctcctttgatttttctcagggcagaaattcaggtttttttatttgcttctttattagtttgaacagaccgtggcattgaaatgcatgctctggccaggcccggtggctcacaactgtaatccaaacactttgggaggctgaggtgggcggatcacttgaggccaggagttcgagaccagcctggctaacatggtgaaaaccgtctctactaaaactacaaaaattagccaggcacgcacctgtaatcccagctactcggaaggcttaggcaggagaatcacttgaatctgggagacagaggttgcaatgagtggagattatgccaatgcactccagcctgggtgacagagcaagactgtcttaaaaaaaaaaaagaaagaaagaaacttatactctaagaattttgtttgtttgtttgtttttttgagacagggtcttgttctgttccccaggctggagtgcagtggcgcaaccttggctcaytgcaacctccacctcctgggctcaagtgatcctctcaactctgcctcccaaagcgctgagattacaggcatgagccaccatgtccggtagaaattttattgtaatgatctttaacaacccattaatattaacgtgactttagcactaataagaattatatttaaacttcaaatatattcttagtctgtccccagtgtcagcttaatttttcttccattactttttgggttaagtatctatttatttctcttttctttttttttttttttttttcagtttggtaaattgttggcacatgtttgctgtttctctttatagcttgcaagccaggctgggattccttcaggtgtatacaatgttattccctgttctcgaaagaatgccaaggaagtagrggaggcaatttgtactgatcctctggtgtccaaaatttcctttactggttcaacaactacaggaaaggtatgtgactcaagtttcaaagaaaacaaatgtctttctaatattttatcttgataggttataaaaatactatttcatcctgatcaccaattttggaaagatttccagcagagtgttaaaagctctgtcgcaggccaagcacggcggctcatgcctgtaattccagcactttgggatgctgaggtgggcagatcacttgaggccaggagttcgagaccagcctggccaacatgatgaaaccccctcacagaaaatacaacaattaaccaggcatggtggtgcacacccgtaatcccaggtacccaggtgactgaggcatgagaatcacttgaacccgggaggcgaaggttgcagtgagccaagattgtgccactgcactccagactgggtgacagagcagactctgtttcaaaaaaaaggtctgttggttgaataaagtaatatctgaccatcctctggggatattttggacagttctttgtggcacgacataggttcctgcttgacaaaaccaaagaaattggggcagcgagggtcccattatttttgcattatttgttgtatatgaagtgggtgaaagttctccactgtatttttttcaattctggaatgcatctttctttcaataatctagagttagagattccagaaacacacaattaatgttgaaatggatgtttttgaattgaacaaaaatgtgtttagtctaaaagtacttagagaaatggaaaggtctttttctttgagttttttttcccttaaatgatgaaatgttctttgctaaaaacttaatgtgtatgcctgtaagtagatgtttatttatccttttaaatgtccaaaagagggccgggcgcggtggctcacacctgtaatcccaacactttgggaggccgaggcaggcggatcacaaggtcaggagatcaagaccatcctggctaacacggtgaaaccccaactctactaaaaatacaaaaaattagctgggcgtggtggcgggcgcctgtagtcccacctacttaggaggctgaggcaggagaatggtgtgaacccaggaggcggagcttgcagtgaggtgagccgagatcacaccactgcactccagcctgggcgacagagtgagactctgtctcaaaaaaaaaaaaaaaamaaaattaaaaattaaaaaaaataaataataaaaaaatgtccaaaagagaaaaaatcaaggtggaacaaaatttttgtttatggtgtttctcttcagatggtgtgcttttttctactagtttatatctagatatacacatatatgtatctgtactcacattgttcatgtccataaacacataacagataaaatatataaatctgcccaggcgtggtggctcacacctgtaatcctcacactttgagaggccaaggcaggaggatcacttgagcccaacctagacaacmtggtgaaaccctgtctctacaaaaaaaaaaattagctgggcttagtggcacacacatgtagtcccagctacttgggagggtgaggtgagaggatcacctgagcctgggaggttgaggctgcagtgagttgtgatcatgtcactgcactctagcctgggcaataggtgtgagaccctgcctcaaaaaataataaaaataaaaaagtctaatttcaaagattttgtgcatctatggtcattttagaaaccatgagaagcaggagggaataatttaactttttttttttgagacagttgccctgttgcccaggctggagtgcagtggcgtgatcttggctaactgtaacctctgcttcctgggttcaagtgattctcgtgctcagattcttgagtagctaggattacaggcatgtgccactacgcctggctaatttttgtattttctgtagagatggggtttcgccatgttggccaggctgatccggaactcctggcctcaagtgatcctccctccttggcctcccaaagtgctgggattataggtgtgagccagcgtgcccagctggaataatgtacttttaatgtctcccaaccataatcacttttgtcatgctataaactcatactcagggagtagtgctgtggaatcctaccattcattcataatagaaataggaatttttagatccataaactgctatgcccctgatcagtgggtcttacaatgcaaacttatccgcagaaagattcaaatgttactacgaagtagttagaaagaaagagggaagcctgggagaaagcgttgtamatccttctcattcaagccagagaaatttccaggatactgggcgaagggcagcaactcagttttctcagcaaactatcctcatctaacagggctccaggaaaatatcagccatgaccctgccaagtccagctttgctcctcttgacccaggacagtgatgcacctctagtgactgaacaggaaatgtgacaagtatagctgaagggataactgatgcataactaagcaagcacctctgctgagctggtcttcagagattaggggctgagcttctggtcctggggtggagaaccttgcctcataactgaggcatacacagcgagcctgttctaggcatgcctgccctgcccttgccactttctaggggggccacccctcccaggaccccgctgagaggacagcagccatgttgtaaagcatatgatacctcatctcttcctctgttcagaaaactgaatcatgagtggtcattgacttgagcgaaacagaaattgtgggctggccagtgacctaggacaagtagcctggcatagaagggtgggctrggtcagggccttttcctctaggaattcccctctccttcactagagaagagagagagctgttttgctttctgtttctttctctttcttttgcctattaaacttctgctcctaaactcaaaaaaagaaaaagaaagaaaggtaggctgggccaatcacatgctgtctttggaagctgaggccctgaggaggtcagcccatgggaactggagctgggaaaagattcattaagacatgacaggagtttacactatacccagtggccagggcaagccgccttcctggagaagcagagactgagtggggagaggacactgtcagaggacacagagccagtgcaggtggagggacagacaccagagacaggacctgtgctcaaggccaggtggaggcaaaatggagtgacccaacagtgagaatcatttttgcactgaagcaaatccaggaaaagtcaatgacgtttcttaaaaatttttaaataaaaacataaaaaaagtktaaatagttatgttgcgtccgataaagaaatatgtttagtcttaaaacttgaactactttgttgaacagtaatgtttcagagaagattgttactaccatttgattgctggaatattaacatacagacacatacacagtacccacacaggcctagctttccagccattctgtgtttttaccaagaaccgtgtcacaaaactcatgacctcagaatgtacaacacttggggggcaatcctagagccaccttgggcttgcgaacaccgtctgtttcactcgaactatctcaagtgtggtcccatctttcctgcagccatgactagacaaagacctactatccttaataaagcatttaaacatccctaagcagcttcttaggctatgaaatctcttactggatatttaaactataatagctataggtaccaaaagccttatgattatacattgagctagcaattctacatgttcatcctgacagaatcatcacagtgtttttgtcttttgttttgttttgtttttgagatggagtctcgctctgtagcccaggctggagtgcagtggcgcgatccacagcgtttttttaatggcaaggatggaaacaacctaaatgtccaacagatggggcctgaataaataaattacagaagagccatgcagtggaatactatgcaagcatctaaaggaatgttctaggccgggcacagtggctcacacctgtaatcccagcactttgggaggctgaggcagacagatcacttgaggtcaggagttcaagaccagcctggccaacatgacgaaaccccatctctactaaaaatacaaaaattagccaggtgtggtggcacatgtctgtaatgccagctactcaagaggctgaggctgaagaattgcttgaacccagaaggtggaggttgcagtaactggagattgcgccactgcactacagcctgggcaacagagcgagactccatctcaataataataataaataaagttctagaaacatatgtgctgacacaagaggatcttcacattagagtgttacattaaaggagcaagatataaagkgttatgaaaattttaagatagacgtcccaaatatgtgattcattgggaagataaagcaggttacgaaacggtataattatataattataccatcctgtttttttttttttaaatgtacatgtacctgaatctgcatggctacattctaaatggatgtactttaaaatgttatcagtgtaagctgtgggttgtgggattctaggtgattttattttcttatctctatgatttttaagcccatcatataattgttttgaatagataaacacttacttatatggttgaaaaattaagacagtattaatgtttaccatgacaagtctcaccctcaccccaaccctgactcactccctctttctataaataatgacttttagtgtcttgtcatcccagtgtttattttactaatttatttatttatttaatttttgaaatggagtctccctatgctgcccaggctggtctggaacccctggcctcaagtaatcctcccacttcagcctcttaaggtgctgggactacaggtgcacactaccacacccagcctcttcccaatgtttctttatcaaatacaagcaaatgtaaatatatattcttatttctccgttttcttatgcaaagttatcccatgtacaccactgtgcaccttgcttttttcaccatttggtaatttttttaaacaaaggcttaacaatcctggtaatggatttctgtgctcacagctttctctcctctgctcacagatcctgttgcaccacgcagcaaactctgtgaaaagggtctctatggagctgggcggccttgctccatttatagtatttgacagtgccaacgtggaccaggctgtagcaggggccatggcatctaaatttaggaacactggacaggtgagtcytggagagtatttcaggatgtgtgtttgcgtgtgcatgtgtgagtgtgtgtatgtgtgtgtgtgtgatatrtgtgcatgtgagtgtgtgtgtgtgygcgygtgtgtgtgttacaaagatcccaccacctctactgccttatatcccataaggaaacttttgggttccttccattattcattctttattcattgactctttcagcaaatatttagtatatgccttactttttattaccagggttatactaggctcagaggggcccccccaaaataaggtacagtccctggcttcaaataattttctgaacagcagatgtcctttagtcaaattgttctctgttttcttctttcccctatccttttaatctggttatttttatagttttctttcattgatcttttttctactgaacggatataatctcctcagacacagaacagccttgaacaattggggtctctgaggccaagggaaagaaagtaagaaaatgttgaggagggtggtggctggaataactcaaaaccctgttgcctgctatgacccagtggggcctcgctgtcccgagatggagggagcctcagaggtgccctctacagggcacaggcccacgccagcagtgttttagaggagcatccaggctgtcctgggagaccagaggcctgagctcatgtcttcctaggaaatcctggaatatttgatctgtcagggaccttcacagttatcagctctacaaacgttgcattttagagatgaggaaatgaaactctagaaagaaaaagtgacttagagatcagacgtctttgggccacagtgtcaaatctgctgaggagctgggactctgagccaaggctcctgtcttccagttctatccaagctgctgccagggtcctgccttcttaaatattcttaagcattcatcttaaaagtaccatcaatatgtaattttaaatgcattctagaaacagagtaaatatccctgaaaggttatattgtgaaaaaactgaaatgtgtgatattctctatcaaataattttcatccttgccttggcctttggtaattaagtttttcccttccacataacctaaataagcttggttttgtctgaaataagtatattttccytcataaatacaaaatgtcaatatatgttaccatcaattacactgtaaggctacaacttggggacaggtatggtggctcagaactgtaatcccagcattttgggaggccaaagcaggaggatcacttgagcccaggagttggagaccagcctgggcaacagagtgagactctgtctctacaatttttttttttttttttttttttkkgkgtgacagagtctcactctgttgcccaggctgaagtgtagtggcatgatgtcagctcactgcaacctccacctcccggattcaagagattctcctgcctcagcctcctgagtagctgggactacagctaatttttctatttttagtagagatgggtttcactatgttggccaggctagtctcgaactcctgaccttaggtgatccacccacctcagcctcccaaagtgctggggttacaggcatgagccactgcgcccagccaaaaaaaattaaaaattagctgggcatggtggcaagtgcctatagtcccacctacttgggaggctgaggtggaagaatcacttgagccctggaggtcaaggctgcagtgaactcrtcactactgcactccagcctgggcgacagagcgagaccctgtgtcagcaaaacaaaagactataagttggtgttggaccacattcctcttagcctctgctgttgctgcagcatcacagtctcctaggagaattgcactctttccccaccccccagggaaacaaaataaaagccatttgaaaaaaacatggattgggtggcttttttttcttttctttcgtgtgtgtgtgtgtgtgtgtgtgtgtacaggtgcttattgccaactaatcactgatgcatagcagctgtgtagcatagcagctgtggmgggaactggaggggaacatgcactgactcagtgcttttatctttggggccaagcccacgtgaggaggaaaatggcagtttgagcacatgacaaccaccgagggaagtgttttcacagagaggcggtagcagccacacgttcactggtcaggtctgcagcttctgacagactgtgtgggtttgtttttgtctcctgtccagacttgtgtttgctcaaaccaattcttggtgcaaaggggcatccatgatgcctttgtaaaagcattcgccgaggccatgaagaagaacctgcgcgtaggtaatggatttgaggaaggaactactcagggcccattaattaatgaaaaagcggtagaaaaggtaagtatattgtattatttgtgaaagtaaatttcatggtttcaatatgaaaagcttaatcagcaaaaaacactttggctggaggggtggggatagagaggggtgggttgacagaatattacagctagacagaaggaataagctctggtgttctacagcactgtagaatgactgtaattagcaacaatgtattgtatattttcaaatagctattattagaagagtagattttgaacgttcccagtataaagaaatgatcaatgtttgaggcgatagatgtgctaactatcctgattagagtatagagtatgagagatctacatctatacatggaatcgaatggaattttcaatgatgttttcatacaaaaaccacaaaggttaaaataagtaaaaaattaataatagctaaaaaaaatgatgttaaaaggcaaaaaaaaaaaatgaaaacaaaaaagtcattttggtaaagtgcccagcaagcctattttgtaaacaatggagaaacctgagaaaagtgaattctgcctaccagttatatgaatcgggttgttgtctggtcatragctgctatagccctgccattgcaccaagtccccatgcggtctgtcactgtagctctttactgtcctccctaaattttgttatagtgatgataattctatccctcactgcctcagcaattaggatcttgagacaaagttcattcatcttttggaacacctatggaatggaagactggcttggttttgagatggtttgcgtttcggctgtaatgctgatgttgtcctgttctttcttctcttgatgacaaaatccctgtctaaaacagtccttcatgaaagtatcccagccgggggtgcagaatcacagatgccgcgttcaggatttagagatattgaggggaaactgcttttaggaaagatttgtttgtttaaaaaaatgttataatccatactactagctatatgagacttctctccttattctactgttttaaaaaaatccattttggagtcacaagaaagtttcttgtaatatcaaacatccagttttttgtgtttttttttttttttttgagacggcgtctcgctctgttgcccaggctagagtatagtggtgagtcttgactcactgcaacctccgccccactgagttcaattgattctcctgcctcagcctcccgagtagctggggttacaggcacccaccaccacgcctggctactttttgtatttttagtagtgctggggtttcacatgttggccagactgctctcgaactcctgacctcaggtgatccacctgcctcggcctcccaaagtgctgggattacaggcgtgagccaccatgcctacccagaaatggttttaacggaatattttaaatcaggaagacagtagaagctgaagattgtgtgtgggaaagaagggaggagaggtggtcagagggagacacacagtggaggcacagccagcccctggatgcaactgaagaaccagaagcaagtgacagccaagtcagtactcatcatgggaagcacagccccacygctgttcctcaacctcctcagagcctgagaaccaagccctgactccatggctgcctccaccccgtgggcagtcaactcagctgaacccacatccattgccttgggaaacccagggaagcctcgaggtttgacagagctctgataaatttctagttactgtcttgggattactctagataaagaaaatacattaaaatttacattggaaccacctgcattttagaggtgactttggaccttggggacaaggcaggggtattcacttgtctagtgaaggcaatttgggtctaggccagctgtggttcaagtcctagagtggtggtccttaactcacaccgtgcctttatcgactacagttgcctgggacccatccaagaagactaggtgttaatttatgtgtagtcagcctaggcattggcattttctaagtgccccagtatgatgctagtttgcagccagtctgggaaaccactctgtcttgaagatttttttccccaaagggaagacgcagacattgtcctccagatggtgctgtacgccaggacttcaaacaagcagacagcgagatttcttttttgctggagagaaatttggtggaaaccaccttgtttaaaaacacttcattgtgttggctttagtgtacatactgtcatagagtgggttctaggaaaaaaacactgcatctcacattaatatgacaagaaaagggcagagcagattatatttggggaggaagggggtatttttgttaagtagaattatttttataatataaaattcatagaaagtaagccatcctagccgatggggattagttgcaggtgatgcactatgagagcattgcaggaggggcatggatttcaaaagagtcagtctcaaagacagaatgcactcacacctatatttaccttcctgaaaccctatagaaaattcagctgagggccgggcacagtggctcacgcctataatcccagcatttgggaagctgaggcgggtgggtcacttgaggtcaggagtttgagaccagcctgaccaacacagtgaaaccctatctctaaaaaaaaaaaaaaagaaaagaaaaattagccaggtgtggtggcaagcacctgtagtcccagctactcaggaggcgggggcaagagaatctcttgaacccacgaggcggaggttgcagtgagcagagatcgcaccagtgcaccccagcccagcctgagcaacaaaacagaagtcaaaacagaagtcaaaatagatgggtctacccaggggaaccctgcagaggaaattggtgccattttaaacgacagagcctttctagaattggtggctacagaaagtaggaataggaggaggggaggagatgaagctggttgattctacttctgcacaattttctgggtcattcccaccatcccttctcaccacgaccaccaccaagacacatgagacagcagaggcatttgttctgggcaggacagcttttctgaagaaatatagtaggtatctaggcagactacagcttcaagagcgaggctaggtacmtcagggtagggctctctcgactttgccttttggggaagggagctgcccttatgtgaagcctgcaagttagaataaacccaagcttaaaacagcaaagaccactcatgccacacatccccaaattgatcaacccagtccttgtgtgtgtgtgtgtcccccaaacacactgctggagctgagaaggagctgaccaggttagtttcgacaactcagtccttcattcagaaagatgaacaaccaaggatcatgatgggaaaaccaccagcacataagaggaaaggtcaggaagaacaaacagaatagtccctgaaggaagcagataaattagggaactggaaggaaattttctaaaaatctcatagtgtcctgcaagagttttgggaagatagtacatctgtaaactgttaataagaagtatgttctaggcttaaagtataataataataaaaaaagaagtatgttctaggaaatgaagcaatgaaaacaaagagtctgtagaaattagacayatgactgtcacaagattcggtacctgaagtagatgataaaatttcggagatcttatggagtttaaagcaaactatagagaggcaaaaaatataatagaaatgcaaaaaaaaatcagaactaatctgaactcctgttaatacccgtccagtagtaggagttctggagtgaaataattgggaaaatggaggaagtgacattaccaagtaaataatagatggaaacttctcagagttaggrgaaaataattattctgcagattgaaagatttcactgcttaccaagtaggatgaatgaaaagggaatatatatatatcttctctatatatatatattctatatatatatatcttctatatatatattctatatatatatatctactatatatattctatatatatctactatatattctatatatatatctactatatatatatatatatagtattgctaaaattttagaatatcagagcatagaagatcctaggagatttcagagaggaaaaagctatcaagaagaaaaagggtgagaaccatttttggctcaaacttcctcaacaacaccggaagtggagaagtgcactcaaagttctgaaagttattttgtatcagaattctgtactcaagcaaattatcaatcaggtggagtacaaaacaccagaaacttggtgtatgaaaattcagaaactagaccacatccagtgcatcttttttaaaacaactacttggccaggcctcgtggctcactcctgtaatcccagcactttgggaggccaaggcgggtgaatcacgaggtcaggagttcgagaccagcctggccaagatgatgaaaccctgtctcttctaaaaatacaaaaattagccgggcgcggtggtgggtgcctataatcctagctactcgggaggctgaggcaggagaatcgcttgaacctgggaggcagaggttgcagtgagccaaggtcatgccactgcactccagcctgggtgacagagcgagaytccatctcaaaaacaaataaataaataacaactacttgagawtatgtgtgtcagaaagcaacaaaaactcagttcaggaaataggacaacatgggatccaagaagctagaaataaccgcagaatgcaatgaaagcaaatccaagcaaacggctgagccgcaggcctagaaagaagcgaatatatattagaccattcaacaaataggaagatcaaacagctagaagatatcaaagaccaaggaggaaggtggcactcttgcttctgaatctctgcaaatgtggttccttctrcaaaaggaaaycagcatgctttattgttaacctactttttttgaaaaagaaaaaaaatggaactagttatagttttctgcagtttaaacattctaaaagattgtatcatgtggaaagctttttttcttcctcattacacaggtggagaaacaggtgaatgatgccgtttctaaaggtgccaccgttgtgacagrtggaaaaygacaccaacttggaaaaaatttctttgagcctaccctgctgtgcaatgtcacccaggacatgctgtgcactcatgaagagactttcgggcctctggcaccagttatcaagtaagatcctccagccagcggggagatgggaggaagaatagaagagaacataggaaaccctgaaagagattcctgggctgctttgaggtctggccaggaggcagacagttgtgttgagtccattgaagagcagagtgcaatttatgggtttttaaaaaaatcataacttatttggaccataaaatttatcaaattctattttttttttctttttgagatggagtttcactgtgttgcccaggctgcagtgcaatggtgcgatcttggctcactgcaacctctgcctccttggttaaagcaattctcctgcctcagcctccagagtagctaggactacaggcacccaccaccataccaggctaattttttgtatttttagtagagatggggtttcaccatgttggccaggctggtctcgaactcctgacctcaggtagtcctgcgttggccttccaaagtgctgggattatgggagtgaaccaccatgcctggcctcaaattctttaatttactttttcttactttctgctgaactcttttttttttttttcttgagatggaggatggagtcttgctctgtcacccaggctggagtgcagtggcatgatctcagcgattctcgtgcttcagccttccgagtagctgggactacaggcacgcgcaccatgcctggctaattttttgtaatctagtagagatgtggtttcaccatgttggccaggctgttcttgaactcctgacctcaagtgatccgcctgcctctgcctcccaaagtgctgagatcacaggcatgaaccaccgtgctcagacctgaactcattttccttcttaatgtattatacctcaaaggattctttcattggcctccataggacatgaactttctgtgtcgttttgtggtcttttatctcccattcacaagtagataataatttacctggataaaattttaggttcaaccctttggagatattactcctttatccactttttttttcttttttttgttttttgttttgatatggagtctaactccgtcatccaggctggagtgcagtggtatgatctcggctcactgcaacctccacctcctgggttcaagcgattctcttgcctcagcctcccgagtagctgggactacaggcatgtgccaccacacctggctaatttttatacttttaatagagacagggtttcaccatgttggccaggctggcctcaaactccttacctcaagtgatccaacagcctcagcctcccaaagtgctgggattacaggtgtgagtcaccacgcccggcctctttatctacttttatccagggttattgccaagaaatctgattcttgcttctttgaaagaaatctattttttctctttggaaacatttagaatttctcttgatctttgatgttcttaaattttactatctggtatggcacacagtgaggtttttcagttgaggtcctaatatctttaatacggtttttttgttttggtttgggtttttttttttttttttttttttgatggagtctcgctctgtcacccaagctggagtgcagtgktgcgatctcagctcagtttaacctctgcctcttgggttcaagcgattctcctgactcagcctcctgagtagctgggattacaggcgcccgccaccaggccctgctaatttttgtagttttagtagagacagggtttcgccatgttggccaggatggtctcgaactcctgacctcaagtgatccacccgcctcagcatcccaaagggctgggattacaggcgtgagccaccatgcccagctcattaatatctaacaggtttgtttagtcctggaaaattttttgtcattatttttccagatattcttcttcctttcatttatgcttttctagccttccaagtagtctattattgtgatacttctacttctgtgccctasttctcttgtctcttcattccatctcttcattcctgattcattcctgatgccttctgcgagtccctcccctcatctgccagcatattaatgcattcttcagatatactcattctggcttccatcccacccaccaagatctttatctcaacaattgtttttcccatccctgatatctccagtgggttcttccccataactgattcttcctgcttcattattctcccctactttgctgtggctatttttcctttttaaaaaaaacatttttattctcttccaccatttctgtctcccgtggtataggttgtgctgctttatctttcttagtctcrgagctcctcagacatcttgtaattttccctgtgagctcatctttaaccccttgcaccgtcggcagccttggcttgtaatatctcccatgggttgtggtaaaaagcttaggccttggtttgtgctcctcatacatttggagggcaaagggttgagcctcactgaggatggctctagtgttaaaatccagtctcagtgccactccyccaccccaagtatcctttccgctggggtattttgcagttccctctattggaataggttggrgagaagaggctgctggtgttgccattgcctacacttgtttcccatggctggtgtacctgctgggcacgagcactggctcactgccccaagccagccctgctgcttttctacctgtagcaatgtcgcattgatccagggacccaggtttgtaggcaggatcacctggaactcacaggcgtggtaggagacgtgcagccctgcccttgccctgcccactcctgcatgggtggtctcgagctcgctctcacgtgaggccatcattctcccccaggatccaaccaatttattggcctccagaaatgtcttgcatttttggtgctagtttccgattgaggttttgttgctgttgttgttggttttgactatgattctctttctctgtcctctggcatgtccagcattgggttcacagagacagctggcagctggtgctatctgtaccgtcttatccaggaccagaaatctttcttattatgtacttcacwggccttgttacatcttgcttatgaagtttakttttattccactgttggggaaatggacccttgaagaactttcatcttctttgttttaataaaaactttttacataaaatgtgaactggacattttcacaggaaaccaacggaaggcattggttgagaatgcaggctttgcagttgactatgatgtagctctagactttgctacttcataactgtgtacccttggacaaattgacttttcggagctggctctacccagtccccctttgcaagccctgcagagagacagctggttccaactgctggtagatctctgaatttagaaattggggtgcttagaactttttgccccagttacaattctggaacaacagaaaaatatcactgacatcttattcctgaaataaaattttaaagctagaagagatggcctgggctttggtgcattccttcatttcagagaggaggagactccaagcatcgtgccattgttaagcagtggtggaggacacattagaacctggccccaaccccttctgaacgttttctttctgctacatcaggcttgcttctaaagtagttgttatgattgttatatattcccagtgggtaccaagaatagtaatcctttttttttaaagggattttgtttgatattctggatatgccacagttccctacatgttggtctgcttttttcttgttctcttaggagagatgaagccagtattgatttgagcatgctagccttaatcgctgagttatatcggggaatgstgctgctttcttctgcaatctgctcttggatctctttgcaaaactctgatttactccttgtgattatttgggaaacaaatcagaagaaaacaaaactggtttcctttcctctcccccttacattttttatgacctatcttaactttggcaggttcgatacagaggaggaggctatagcaatcgctaacgcagctgaygttgggttagcaggtaggtrtttgtccttgttcaataccagtcataatcatttttctccagctcatgccagatttacccttttaaacatcaccctgggttttgagacagaaacttcaatgaggtrtgtgttttgttgctttccaagtggtggaatggatttggatttgtgcaagtatgtgtacttttcccttgtccccatgatacacatttgggagctctctaattacagctgtgggaagaagagaaggtgcacattattctacttttctaggtggagaactgcacacatctcaaagtcccacattctcagaggcttaatccccagaaattccaaatgctttttcttcccttttgcgtggctcctgtaagcctgaacagaagaggaagggcatcagcaaggagtgtcagggacaatgaaaggagtgaagatggtgtgtgcagaggtgcctctctgatggctgacattcctttagtttggagatgggccaggtggtcactgcatgtactctataaccctgagaaaattatgtaatagcatccacagcaaatgaagtactgcagaagatacaaagacatacaagatgccactatagctctatagaagcttcccctctagctgtaagagaactatttataccaagaggaatgataagcatgctatgaggtcccttagagttatcrtaaagctggagtaagatgtgtgcacaaggacgtttataacactgagttcagcatttgtctcttccttctcgatggggtratgktggaggaagacgtaccctgaactaggtcataaatgatgggcagaattctggttgtgcagaagctggaggagagagattctgggcagagggcaccaagggagttgagaagcaaagtaagaaagggtgaggagaatttggctgacaggtttggagaggatggttggtgattggagtaatggaagatgaagccagaaatgttgattgaaactacttgkggggragagggtgttgaatacccactaatgaatttaaccttattttataatcaggagtcrtcgaaaggcttgggcaaaaatgtcgtgtggaaatctaacaggtgtgcaggtggattgaatagtagaaaacagsaagagggtctcgataggagatagtgagagtagaattgaagcaagaggtgwctttcaaaggttttgagatgaaaaagtggacaagaccaacctgggactttatctgggagcagggaagactccaggcccaagtggctggacaaaaagtcatcaatggtgccctcatctttaggcatgatgtctttaatgactcttctaaatgccatatatgtccttttatcctgtgacaggttatttttmctctcaagacccagcccagatctggagagtggcagagcagctggaagwgggcatggttggcgtcaacgaaggattaatttcctctgtggagtgcccttttggtggagtgaagcagtccggccttgggcgagaggggtccaagtatggcattgatgagtatctggaactcaagtatgtgtgttacgggggcttgtaggattctttggttctttaaaaaaatttaaaaggagacttatctacatatataggtacatgccatccattattttaaataaactaataggttttcagaattatgaatttttcagaactcatccagtccttgtaatcttaaacagatgcaaatcctacccctgcccttaatgtaactagggaccaatatgtgccacgtgcctgtggctgcagactcccagagaaccagcactgggtttacagaatgaggccctggmtccccaccacagccccagctgcctcagagcaggcacagcacaaggcaggcccagccccatgggccgtcacaaaggcttgatcactgcctgggcagtggcacaaccatcccccatgtcgctacagaacatgggcccagagcaccttgaaggagacccttgactgtgactggcaggcaggtgaggggcacagcacccctccccggcatctgccagctcagcacagaagacaccgaatgtgcatctggaggtgttgcggcagaggtttgagtgaaccctctttcaaagacaataaatagcacagaattgtccgtgcttctgtgaggcacgaaggagcacctctccctattcctgaaccatattttaattgatgcctttattgtcccaaatttaccacttaaagaattctattttcatttctgtcctgtttgccacttcatttcatttccttgagtaaatgagctgaagtgtaaagcaaagaatagcagaagcagcttggtaggatggaaggcacgcagtggcatggcctggctccttccctgagtggccttgttgccttgggcgtgtgttcagcacctcccatcccatggatacagtggagattccatacaggccttacttagctccttgcgatactgtgagccagagagaaagtaaaagcacttcacaaaaaaatgaaaattctaaggacatacaagagccattgttacgagcagcaccgcccagcccttccttgcctactgtcagtggctttgccaagatgggaggaggccagtgcccacttgcccaccgacctgagcctgagtaagtggctgtcacctgagcctgttctttctgtcctggtgtggtgctgctccctcacctccaaaagagcaaaagtactttcaccacagtcaacccaaaagggaaagaatttctgtaattgccaacccactttgtagaagaggcatgagcccttgaatttcaggcaccttttatctaatgagagtttttacagctcatcattcaaataacgcacaaaaaacaaaagccgctatgaccggcgttgcctctcactttgaaagaaagactccgtaatcttaaacagatgcaaatccaattaggcggccaagtaggtggagacgaagcaccttcctttccccatctctgtctgtgtagactccacttacatcttgtggttattctgggttgtggaaggaaaatgtgaatgaaagtagtgctggatgcaattactcctgaaccccacctaggatttaacatccctcattgagccactgggaagctatggttgagtaactaaaggtctggcaagaccctgggcacacagggagctgcctagcatctggcctggagtgtactagccacattcccaaggtcccaaggagaaggaagagctgaaattcatctcctagtgacagtgccccggccctgtcaagaatcacatactcagcattttgacagttaatgtcttctctttatttgtgtagtttttaggtggttttatataacattttaattacttgtgatttagatgtatccatcctttttctattaagaatacaaatgctgggctgggcacagtggctcacrcctgtaatcccaacaccttgggaggccaaggcaggcagatcacgacatcaggagatcgagaccatcctggctaacacggtgaaaccccgtctctactaaaaatacaaaaaaaattagtcggatgtggtggcaggtgcctgtagtcccagctactctggaggctgaggcaggagaatggcgtgaacccaggaggcggagcttgcagtgagcagagatcaygccactgcactccagcctggatgacagagcgagactccgcctcaaaaaaagaatayaaatgctccaacattattttttataactctggattaccgatgctgagatgtgtgcaggaatacttccaaataaatttttaacattgtaagccagtagattctttggctgggtggcaaattttgagtcttcttgcatatttggctcatgggttcataaattgaggccagagactcattgtatatccttgatcaattttctaattaaaggaaatagcttattgtttagtaaaatggcccttggttgtgggaagaaagagaattatttttaactgaacgtttttgttgttttttaaataaagtagccatatgtaacgggattttaaaaatatatacattttacaacatggactagaaaaggaccattagatcaggggttggcaaactatggcccacgaatcaaacctggcctgccacctgtttttatacaacctgtgagctaagaatggtttatatgttttcaaatgattgggcagaaaatcaaaagaagaacaatatttcatgacacctgaaaattctatgaaattcagatttcagtgtccataaacaaaatgttattagagcatagccacacccattcatttatggtattgtctgggactgctttcttggcagagttgaatagttgggacagggacagtatagcctgcaaarcctaaaagatttactacttgtctccttaaagaaaaagtttgccagctcctgatctagaccaagagggagatattgaccttacttgcatttatccggcattatttcaacacctcctgtgaagaaagtacttttctggcatagctaccgtgagttctcagcaggaacttcccagcgatgataatgtacatgaaattagccacgtaacaagagtctatttgccttgaaaaaacaattatccttgaacttcctccagctatgcagggattctcattaaagagctgatctgcatctgtttatccattttagtagcttttaaatatgattttatgtgaagtgccatttctttattctactaaagagagacagcagaaataaagatcagaagcaaatgtgagcaaatctgttttactgttaacttcaattatgaacttgaaattgtgccacatgactttttcctctaaaaactggatcctagtgttttaattacctgtgtgcagctattttaaatagcattttacttgaataatatgtatgttgtcattgtttcatgctatactttgtgggataaaacttgggaatgagtgtggtaagaaatttataaagttttgcttttaaaacgtggacataactcatttttctagtttttgacaattgtgtgttttagtgtctagtctgcagagagctgtgtgattaataaacgtggaattaacagaatttcctctccctgtattaaggtgtctggttgtgcttttttccccctacttggtgatcttttgagtttttattggatgatattagaccagtttgcatttgtgtaaatagcactccctcccccagagagccgtaatcagtgagtgccttggggaaggagccagcatgtgaaatgatgtgccctaaaacccagagaagggcctgtccatggtgtgcgcttatagaatgtttgctaagctgaactgagaatttacctggtttgcagaggtggcggtcacagaaaggtgtataggccagccgtcacagattggcctatctctctctcctacacgccccactgttatgacttcctgggctcaaacaagcctctcacctctgcctcctgagtagctgggaccacaggcacctgctaccacactcagttaatttttctttcattttttgaacagtcagggtctcactgtgttgcccagactggtctcaaactcctgggttcaagccaccctcccgcctcagcctcccaaagtgctgggattatgggagtgcaccattgtagccagccctcaccataatttagaacacagacaacactgctgcccagtggttagtggacatttttgcaaatgtcgtctcacattttacaatcacgtattgctcgacaacagagatatattctgagaaatgcgtcattaggcggtttcgtccttgtacgaacactgtagagtacttacacaaacctggatggtacagcctcctacacagctaggctatacggtctagcctattgctcctagggctacaaacctgcacagcatgctactgtactgaatactgtaggcagttgtaagacaatggcaagtatttatgtatataaacatagaaaaggtacagtaaaaatcaagtataaaagatttaaaaattacacttgtaaaaggcacttaccgtgaatggagcttgcagaactggaagttgctctgggtgagtcagtgagtgacagtgaatgtgaaggcctaaggtatgactgcacactactctagactttacaaacactctacacttaggctacactacatttattaaataatatttttctttcttcaataataaattacccttagcttactgtaactttttactttataaatttttaaaattttttaactttttgactcttttgtgatcacacttagcacttaaagcacaaactaattgcacaactgtataaaaatatattctttttttatatccttgttccacaagcttttttatattttaaattttttttaaacttttttgttaaaaactaagacacaattacacacattagcctaggcctacaaagggtcagattcatggatatttctatctcccacctcctcatcttgccccgctggaaggtcttcaggggcaataacacgcagggacagctgggcccagtggctcacgcctgtaatcctagcacttcaggagtccagggcaggcggatcgcttgagcccaggaatttaagaccagcctgggcaacacggcgaaaccctgtctctacaaaaaatacaaaaattagccaggtgtggtggcacgtgcctgtcgtcccagctactcaggaggctgaggcaggaggatcgcttgaacccgggaagtcaaggctgcagtgagccgtgaccgcaccactgtactccagcctgggtgacaaggtgagaccctgactcaaaaaagaaaaaaacatggagctaggataacaagacctacctgaggttcttaggagatgtcatgcatcagaaatatgtccatggtggtttgcttgctttcctttttcatcatagatttgcttgtaagcagacagtgcataaagaacattcctctctgttaatgaaacccttttggtgttgaggggcccatgttttcagaatttttaaggcgcttactgaggtctgcaaaaacttctcagctcttcactgtgaattttcatggggattctttttcttctgcagttttttcttccttgcctcttcttgaggtatgtgttcctgttccagttccaacaactcctcattagtcagttcctcaggaaccacctgtaggagctactcaatgtcttcttcttccacccccaggttaaaattgtttgccatctcaaccacagccttgttggtttttgcaacctccttgtccttggcaaatcctttgaaatcacggatgaacctcttgagggtcttcttccagatgtcatttatacgttccttggtaacatcaccccaagcccaagcaagggtcctgatggagtcgtagatgtaatcctttcagaattgcatcagcgtcttctccgtgtcttcctttgttgcagtaataacctgagcaaagctgctcctcctcaggcagtgggccttaaaagctgctgtaactcctttacccattggttggtaatccttaatctcttgtttcaagatcagtcacttgatgtggcctcttactggcaacaatagccgtggattttctatgacaaagggaccgtgatgaacaaagcaacacgagattaattgaagcacaagagaaaataatgcaatcaagaggcacagtaaacaagacacgtttatactgctggtataacccagtatttcttttgttttgttttgttttgtttttgagacagggtctcactctgtaatttaggctggagtgcaccggcaccatcacagctcactgcagccttgacctcctgggctcaagagatcctcctaccccagcctcctgagtagctgagactacaggcattcgccaccacacccagctaacttttaaacatgttttttatagagatggagtctcaccatgttgtccaggctggtctcaaactcctgggctcaagcaatcctccagcctcagcctcccaaagtgctggggttacaggagtgggctactgcacccagccacatactgttttacaataaactgtttttaataagtagaaggagtacactgtaaaataacaatgaaaagtacagtataataaatacgtaaaccagtagcatagtcacttattatatatactgtacataattgtatgtgctatactcttatacaactgagaatgcaggtttgtttacaccagcatcaccacaaacatgattaatgcattgggctgcattggactttatgatggctacgacatcactaggtgacaggaacttttcagctccattatctcatgggtccataaatcatatatgcagtccatcattgacagaaatttcactatgccaggcatgaccgtataagcctatgtgctctcttcctgctgcaataaagtctcagtcctgcaactctgggttcatcatctttaggagaatggaggtgataatactctccatgtaggcttcaaataaaggaagctttgctgcttgctaatctcaactcaacaagagaggctctagggaccaattagttggagaaatggtgactttgtttcttctttttttttttttcctttcttaactttgttcctgattttaatggaaatgcttattttactgttgatatgtggatctggcctttccttctcaacatctttaaacttttaattttgaaataattataaattcataggaagttgcaaagataatgcagagtcccgtgtacccttcacccagtggttcgcttattacctatgtaatacaattatcaaaaccaggaaactgataccagtgcaaaactgttaatccaggccttattccaatttcactcgtttttatgtgcactcatttgtatgtgagtgtttgtacacctctacctaatttgatcacatcaatagttagatttgtgtaggcagcacctgaatcaagatacagaactgtttcatctctacctaggaaatccctggcagtacctcttcataaatgactttgaaagtaacttggcaagattggtagcttttttaaactttcctttcactattatatacatgcaaaaaaaaaggatacataattgaataagtgaatcgctcaatgaattctcagaagaccgagatcaaggtgtcggcaggtttggtttctcctgacgcctctcatcttggcttgtagatggccgccttcttgccatgtcctcccatgatctttcctctgtgcctgcgtgccccagatgtctctctgcaggtcctaatctcttcttctaataagaaaaccagtcgattggattaggacccatcttaatggcctcattttactcattttaacttaattaatcacatctctttaaaggctctatctccaaatacatttcaggtactgggggttagagcttcaacctatgaattttgacataacacgattaatttagtcagctgggcgcagtggctcacgccagtaatcccagcactttggtaggccgaggctggtggatcatttgaggtcagcagtttgagaccggcctggccaacatggcgaaactccatttctactaaaaatacaaaaattagcccgtcatggtggtgggcgcctgtaatcctagctacctgggaggctgaggcaggagaatcgcttgaactggggaggaagaggttgcagtgagccaagatcatgccactgcactccagcctgggtgacagagtgagactccatctcaaaaataataatttagcccacaacactgaaggaatatttttttaaatgcctttattttctggctggtcatggtggcccatgcctgtagtcccagtactttgggaggctgaggcgggcgggtcatttgaggccaggagttcgagactagccttgccaacatggcgaaactccgtcgctactaaaaatataaaaagtagctgagtgtggtaacacacatctgtaatcccagctactcaggaggctgaggcacaagaatcacttgaactgccaggaggcagaggttgtagtaagcgagattgcaccactgcgctccagcctgagcaacagagcaagactgtctgaaaaaaaataaaataaaaattcctttagtttcagtaatggaaagtcatccttgttgaaattataaagattttgttcctttacttagcctagtatttgctctctcagtaaatacacaactcttacaggattgaagatgatccaggagccacgtaattagtttaactacaataccccattcccattctcatacttcaacaagcatttatctcaacaaaattatgtgaacaaatatgaacttgaaagagccaatcctttaagataaatccccattggttaactaggcctaaatttaaaatagacctaagtgggacctggcactgtagctcacatcagtaatcccagcactttgggaggcagagggaggtggatcacttgagccaggaatttttgagaccagcctggagagcatagtgagactcccccatctctacaaaaaattagtccacacctgtagtcccacctactcaggaagctgagaggtgggaggatcacttgagcctgggaggtccacactgcagtgagccgtgatggtgccactgcactccagcctgagtgacagagcaagaccctgtctcaaacaaacaaaaaacacctaagtgagcatttgttaactagatgtcacacacatgtactgagttccccccaaaacccacacctttgttcagtttgggaactccagagttcacctgaaccagtcaatcagagctcacctgccttaaccaatcaggactcagatgtatcaaccaaccaggcgtcatctgtatcaaccaacccaaactgagctacactgaccaatcagaactatgcaagtttcaatccttcatttacatatggacctgattggaaacctgggtagaattttgctataaatccagaacgcttgctttgttttttgaaacccatctttgttttacacagaagaccataactctgtggtttggaaactgttcacggcaataaagtctctttccttcaaattccttttcagagaacttctgttcacagttgctaatggagtgagttaaaacagcctggaaaggaaggaactactacctgtttgaggggaa

SEQ ID NO: 95686 - DNA, 13471 bp, Homo sapiens
aactctaatcaccaaaaagcatgagtaaacatgatcatcagaggggacaacccccaagttctggggcaccccaattctatccatagctctggtcctctctcaggggaagctctgagcaaacgagggactctgaaccctctgaatcccactccacctcatgtgtaccctgggaatatcatcagtggcaactacgaagggacagtttattcaatcagcagtaaatgattatgattcagaatgtattaggccagtcgtcaaccctacatttttttctttgacattgtatatgattatacaacctgtacagaaaacagagatcttttccccccatttaagacctgcagccaggctgacacagacaagcagaggtaggaggatacagaagaacaaggatgggagagaggggagagacactatagtggaggctgtaacggtcctgtcatgctaagaccaagttatggaggaaccacgagtcccactaggtttgaagagctttctggctgtctagttctcccactccattttctttccctaccttgagttaaaagtgtgttttcaatctaaaacaataacatcctgcacacagaagggaaagagtgaaagaatatcttgatctcttaagaaaagcatatagtttaacttcatgtttttaacccagcttttaactgagtagcccagacatcattataattccctcaaaggacaaaaaaatcaattttcttctatttccccacagcagttacaaaatgaagatatctggtttttttaagatgagaagcataatcttcagggtaaggctacatagtttttttccttcgccctcactcccagtgctgtctctatttctgtgtcatctgagaagtgatgtggggcacggagggtcccagctcagggtatgggacttgcttcctggtcttgcccctgctcatctgtgaggcatcagtcagaccactcactctctcggtacagtcaatacatgaacattcctttgtgtccaggccagagtttgttcttggtttcctatccaccccttttttcattacttcttcttcttttttttttttttttttttttcttttttgagacggagtctcgctctgtcgtccaggttggagtgcagcggcgcgatctcggctcactgcagcaagctccgcctcccgggttcacgccattctcctgccttagcctcccaagtagctgggatggagtcttgctctgtcgccaggctggagtgcagtgtcgcgatctcggctcactgcaacctccacctcccgagttcaagccattctcttgcctcagcctcccgagtacttgggactacagatgcgcgccaccatgcccggctaattttttgtgtttttagtagagacggggtttcaccatgttggccaggatggtctcgatctcttgaattcatgatccacctgcctcggcctcccaaattgctaggattacaggcgtgagccaccatacccggccctcgtcatttctttgagggcaccctctcccagcactctgctgcctccagttgtactgaacaatggtgccttctctcagtcctagacagagctccattctcagggcctttccttacctcatcccacatcaaatcagatccactattccccatactttcccaccctggtgtggaccagatgaagggccctaatgtgtcaacctgataaaattgattaaaacttcacattcttagtggtggaagtgatttcacatgcattatctcattggagactcacaactaccctgaggagctagaaggatctgtactatccctgccccccaatttttttcttatgtggaaactgaagctcagagagaaaggagtaagacagtacatctgtcatttatttggggtagtattagtatcaggcattgtgccagctcccctattgggcattatttcacttaatcctcagtccaaccctatgaggttggtaattgtatccattttgcaaatgaggaggctgaggctcagagaagttaaaggacttattaaaagtcacaggccacagtgtggcagaacagagccaacattcagacacatgtgtacaagtccagagcgggttttcactgctggaactaggactcaagctcaaatcaatcaactcctaattttatggttcttccagtggccaccctctctattcagaaaatgcaccctaccacctatccccaaatctcaaaacatgggcccggttgaaatgcacacagctctgggagtctcctagaggcagaacaagggctggcgatgtctgagggcagctaaggagatatttggaaatctactggaaactgcatcttcctgcgctgtgctagatgtccaggtatctgagaatacagtgaaggaaaattaaccgaatgttcaaatctctacagaatgcctagcttgagtccctgaatacttttttatgcaggacgagggtggtaggggccactcagaaagaaatctgaacacgcagaaccctcgggcttagagctgttaggggtcataggcagccagctcacttccagcggacagtgcccactcccctttcttctcagagcccagccaagaaggatggctcagcggcccgactggagcacctctgccctcctcggctcctgggcgtgtctccggggattcctgttcggtgatgccctgacccacggaacttgcctcttccctcttgttcagtcggtttaccaacctgggggcgtctgcggatcaaggtgtttgagaggctgggctgaggtagagaagagggtggggcaggagcacctaagtcgctcagggatttggtgactcacacgaggggaggggggccctctttctccccagcactgggggcgcccaaggctgttcccatgcttagcagaagatgcccctctcatcccccaaggggcctgctcggagtgtgccacctgcagcatggccaccacgaggccggttatgtatttatttcctggcagagctgaaccccaaacgcttttccttctgtgccgtgcgtgaaagaaacagaaaccgctgcacagcatgtctatgtttataccctgggccctgaccctcccacagaggccagctcgtagacttttctttcgcagcctggggatgggtttgtacttcaccctcgagcgcctccccctgggaacccgcagagggctgggtggctgtgcagtcctgtgtgctaagtgcttttcttcgcttctcgatgcttgggccgtcttgtaagcaaagctaggtgaatcgaatccacccctacgcgattgtcgtttgcattaagtaagataatgcacgtggaaatattttgtgagctatgcagtatcacctaaattattttttattattattttaaaaatagaatgcatcagcaagttcttaatgagcttgcttttttgttttaatatttggaaattggaacagctacttataggagacttgtagatcccagaatgtgccgtttgcctgagtggtttcttttggccttgctgtgtcaggacttgtgaggcttgtgaggtgatgtcagcaaatcagcacagactcacacctgaggagcccgggagtggtctagggcctgtggagcatggcagagtggcctcttctcagcctcctctccactggagggcacttgagttattatttatttcccccaggcctcagcctcttagctcctgccaacttcctttcagaggcattcctgccatatgtcccaagattttcctctgtttacctcctttaaagttgtcatggtcttgaattttagaccaccgtaatctccgtttgacaatgaatggtcataaattcaaagaaattgcaggactcttattctgaaattcatataaatgatttctttataagtacacataaaactcttttctcttaaaatatacagaaaaagaaaaatgtacagctgctcagggtaacaaagtattgccttctagaaattctcaggcttcttgtctttaaggataaacaggaagcatttctaattagtgtcttggttgtttgcatattgagcttccaaaatgctttagaaggttcatcttttcaatccgcccttcgcagtcctttatttttcatttgctaagcagaggtaaacttaaaaccatctctatgtgacttatcataaatcccaatcagtgagacctcaaataatgaacttggctctcatttatacacgtgacaaaaggtatacctatataaatatctaataaaaactacctaacagctaaatacaacaaagagaagcaattttcctctctttttcacccaatggctctaattaatcatgcagtacagaaaaataagaaaccttttatgtagcttttagtggttttgttcattctagtttccacctgtgagtagcattcatttataaacctgtcttgctgagcacagtgctttcaaaaatgacttgcttgtgactcagaaacaaaaaaaaaaaacaacaatctttgtaacttttaatctcatgcaatttcttcagtttcttttgttggtgaatacacgtacaatttggttttgaaataccatgtatcaaagcacaaacaaatcatcccttggagtcgtgaagaagctcatcaatgtatcacagtcttccagtcaagcccataattcagtctcctacagctctgattcttgacctctaagaaaacccaccctcttactcttcctgaacaattgctcactagagcactaagtgaagggaaagattgctccttaaagtgaaaaaacaatgttttccaaagttgtgttgaatatgcatagtcatcatatcacaggaagtttttcttttaaaccttatgtgcattttctttaatttgtatggttttctcaagttcaacattcagttttcgttttaatcagttatattctaaaaacaattaaatttttttctccttagaaattcactttaaattaaaaagaacttttgtttttctctttttaaggcacaaatagtgctgggagggggtgagggtaaacttctttatctgtcactgtcatttttttttaaaggtcctattgcttttacacttctaaccctaaaaaagcctygtcacgcacccagcattcccctagctctgggcttccagagcactgttattcaacagagagtttctatagaaatccaaagtactatctccaaatagcagaaaccgtaacaccacagacacttattagaatttgtgtggaagaatcctaaagctaaataaatagaagcttctaaattacctttttccccccttgactatatcttagatcaaatttttagaactcccaccacccacatgtacaccaggacctgtgggtgggagcaggcgtgagacagagagggcttcctgttaccattaaatgaataaagagaccgctacatatcaaactctgtcctctctttttttcttgactcttcttccctccatttagtgtgaatatttgaagttaaactgggcatggccccacatgtctgattactcacccatcgacatccaacctgaagtcacaaatttggcttcagagaatgttgtggagctgaaaggatggcaacttcaattttcaataaataactagaaacagagaaaatagctttccaagtcatcaaagaaaacccatggtgagaaggatattaatggattaaaacaggcataaagaggaaactgaaggcaaagcattggcaaaatctagaaatgattatcagcttcagctaagtccgatactcaccagctccaaggacagagtagggaagcatcagttacaagttaggagaaacagcactgcagtattgtcggggagcaaggtgagggctttccttcctctttgagggtcagttgtcagtctggggccacactgcttccagaagggcacagaactggaaacctttaacaatggttaaaaaatctgactgctcttgttctgtcgcctgccactgctgcctgagcccgagtggttcactgcaccctgaagacagattccagacgctgggaactcgcgcctccaatcccagacactatgtccagcaaaggctccatgagagttctggcctatggtggcggcctggacacctcctgcatcctcgtgtgggtgaaggaacaaggctatgatgtcattgcctacctggccaacactggccagaaggaagacttcgaggaagccaggaagaaggcactgaaacttggggccaaaaaggtgttcattgaggatgtcakcagggagtttgtggaagagttcatctggccggccatccagtccagcacactgtatgaggaccgctacctcctgggcacctttctcgccaggccctgcattgccagcaaacaagtggaaatcgcccagcaggagggggtgtcccgcggcgccaccggtaaggggaatatcaggtccggtttgagctcacctggtactcgctggtcccccagataaagggcactgctccctggaggatgcccgagttctacaaccggttcaagggccgtaatgacctgatggaatacgcaaagcagcaygggattcctatcccggtcactcccaagaacccgtggaacatggacgagaacctcatgcacatcagctacgaggctggaatcctggagaaccccaagaaccaagtgcctccaggtctctacacgaagacctaggaaccggtcaaagcccccaacacccctgacatcctcgagatcgagttaaaaaaggggtccccgtgaaggtgaccaacgtcaacgatggctccacccacccgacctccttggagttcttcatgtacctgaacgaagtcgcggacaaacacggtgtgggctgtactgacatcgtggagaaccgcttcactggaatgaagtcccgaggtatctatgagaccccagcaggcaccatcctttaccacactcatttagacatcraggccttcaccatggactgggaggtgtgcaaaatcaaacaaggcctgggcttgaaatttgctgagctggtgtacaccgctttctggcatagccctgagtgtgaatttgtccgccactgcatcgccaagtcctaggggcaagtgggagggaaagcgcaggtgtccgtcctcaagggccgggtgtacatccttggctgggagtccccactctctccctacaacgaggagccggtgagcatgaacgtgtagggtgattatgagccaattgatgccaccgggttcatcaacatcaattccctcaggctgaaggaataggaatatcatcgtctscagagcaaggtcactgccaaatagacccctgtacaatgaggagctggagcctcctcaatttgcagatcccccaagtacaggcgctaattgttgtgataatttgtaattgtgacttgttcttcccggctggcagcgtagtggggctaccaggccccagctttgttccctggtcccctgaagcctgcaaacgtcgtcattaaagggaagggtggggggcagctgtggtgggtagctatwaaatgacaaytaaaagatacactagtaaaaaaaaaaattgactgctctgaaaacgagtctactgggcagtgacattcacatttctgaaattaatgcatactctatttgcattttctctttttcctgtcttcacctgtctttgacaattagtaaataaatccctaaaccttataaatattattttgggctagccatggttgcaccatcatgtttgtaatcccaaaactttgggagatggtggggagaggactgcttgagcccatgagttcaagaccagcctggacaacatagtgggactctatctctacaaaacaatcaaaaaattagctggggtggtggcacacacctgtagtctagctactcaggaggctgaggtgggaggatagtttgagcccaggagtttgaggctgcagtgagccatgaacacaacccactccagcctgggtgacagaacaagaacctgtctaaaaaaaaaaaaaaaaaaaaaaaaaaaaaaaaaaatggaaggtaccacattagttatatgtgttacgttaaaaagaaatatttgtcctttacttatgaattaatgattaagcaaactgtaggtatatccatacaatgagatatgactcagcaataaaaatgaatgaactgaggcatgcaaccacatggattattctcaaatgcattatcctaagtgaaagaagccagactcaaaagcctacatactgtatgataccactcataagacagtctggaaaagacaaaactattaggacagaaagcgaatcattggttgccaagggctggttagagaggttgactacggaggcatgaggaaacttttttcatatgatgtaactcttctgtatcttgattgtggtggtggttacactactgtatacatttgttaaaactggtagaactatgcactaaaaagggctaattttactccatgtaaattatacctaaaaacaaatgtatctaatcccatcaaagtgatgggttcatttctacataattacagaccattttttttaagtttaatgtttatctttcccttggcaccaagtttctcttataaaccaattacttgatctgaagcattaaggaatttaggaatgtttcatgtaatagggtggatttcaatctggtctctcactgactcagactatagacaaactcctcagctaaatgttgggaccctccacagtcttgtcacatttgccacaaatttaatttcctttttttaaaagatctttttaattctataggttttttgggaacaggtgggatttagttacataagtaagttctttagtggtgatttgtgagattttgacccatcaatcgaggagtatacactgagcccaatttgcagtcttttatccctcacccccttcccaccctttccctctgaatccccagagttctttgtgtctttcttatgcctttgcatcctcatagcttagctcccacttatgagtgagaacatacaatgtttggttttccattcctgagttacttcacttagaataatagtctccaatctcacccaggtcactgtgaatgccattaagtcattcctttttatagctgagtagtattccatcgtgaatgtataccacaatttctttatccactcattgatcgatgggcatttgggtgccacagccttaatttctataatccccttgcatcatccttcttcttagagctggtctcctcactgcctctagcactcaaagctcataccttttttcatatagtcaccctgtccagaaatgcattccttctccctttcttctgcctcctcctcatctcagttctatcatcaataaatactcacgaaatgagcactgtcctatatgcaaaggaaataaagattaaactagctggatgcagtggctcacacctgtaatcccagcactttgggaggccgaggtgggtggatcacctgaggtcaggagttcgagaccagcctggccaacacagtgaaaccccttctctactaaaaatacaaaaaaattagccaggcattgtagtgggcacctgtaatcccagctacttgggaggctgaggcaggagaatcatttgaacccagaagacggaggttgccgtgggccaagatcacgccactgcactctagcctgggcaacagagagagactccgtctaaaaaaagaaaagaaaagaaaaaaattaaactagacatgaaccttgtccccaaagagcttccaggaaatagaacttataatagcatgttaaaagttgttttgacaatattatttgtgaattttattttcttttatctcattggggctatctaattttggacattgaatacctgtttggtaataagaggggaaggcagagattaaggattaataaatggtttggactagaggttttcagacttttggaagtgacaactagacattaggatatcaaaaatcagaaattgccagtatcagaaaggaactggtgggtggagataccttgtggaatctcattacaaatggcagatacatccatcttaatctatgttgatgctctcattcacagtaagaatcaagatgaatatcacattgacttattggatagtacagggaaaatttactcttggagaagcctaattaattgcaatgagcagattctagaaggaaaaatataacctatctcaggaaggctcctgcatgttttatttcaaatcctgcttagttctgttttcattctctaactaaatcagaaggatcatttggctgagggaaaagtgttcttttttttcttgcacaattttcactaacacataaggagacattctacttgtttattataaatgacttacttggtttattattccaacaatagcaaattaacattgtccagaaaaacctttaatactagctgatttttaataagacatattgtgatacataatactggaaataatttttaaagtaaagaactatacaaatgagacataaaaatatcctgtaatcccactatccagatataactattaatattttgaagtatgacttcctagtcttttgtttatatacatattatatataatagctgggatcacaccatgtattcagttttggtagtcttctttcaattaatgtaatataaaaaatccccatgataacaagaattcttcaaaaaactggatttttaatatggtagctacagtatattatcatacttattgacatctttttcttttttctttttctttctttcttttcttttttttttttttttttttttttgagacagagtcttgctctgttgcccaggctggaatgcagtggcacgatcttggctcactacaacctccgcctcccaggtccaagtgattctcctgcctcagcctcccaagtagccaggacttacaggcacgtgccaccacgcccggctaactttttgtatttttagtagagaggggttttttttttaccgtgttagccaggatggtctcgatctcctgacctcgtgatccacccgcctcagcctcccagagtgctgggattacaggcgtgagccaccgcgccccgccgacctctctttctaacttttcactagaattaatatctttatacaattattagctatgttcctgattattttcatagaaaaggctgctttatgtttgatcctagagtataaatcaaagggcatacgttttttaaggctcctaatacatattgctaaatcgccttccttgagagtggtaataatttctcctgagaacattacagtatgcctgctttcttaacaactatgccacatattagagtatttatgttaaaaacatatgcatttgtcaaatgtgggaccatctgggcatcaacaagaataatgcttgcaatagattaaaatacatcaaatataaaaatctatgaattcctaatgaaacacaaaacatcactgctcacctttgaaggttgccggacactattttgttattctaaatatatattttaaagagattgatcacatatttgttctttcttttctgtttgaactgtatttcaagctaactaaatagatgatgagaaaatcccagctaataggtatatgagtaacaataaaacttataccatcactattttgcagtcctcatgaaacaatggatggagacaatgatcatcaatagatatccaaactctcaatgaaaagttattggggaactttataatagaggattccaactgacattacctctacccacaaatcaatcttaatatcatgataagtaggacagctaggcacgtgcttcaggatttgattaatatagcatcatagagtatcacctattatcttgccaaaaatagaactgggatttaataaaatctaatcgagatcttactactagtttataggaaatgtaaggaatagaaacaagttaaacatattggaggaagcaattcgcgcaaaccaaaatgtggaaaattctacagggcaagtgataaatttttttaataaataaatacattgtgtttgttggaaggggtgaggggtataatcaaacaattggttaaggagcgttctatatagaaaaaacatctgcttttaaaaaatggagaaagaaaaactggataataaaatcttatttattacctatttgaaatctaatagtattcaatgaatatcatatacaaactcttttttggtggtagattattctgtatatgagtgggtttgcttctgtcaaaatttaaaacattttctttatgtttctgattttccaagaggaacgtatttcagtttgctcttttcatgtaaagcattaggaagaagtcttctgagctagccaagatactgcgtttgaaattgcaaggtcagttcaggcactctgggtagtaaccatcaggtggcgccgctctacagcttttctaaacccaacatgaaacccttcagactttgaaataagcaaggaggtaagagcagtcacaggaaactgatacagtcaccaaatacttaagctcaatgctatggctttcctaggtgatattacgaaattgcttgtatttctatgttcatcctacctgttgtcatccctcagtacttagagattttaagcagaaacgtgttttaactattctactaagaaccaaaatatcaatgttgaacttccaagagaatatttctgtcataggtgtcctgaagactttacagaacttttcattttccttttgaaaccaatgcaagcccactgggctgtgccagggtccacactccctcactttgctgattcctgcattcccatctgtcaaaaaactgttgtgagctaacctgagctcccacaccgcagctaccactctcctgggtcaaaatacaagaacagtgaatcacaacctggccctctgggcgtttaccacttggttactcctgaacaaattagagaacaagtaagaactaaaactgaagggcactgaataggggtgataggcgtggccaggtgagaccagagggccggaaggactttgtggaagaggggacacctgaattaagtcttaaagaaatgggttgatttgaatacataccaaaagtaagaaaatctggggagcatcagcaaatgtgtgcataaactgcgaactcaaagcctgtaagcaggcaacagaaaaaagcaggcgatctagatgtaagacagtaaaaatgggggaggactgtggcaaacaaccgagcttttgctctgcctaaatggcatttatgccatttttcttttgagacagagtctgtcacccaggctggagtgcagtggcgcaatctcagttcagtgcaacctttgcctcctgggttcaagtgattttcgtgcctcagcctcccaagtaacggggattacctggctaatttttgtatttttagtagagatggggtttcaccatgttggccaggctggtcttgaactcctgacctcaggtgatccacccgtctcagcctcccaaagtgctgggattacaggcgtgagccaccgtgccggtgccacttcttttaacactgttccagtccctacctccccacaaagtg

SEQ ID NO: 95687 - DNA, 82621 bp, Homo sapiens
  misc_feature (1)...(82621): n = A,T,C or G
tactaaggaatccggcttgatagctaaacacttagactaccaagttaacatcatgttatatacatcttacaacgattaccttgatctgttaaaataagcattttaccttgatctgttaaaataagattactttgatctgtgaaactaaaaaagcattactagctctgccttagtgcttaaggtatcacagcatcacttagaagtagaaagaaatcttatcttccccttaaagtcgttgttgtcatgccatacagacttttcatgctaacaggatctacaggatgatcatgctcagctaattaaaaaaaaattttttttgtacagacaaggtctcactatattgctcatgctaactgacccttctttgatgagtaatagagatccaatttcaagttgcatctaaagaggtatactgcgtcataaattataaaagataaaataagttttgtggaaacagctattattgcttatggtaaataagaacaactttaattttaccatacaaaggtatatagttccctacgttattattattattattattattattattattattttagatacggtcttgatctgatgcccaggctggagtgcagtggygcaatcatagctcactgcaacctcagactcctggctttaagcgatcctcctgccttggcctcccaaagtgctgagattacaatcatgagccaccatgcctggaccattctactttctgtctctatgaatttgacaactctaggtacctcatattaagtagaatcatacagcatttgcccttttgtgactggcttatttcactcagcatagtgtcttcaagtattgttccctattatagtggctcactggcaacctggatttgtcccagagactgacatatggactggggcatgcatgaggcataagaaagggttttacacacttaagaagagggcccaggcacaacaacatgaatgcacttaataccactgaaatgtacacttaaaaatggttaaaatggtaaatgttatgttatgcatattttgccataatttaaaaaattccaatgaacaaaaaacagataaagggatacattggattattaacaatattatgggaccaggtgtggcggctcatgcccgtaatcacaacactttggaaggccaaggagggagggttgcttgtggccaggagttcaacaccagcttgggcaatgyggtgagatctgtctctacacacacacacacagaaattatctgagtgtggggctgggcgcagtggctcgtgcctgtaatcccagcacttcgggaggccgaggcgggcggatcatgaggtcatgagatccagaccatcctggctaacacggtgaaaccccgtctctactaaaaatacaaaaaaattacccgggcatggtggcaggcgcctgtagtcccagctactcgggaggctgaggcaggagaacctaggaggcggaggttgcagttgagccgagactgcgccactgcactccagcccgggtgacagagcgagactccgtctcaaaaaaaaaaaaaaaagaaaagaaattatctgggtgtggtggtgcatgcttgtggtcccagctactcagaaggctgaggtgggggaatcgcttaggcctatgagtttgaggctgcagtgagccaatgatagcatcactgtactccagcctaggcaatggagcaagaccctgtctcagaaaaaaaagaaaagaaaaaaggaagaaatggcttattaaaaaaaaaattaattcattcacataaaaccacttaaaaaaagaaaatgaggaaggcctagagaatctaggccacctgggctgccatcaaggcactctaaagagagcgctgctcaggctgtagcttcccacatctgcacaggtgtattcaaagccaagaaaaaccttcatttttgttttttgagacagtctcgctctgtcacccaggctggagtacagtggcgccatctcggctcactgcaaccaacctccgcctcctgggctcaagcaattctcatgcctcagcctcttgagtagctgggattacatacaggtgcatgccacaatgcctggctaatttttgtattttttcttttttttttttttttttgagacagagtcttgctctgtccaccaggctggagtgcagttggcatgatctcggctcactgcaacctccgcctcccaggttcaagcaattctccttggctcagcctcctgagtagctgggattacaggcgcccaccaccacgcccagctgatttttgtattttttagtagagatggggtttcgccatgttggccaggctggacttgaactcctgacctcaagtgatccacctgccttagcctcccaaagtgctgggattacaagtgtgagccaccgtgtctggccaatttttgtatttttagtagagacagtgtttcaccatgttggacaggctggtctcgaactcctgacctcaggtgatccactcgccttggcctcccaaagtgctgggattacaggcgttagccaccgtgcccagcctgaacccctcctttcaaaaaggaaggttccctgagaagatcctagcccttgtaagatggaagctgacatcactgtaatgttcaaggggcacagacattaggatgggcggtgtgatctgaacacaggataatgctgctagtgtcagcaagaggtcccaacacccgccctgcagctgccaaacaatcactgacagactagaaggctttccagacccctgcagtgtaacaccattgtatggcagccttgatcttcgtggggccttgtgggactccagaatgatgctaggggaaccagggctcaggccctggtccactcctttcctgtgatctcaccatttccatagctgtaagtatgtatgcagtacacacaggtatgaatttcacatttatatttctagcctagggttcgctctcaaacctcagactcatacacccaactgcttactttacatcctctcttgggtgtgaaccgacatctcaaactcaataagtctaaaactgaactcttgatatctcaccctaatgctgttcaattcagctatcctcatccttccaattgctcaggccaaaagccctggagtcatcactaacccctctccttcacctactttctatataatgatccatcagaaaatccagtgggctctaccttcaaaatacatccttttatgggataactcttcaccttgtccactgctaccaccctggttcaagccaccgtggcctcccacctaaatccgtgcaacaacctcctaacctgtctctctgcttccaccactcttcatctattctcagcactgtggttagagtggcctttcaaaatgtaaatcagatcatatctctgcttaaaaccctgacacagccccctctttactcaaagtaaaaaccaagtccttagaataactcacaggtcctacatgttccacccactcttccccttctccctatgacctcctctgatacaactcttcccctttgctcagtccacacgggcctccttgctgttctgcaaatgtgtcagccatgcttctactttggctctagctgaatgtccttatgagaggtgaagccagctggacttcctgggtcgagtggggacttggagaacttttctgtcttacaagaggattgtaaaatgcaccaacgagcgccctgtaaaacacaccaatcagcaccctgtagctagcaagaggactgtaaaatgcaccaatcagcgatctggagctaccaaggagattgtaaaatgcaccaatcagtgctctgtaaaaaacacaccaatcagcgctctgtagctagcaagaggattgtaaaatacaccaatcaacgctctgtaaaatgcaccaatcagcgctctgtaaaacacaccaatcagcaggatcctaaaagtagccaatcgcagggaggattgaaaaaaaggcattctgatgggacagaaacggaacactggaagggataaataagggaataaaaagctggccaccacgccccacccacccagcagcgacaacccactcgggtccccttccgcgctgtggaagctttcttcttttgctcttcacaataaatgttgctaccactcattctttgggtccatgccatctttaagagctgtaacactcactgcaaaggtccgcggctccatttttgaagtcagcgaggccacaaacctaccggcaggaaccaactccggacacacttacctcctttggtctttgtatctcatgtcctcaatgagacctaccctgatgttacgggctgaatggtgctcctggcaaaattgacatgtcgaagtcctaaccccccagtatctcagaatgtgagtgcatttggaaatagggtctttaaaaagggaattaagttatgatgaggtcattctggtgggccccaatccaatctgactcctgtttttaaaagaagaagagattaggacacatatacacacagaggaaagaccatgtggagacacacagggaagattcattcatataaccaactgcttactttacatcctcacttgggcgtgaacagacatctcagactccatgagtctaaaattgaggtctgatgagatacaaagacaaaaactgagctctctgcaagccaatgagaggccttagaagaaaccaactctgacaacacctcgatctgggatttctaccctccagagcggtaaaatgagaaatgtctgttgttcaggccacccagtctgtggtactttgctatggcagccctagcagaggaatatgcctggtcacactgttgatgctgcatcttgccccttccctctggcccggatcctctcctgcttctaccttttttccatattgcactcagcatctctcacatacttatttgcttagatattatgtttgttgtttagagttctgatctctcttctgctccccttccaccccatgtgagctccataagggcagaatccttctttcgtttaactgaggtatcccaagcacctccaacagtgcagggcatacagcaggtgctcagtaaacagctgatggatgaatgagtgctaagactctcttgtactcgtagggatcgctggatgcattccttcagagggagagctttgaaggacagggtaaaaaatttcactgcgttgactccaggtttaataatataatattagaaggaagaaactactttcttagttttcttcttactctattcttcccatttaatggccctccaccccttactcccaattctccagtgttctctatgcaatggccaatagcagcatttatccatttagggtgaaaacctggagaacgctcctggatttctctcttcccctgcacaaaacccaaatctttctacagttctctccgtttccgatcccatgattctggccaggggccctcactaccagccttctcaagggccgctgaagcagcctcctgcgtgggctccctgcagctgcggagatatttcagctactctgaagggccacacgtgctctcacttccctgacacccctcccctttctccccgcccctccacggttaggcttgttgaccataacaagcagctcgcttgtattaggcgctcacgttctgcctcccctactgggcagtgcataacttgatgaggcttgagggcaggggtcgtgtccctagtgcccggctcaaagtggaagctccaaacttatttgtcggtcgtctcccttgttgctctgactttccactttgtataccctggggaactgagcacaggagggaggcgacgcggctggtgtcactttggggtaaagccccctctgctccccgccgtgtccccggccagctctggccccctgcatccgggctctctcaccttggcggagacctccctccagcggcagaaagcctcgtaggcagcgcgcacggcggcgcgggcctctcgcaccccgcagtcggctaccatgcccagagcggcgccgctggccgggtcttgcacggggaaggtggcggcggccgggagccagcggccgcccacgaagctgtcggtgcgcagcagcgccgcagagaggcccgccaggcgcccagcgtagcagcggagctgggccgggccgggcgcaggcccggaggcagggaccaggccgccggcgcgggggcggaggcggcagcctggaaacgtcgacccgaggcgccgggccccacagctccgcagccaaatgcaggtcgccatggcccgggcaacgacggcgacaggaaacaggcaagcgggcgcgcgcgcacgggaacgcaggggtcgcggggaagcaagaggagcgaggaggcgccggggacgcgcggggaaagcgtgggagctggcggaaggttgcagagccacagagcagcgccctctctccgcgtctttctcgctgcaccgccgcgccgccctctgcaccttgccctaagcgccgcgcggcttctctcctggcgcgaccttctcccgsgggagggttgggttcggggatggagaaggctcgccagtagatgcacctgcrgactgctgtcaccttttcacttttcgggtgctcatttgtcactaactgctcctgagcccccaatcgctgctagagacccactctctccccttagcatcccccaaattcggcatccccggaatttgtgcgcggtccatagatgcgctggtgcctgccctaaatgccaaggccgtgatcacgcttcttcagttgtagctcctgagcacgtagtattgattgggagcgatcgttctctgaggggtcgaagtgtgaccccgcgttctgctgcctggctgcttttttgggtgtgtgtctaggcattctcctagggttgctcccgataaataacagcgctttggaaataaacagactaggatccaaactcaagtctgttgccgacaagctgtgtgaccgacaggttaaccttcgtccagtcacttataaaatagaaccatatctaccccattttgttgtgagataacgtaaaatgctcattacagttgccacattaaattcaatatagcgttcaaagtcatactagctaccctagtcaagccactagtaagattaaagttgggtcaccaactagtaaatggaagcatttgtcaaaattgaatcaaccaaggtataaggattgagcatactatccaaccaaggtatttgagcacctttaaacagcattcttcatccgttaaaaaattagacttgggcttaagactctgaaagcagcagggaagcttaaaacctaatgaggataaaaataaaaatagcaggcgtatgctgggaatttgtgggtgcaaatgaagcccagccctatgcattgattttaggttacatatctccctttctcaactcctacagcgttgagagtatcttgctagctttcacctttttctaggacgttgaatttttttmtaggacatttgcaaaatgccgaggcagtaactttaaattttgactttgtcttttgctgagtcagatccattgagttttgagccagtcacatatggcagaagtgataayagtagagtttaatcaatttcacactattttgctctgtattttrttgcaggaactggggagaaccagggagtcctaatagggatgtgggccagtaggtatcacaggtggggctggggagctggcgtgtttacatctcctgcctgcggagggagtttttgtttttgttttgttttgtttttggtggtggtttttgttttttgtttgttttgttcttgtgagaccgacagactcattctgtcacccagggtggagtgcagtggtgcgatttcagctccctgcaacttccgcctcccgggttcaagcgattctcctgcctcagcctcccgagtagatggggctacaggtgtgtgccaccaagcccagctaatttttgtatttttagtagagacaggttttcaccgtgttggccaggctggtcttgaatgcctgacctcaagttatccgccctccttggcctcccaaagtgctgggattacagggctcatttctactggcctggggaaatcattcaattgaggcctcaatcaactgaggcccagaaaagccaagttaattgtggctgcctctcttgttcaaaaattaccctagcccacttacctttttaaggttctatttcaaacggtacccactccctttcccagatgacttatccattacgcacagtaggtacgatgccaagggcccataaaacttttaggagcactcacaaatgtttaatttattctaaaatctgaagaaaagaagttttagrtggcatattaatatgttaatcttacaccaatgcagatgtaaaatgtgatttctatttattgtttacttatttttgtgacaggaagtacttcacaaaggcaaaagcgcctggagcttagaaagttcacaatgtggccctccccttttccctcagttttgtgcccctcttcaagcccccattcagagtgtaaacaatttcctcctggctcctgtcttacttccagcctgtcctgatgccccctagcgcctggctgggtgtctgtccttaccagggcctacaaggacaagaccatcaggtgagagggacctcttccctcctttctcctttggctgcccttgtcctgggaacctccactccccagttcccacccttattcatcctctcccccattttctttttcttttttttctttcactttttttttttttttttttgagtcagggtcttactctgtcgcccaggctggagtgcaatggcacgatctcagctcattgcaacgtctgcctcctgggttcaagtgattctcctgcctcagcctccagagtagctgggagtacaggtgcgcgccaccatgcctggctaatttttgtattgtttagtagagatggggtttcaccatgttggccaggctggtcttgaactcctgacctcaggtgatctgcccacctcggcctcccaaagtgctgggattacaggcatgagacactgtgcccagcctcttctcccccattttctagactggcccacataaagcttgagaccctctggctttcaaacctgtattctccctactcactccttaatgtaactgtatgtttacttttcaccttgggtctctatttccagaagagttctaaatggtagaatcatgctgtcttgtttataacaaagccacctatattaggaaaggggggtgtggggcagaaagaaaaatatttccatatgcttattatttgtcagatagtaatattgtgagctacgttttaactttctttaaagtcatatctttgatgtttttattgttaccaaagtaatacaaacttcataaaactgcaagcaatattgtcatataaagaccatattcataactatcacactaagcaaataatttcctcttattttattacatttatacgtttatgtcattctgaatctcaaatacaaaaaaatgcrtaatgagaaattgagacatttgggattagtattgtttggtaactgaacccattccttttttttttttgaggtggggtcttgcccaggctggagtgcagtggtgtgatctcagctcactgcaaccttcacttcccaggtacaggcgatgttcccgcctcagcctcctgagtagcttggaccataagtgcatgccaccatgcccggctaatttttgtttttgtttttttcttggtagagacgggattttgccatgttgcacaggctggttttgaactcctggcctcaagccatctgcccgccttggcctcctaaagtgctgggattataggcgtgagccaccacacctgttctgaacccatttctttggtgctttttggatgggtttgttgtattatatatggttagatatcttttctagcagtatttttttcccctgtaaccattgattgactgctcttggatgttctgagagacaatatccaaagtcccaattaataattgtgactccctcacgcacagkctgtagaaggcccagagtgacagggaggcaaactcaaaggcctctggtggccagaaggggtgtggaaacctgcacacattgcatggatggtggggactggaggagcaggacatgctctatcagggggcagctgrctctttggctgcagctggttgtcgtgtcacatgggagcgtcagttcatgatgccagttcttttgtttttaagagagccagaaatctagatttctacgtgaattttctcatttagaaaaagttcataaacttgatttaagtttataaaacatcctgttagccaaacaaaacacgtaggcatatggcctctggactaatcaggagtagctgggcctactgcccctcaggtctgggggtagctgcgggatttctttccttggggctgtgcacatggctgtgttaagcttacaggggaaactgttggggcgacaactgttgtcaaatcattccactttctttttttcttttctttttttttttttgagacagggtcttgctctgtcacccaggctagagtgcagtggtgcaatctcggctcaccgcaatctccacctcctgggttcaagagatcctcccacctcagcctccccagtagctgggactacagtcacgtgccaccacacctggctaatttttgtatttttagtagagacggggtcttcactatgttgatcacgctggtctcaaactcctgacctcaggtgatccaccagcctcagcctcccagagtgctgggattacaggtgtgggccgccacgcccagccaaatcatcccactttctattcatcctttcatttggcaaacctgaagtgaatactatttcctcccactcttttaggagcccatctcttgcttttaatgtaaaatatgcataatttgtgttttaagattaccatcagtttcatgaagagcttaatttttcccatggatgaagtgtaagtgggtacctrataatatatcgtgagcttaacattttccaaaccctgtttcttggccctaaatctgcccccttccttccacctcccaagtggaattgacatctttgcttcagctgcaggaatctgaccttgcaacaggctctggataagccctattagaacagccagagrtagagagaccaggagtggctgctcttgtgtaatcccatacaagtgtcagtatctgttgccaaatactgaaaaggaagccagttccagctgattaccataaaactttcccagcacttgtggcttgggaggcggaggaagcaggacagcctgataaatgtgtagaaaggatgcatgagagatccacccttgtaaggtgaggtggtcyratatgttgactatctgcacaggtgagcctttttatagaaagcaaaaaatatctggagacaactttgcttgcatctctacacaaatttcatgttaaaatgaaatccagaaaaaacctcrgtcagaagatgcagtgcttctggcctaaggcttttcagatttcagtttatcctcccaaccccaccccccaggagcacagagtttgtttgctgttctggtgaagctaaacagtagttggacagttgacttcattggaaaacgatattattttgaaatgaggcttggtttcctcggtcagtgacctgcttagagagaagcggtgggtctgcacctggattttggagtcccagtgctgctgcagctctgagcattcccacgtcaccagagaagccggtgggcaatgagakcatgtctgctttcaggttgtggcctggcctgctgatcatgttgggttctstctgccatagaggttcaccgtgtggcctttcaacacacrtagaaataggtaagtactggtgtcttgttatgttgttgagaggacaatacatctgtcaaagacattaaggaagagactgaaaatcccgctcgtggattgatacagtttcccctgggcactgagctgagtggcctgacagcagggaggagaagccggtgattgcagtcatccagggatagggattggcagcatgacttcagttaaggggcaaataagaaagagagctgatgccccattggtcatgggacccctgtgtgtttctctgggtggggaaatagtgagaggctcagtgaacgagaggttgcaacgtggcagcagaactgacagaatgggagaggaacaagatgggtggaatatggcaggagtgagaaatgtacttttgttgtttttacatgtccaaggacaggcatttccaagtatatgtaaagagccatatgtggccatgggagtgggtccctgagtcaaattgctgtaaaagtgcttggcttcaggaaggtcaagaaagtaagggagtttagttatccacatgcacggtgccaggaagatggcaggagttggagagsagaagggtacagcaagccagtgccaccgaccttaggggcaagggcagagtcatcctggatatagggagatggcaccacaaagagttatttaaaatttttatttttctagctttattgatgtataattgacaaaaattgtataaatttaagatatacaacatgatgtgttgatatatgtatgccttgtgaaatgattagcacaatcaagctaattaacacatccgccccccccacatagctaccatgttttttgcatatgggctgagaacacttaagatctttcttagcaaaaggatttggttcttgtatgaagtgtatttgtaacatgttttaacgcatggaaaacgtgagtcaatttgtaatagaattagctgtgataacattctacagcaattttcagattaatttcagatatacctgatgttctgagttttcttttttttttttttgagacggagtctcgctctgtccgccatgctggagtgcagtggcgcaatctcggctcactgcaagctccgcctcctgggttcacaccattctcctgcctcaacctcccgagtagctgggactacaggtgcccgccaccacgcctggctaatttttttgtatttttttttagtagagatggggtttcaccatgttagccaggatgatctcgatctcctgaccttgcgatcygcctgcctcggcctcccaaagtgctgggattacaggcgtgagccatcgcgcctggcctgagttttctttaatttagataaaaattataacagaattttatagttgtaccacctccagaagtttcaaagaataataagattataggcaaaaaatgaaaatttatcagtgcaaaatagacatatatactgagctacgatgggcaagaacctgttatcacagaatttgactatctgaaaggacactagaagtcaccgagtccagttctcttcttttacagatgaagaaactgatactagacagttttacagctaagttttcagtggcctggcctagaattacatgtcctgacagctggtccggcgttctttccattaaaaatgtactgctagaagggagtcaggaaacaatggaaaagaggatcagacttaggttctagttccagccatccagtaaagtagatgtgtgattctgagcaattcactttttacctacctctcaattctataaaatgaggggrttgaacttcttaaagaattctaaagtgtcttgcagttctatgttctgtgaagttgaaattgccaaaactacagagtaagctgatgaggaacaaatataaatggaaatactccatttttaatccttagtgtttaaaaatttvcagattgcatctgaaattttaataaaaccagataattgcttgcccttcttcattaagtaccaaacaaaggtcctaatggacatttaaagaataatatttatgtgaacataattgaaggcatctcctgaaatagaatctgcacggattctgagaatttttttacatagaagaagaccaaaactccatcatttatttactaataaattagatgattttataaatattttggttcactttttcatttcttataaaggggcctgagtggaaggtcagcattatctgagtgagttaattagaaatggcttcattcagcrtaaatcactggaatcctgtacacaggttatttgtatttgtgggttgtgacttttatgatattaatgcttatagtagtggcaatagttttttgttatatgaattttaaaaattggaggtgattcacaacagaaataaggtatcacctttgaatgtcacttcccagggaatgttagtcctcttattgattcttgggagattcaggctgtgggtgggtgtggggtgtagttggtagctttctgagatgattttgtccttctggtccaatgatgaaaaacttttgaggatcattggttcagtccataggttaggtgttatattgtattttgtacttaggtttgtctgcctcagtactgaagcaaaatatgatgacagtttcttttttttttgagacagagcctcgctctgttgcccaggctggagtgcagtggcgtggtctcggctcactacaacctctgcctcctgggttcaagtgattcccctgcctcagcctcccaagtagctgggattacaggcatgcgccaccatgcctggctaattttttgtatttttagtagagacggggtttctccatgttgatcaggctggtcttgaattcctgacctcaggtgatccgccctcctcggcctcccaaagttcttggattacaggtgtgagccaccatgtgtggtctggcagtttctttttcttgagctcctaccaagtgtcagccactgtgcttgtcacttagcatttattatttcaaccaacctatacggtgggtattttttaaactcttttccataggagggaactgaggtctagagaggttgaatagcactaaagctcatagagttatttaatagttaagcagaaactttaaatcaccatctaaacttgctttgtactataacaatagaaatactgcacaagcctatacctaatgaaaattgccagtgagtgcaaactcatttcatttcctgcgtccttgacagttataaccacaaattgtgtatttttcttttaaaatcatctcgcctaagttatgttttcagtaatagttgaacttaattgatttatgtatttatttctctcaggacacagagctctggagtttcttcagcttcacaatgggcgtgttaactacagagaggtagaaatcttgatttttcttttcttctttgtgcattagttttcttttataggtgccaaacaaagatcctaacagatatttaaacagtaattttaagactcattttggctgggcgtggtggctcatgcctgtaatcccagcactttgggaggctgaggcaggtggatcacttgaggtcaggagttcgagaccagcctgactaatatggagaaaccccatctccactaaaaatccaaaattagccgggygtggtggtgcatgcccgtaatcccagttattcgggaggctgaggcaggagaatggcttgaacccaggaggtggaggttgtggtgagctgagattgcaccactgcacttcagcctgggcaacaagagtgaaactccgtctcaaaaaaaaaaaarakactcattatttatttctttatgttataatgttgtatattatgttattaatgttataagacattaatattatggttaaaaggtatatgtctcttccaagtgctacttgaacattttataggtatcttatatatatcacacttaaaatttaaagattttaatgatatgactcataatttgaaaaaaatacttgagaaattttttaaacagtacatttttaaaaatgtgctaatcttctctgtatcattccaatattagtatatgtgctgctgagaagaacacatctttttgtttttattgtagagatgggggtctcgctatgttgcccaagctggtcttgaactcctgggctcaagcaatccttccaccttggcctcccaaagcactgggattataggcatgagccactatgcctggcccatcttttttgtttttattttaaaaagtcatacttgagagagatcatttattttccacttcttgttactgtgtgttgagcacaaattgcatcaccaggaggagaaggaagtatttattaagaaatacgcactgagattctccagagattcttcatccaactcctgctatattccatatcctggtaggactagctcatgactcacctttacccatcttcaaatgaacacattctgatcatatgcactatttgttctatggctaaataatactttgtgacgaaggtgtaattctttcatacttatatttgataagtggttagcattcccttctgacatcagaattggatcatttaataacattaagtcttcataatccatttgggaagcgggatggtaagataactgaaatttattgtaccctcaaaatacttttagtcgtaagattcagcttcctcacttgccaacctaacaggccgaatgaggaaaaacagcatttatatctgatagtcatcttcattgaccttgacggcaagtaggcaggaaagaggagtggaaacgagaatctgcctaattcatcacatgaacaatcaatccagagtgtgtgcagagtgatttctagtagaggtattctacaaggtattctagtagaggtattattaatttaaaacatgttaaatggacacagacgctccctttcaggatgcattctaatccaaatactaatgtcatcctcagaaataggccaggcgtgatggctcatgcctgtgatcccagcactttgggaggccaaggtgggtggatcacgtgaggtcaggagtttgagaacagcctggccaacatgatgaaaccttgtcgccactaaaaatacaaaaattagctggccgtggtggcagacacctatagtctagtcctagctacttgggaggctgaggcggggaatcgtttgaacccgggaggtagaggctgaagtgagctgagatcacaccactgcactccagcctaggtgacagagcaaggcctcatctcaaaaaacaaatggtgggccaggcacggtggctcatgtcagtaatcccagcactttgggaggccaaggcgggcagatcatgaggtcaggagatcaagaccatcctggctaacacggtgaaaccccgtctctactaaaaatacaaaaaattagccgggcatcgtggtgggcgcctgtaatcccagctacttgggaggctgaggcgggagaatggcgtgaacccgggaggcggagcttgcagggagcggagatcgcactgctgcgctccattccagcctgggrgacagagtgagactccatctcaaaacaaaacaaaacaaaacaaaacaaagtggtggggcatgcctctaatcctagctacttggaaggctgaggcaggagaatcgcttgaaccccggaagcagaggctgcagtgagccaagatcacaccactgtactccagcctgggtgacagaacgagactctccataagttcacatgaaaataccaccaattctaatccgacaccgcaagatttactctagccttcaccatgtccatatctttaactcctttctctaatgctgagatggagtctcactctgtcacccaggctggagtgcagtggtgtgatctcacctccacctcccaggttcaagcgattctcctgcctcagcctcctggtagctgggaatacaggcgtgcaccaccatgcccggstaatttttatattttcagtagagtcgcagtttcaccatgtttcccaggctggtctcaaactcctgacctcaagtgatccacccgccgcagcctcccaacgtgctgggataataggggtgagccactgcacctggcctttctgtactctttattctatttcactggtctgtttcttttggtttcagtatcatagtacttttgtttctgtagcttaaaatatatatattttaagactggaatgcagtggcatgatctcagctcactgcaacctccacctcccaggctcaaattattcttgtgactcagcctcctgagtagctgggattacaggcaggcaccaccatgccccactaatttttgtattttcagtagagtggaagtttcaccatgtttcctaggctgatcttaaactcctgacctcgagtgatccgcccgcgtcagcctcccaaagtgctgggataacaggcataagctgctgcgtrcagcctttctgtattctttattctgtttcattgatctgttccttttggtttcagtatcatactatttttgttttgtttctatagcttaaaaatatgtattttttttgagatagggtctcactgtgtcacccaggctggagtgtactggtgtgatcatggctcactgcatcctcaacctcctatactcaattgatcctcccacctcagcctcccaagtagctgcaccaccatgtttggctaatttttaaattttttgtagaaacagagtcttgccatgtcacccaggctggtcttgaactcctgggctgaagagatccgctgacctcatcctcccaaagtgctggaattacaggtgtgcaccaccttgcccagccaaaaatatgtttttggcagatcacctgaggtcgggagttcaagaccagcctggccaacatggcaaaaccttgtctctactaaagaatacaaaaattatctgggcgcagtggctcatgtctgtaaatccagtactctggaaggccaaggcaggtggatcacctgaggtcaggagtttaagaccagcctggccaacctggtgaaaccctgtctctactaaaaatacaaaaattagctgggcgtggtgaccggtgcctgtaatcccagctactcaggaggctgaggcaggagaatcacttgaacctgggaggtagaggttgcagtgagccgagatcatgccattgcactctagcctgggtgacagagcgagattctgtctcaaaaaagaaaaaaagaaaaaaaatacaaaaattagccaggtgtggaggccagtgcctgtaatcccagctactcagaaggccgaggcaggaagaattgcttgaaccyggaaggcagaggttacagtgagctgagatcacgccactgcactccagcycggtgacagtgtgagactccatctcaaaaaaaaaaaaaaaaaaaaatccaaaaatacattttaatatctgaaggatacatccttcgttagtactcttcttttttcctcaacagtttgctctttggcataatttttaaaatttacttcagattattttatcacattaaataacatgcctacctcactgggagatgcagattcaacaagtcttaatacatataaggagcttagaacagtgactggttaagtaaatagccagtaaagttaattactatttttaagtgaaaaaagtccaactcaagctatcttttggaaaaaagtggactttattggttcatgtaactgatatctgcagtgtggaactgggcccagagctctagatggtttctatatctctccacgtggggaatgctgacagcctagcactcagcgtcagagctcagcagccacaaggggaagagggcatcttcccagagctctagtggagaagtctyggggaaggtgtgaacggaactagctttgctcaaaggtccatttctgagccaaactctgtggtgagggtgggcatgctggccacagcattctggtcagccccacctgagcggtgtggaatgggctctcctcgggagagggtgattctgcctctagaaggaggagaatgggatactggttagaaaaacaaaaccaaaaaccagatgatactatctttctttgtgttttaatttcttgaagtacttctttgttgcacctatatatggtccacattattagtaagttcttatttaaaaaaaaaaaaaaaagggcgggatattgccaaacttttactttgyccagtgtgtccatcagagttcatttgcagataatggaaacccctctgctagtttaggcaaggaaaggattaataccaggaattagagaattcactgcttacaaactgtgggaactgcaggagcaggctctaggccaggtgtccagaaaggactcccaaaataatgcacwgaactggcctgtcaaggagctgctactcctgccattgacaggcattcactgccccatttgctacaaattcaackgtctcatacacggtttgtaaaataagaagccaccacctcacctattggttctgggacctcatcaccacctcgggcacctgccttactaacaatatggttgtcctgtactctgcccataaacacgtgggaagccagagctgcaacacgaggggctgtgctacctctgctgtggaaaaaccaaatgcttccatgttagccgagggctccgtggtggaggctgggccatatcagactgtgagctgagacagcctgggaaatgyagtctgtgttttctagcctatagcatgcagctagacatcccataagggactcggaatggaaggaagtgagccagttgaccaaggaagaacatttagaagaaaaccgctaccatctactttcacatcatttaaaaagggaaarcactttttttagccctcccaaaacacaaaggacgtcatcttacactaaaacacaggtagcaactataaactgatatgcacatatgtgcgtgcttgtttgtgtgcgtgcgtacgtgcgtttgtgtgtcygtttttctcttttcactgtgaatcattgaaaattttataaaaaaccagctgtgggccaggtatggtggctcatgcctgtaatcccagcacattgggaggctgaggcaggagaatcgcttgaacctgggaggttgcagtgagctgagattgcgccactgcactccagcctgggtgamaagagcaaaactccatctcaaaacacaaacaaacaacaacagcaacaaaaacaacagctctgggtcagtaaaacaaccttaaggcctcagggaaatcctgctttactrgattgacagagaaaatgaaagaagatgaaatttaaacaagtgttttctgctgtttctaaattagcctctctgtgtttggtagggaagaatctgaagttatatattgttgtgttttgtcttggattatgtgtgaattttaatcatttatttactttatgcctgctttccttcctttttccctttcattccrtctatacccccatatttctarcatctcatcacagaaaattggtggggcctatactccccaggctgttgactcctgccccttaatctctgtattttcttgctctgcagctgttactagaacaccaggatgcgtatcaggctggaatcgtgtttcctgattgtttttaccctagcatctgcaaaggaggtaagatgaaagtttgcagactgaatgaagtcacttttacttggttaataggaatagctatgactttaaawatatatatawgtgtgtacaatatatttttaattgcacagtatattttccattattgttgagaacaatttgtttcccaacaatattgttggttaatgacttagtttacatagttgcattttccatttagctataactgacctagttaagcatagaaattctgaraactattttttggtgaaaacctaagtgrcatgatagaagacattttgcaagagatcaaaaggtctgagtttgtgttccttctatattagcrtgtgatcttaaaaaagtcacttatccacagaatctcaattttcatgtcttggcaaagactggattgtcctgcctgccctgcctagactggattgtccttggcattaatgcacagtattttgtcaagtgttatgcaaatckcagatactattatttgtaagagttaaagaaagaggaaagaaacatgaaaagcagcttaacagtcaaagacagatttattttggagaagtaaacctgagaggggcttctggccgatttyggtcaggaacactctctctcttacagactgagagtatttattggtgagagartttggaatgtttctgtgtgggggagaagtttatggtgggattggaatgtctctagttggaggggaggttatcttggggttgacatctctctggctggaggggaggttatcttggggcttgcacgtctctggttggggaggrgtttggaatgtttctgattggagatgttatctgtgatttatggttatgctgactgtacccattaggctgatgccctttggatttaggcaatttttggtcaaggtgaacttaaaatggcagttcttgtccaagayggcaatgcttctgctctgtcattatcagtaaacttgtctcatgagtcgtatcagtcagagccccagcaggacccagaagtcacactcaaactgagtaattggagaggagcttagtaagggcaccattttcaaagatatggacaggaggcgaggaattgcaaaagatagttcaagggagggagagattactggaaccgtggagagagagagctgcatgaagaggaccacttgagagctggaccttcagctaaggggcacagccagcccactgtgaccccacagaaggggagctgggagaatatataccccaacttctgtgtcttctttttctctgatctgtcagttctctttattggccaaacccaacccaatcaaagccagagrgccacgaagctagttgaagcaggtgacctcagagtcaccctacaaggtagagaaggatggggagtgggtctggaaggacaaatggaggcccccagcacgctgggtacttgtataaactgcttctggggttttgggtcatctgctattatcccattcctttaattcagtgatgtctttgggactgaaatgaactatctggggctaatcactcctgcagttagaatcccagrcagctagcttttgtatttctcatatttataaggagttttgttctgtttccctcttagtctgttaactatcatttctcaatcctattattttgcctgcatgttatagttctcctttctaacctattatttctaatttagcacttcccaaastgtattcatgggagctctactgtcccttgatagcttctacaaaaaagaaagaagaaaggatatttttgtccattcaatttgagcaacattgcttaatgtacgccatttttagagacagacaaaacccacactaatcaaggttctgaggagagtggaaaaggaatgtaaagtatttacctagcattttccagttttttctgcagcaataaatastcttgtgtgatgaaaagattgggactggtatatgactagttacagggaatttgcatacaaattccacttattccacttaggtttttwtgcatttttccacattttaccttgtctcatacatacctaattcaactgtagttttccttttcttatttggtgatgattcactttcattgcatctttccaaagcacttagctttcttagatacttaattgccaaagaaaaaacaccttttttttaaagttatttttacattttttagagacagggtcttgctctgttgcccaggctggggtgcagtggtgcaatcacagctcattacagcctcaaactcctggcctcaagcaaccctcctgcctcagccttctgartagctgagactataggtgtgtaccmccatacctggctacttttttattttatttttaaatttttgtagagaygtggtcttgctatgttgcccaggctagtctcaamctcctggcctcagggggtcctcccacttcagcctcccaaagtgctgggattataggcgtgcactactgcacccagcaaaactcttcatttgtattagtttacctaatactgaattagcctttrtaattacagtaacaaggacatctggtttaaacaggattagaagtgggtctgattgaccctttgtgagctatggtatagacaggtaagttcaagtctctgggcagtggcttgccagctgtcagcatctagtatgtcctgggggactttctgcttccagtctgttggatttacagagggatcagaaagcttcagttaatctgccaatttgtttaagttgaagttgttcaaaagagctactgccatatttaattctggagttttactgtattctggagaacaagaattgtttaaagctttatctctaggaaaactgtgggagcaaatcaaatgtcttgattctaactcctttgaaaatcattttgaaaaaaaaccaatgatttaaaactggttcggcaatttttactttaggaacggcatagaaaaattgaactgagggatctgaactcggcagttttgcttttagttaccctcgtaacatttggcaytccatgaggcatttgtggctcttggaggtttagcacagaggccagttctgtctttcctacccctcttgtgggaataaagagctacatgggacacgcactggcccactcaaacgacacttgcataaaatgctcactggggcctgtgccattttgcaataattattataaaatcaaatgcttgaaagcatatgaaatatctgcttttatttcttgtactcttaaggaggctgactgtgagggacaaggaagatactttttaaaatcccaacaaataaacaaaaccaaagtacaacttgtttccttagttttagggcacagaaatggaaacaattctagcctctattctaaccaggtagccgggcttgcgattccgtgagccagtttasgctccgtccctcttactgtagggctctttttagtcatcaggcagacagtaccaygcgtattycaaaatctcagctggctcttccgttttagaggcttcttttgaaagtcgacagaagaaactgaggggcatggagggaaggaggagaagggacacagcagcgcagcgggtggtgtggaagatttgattgagactytccaacttttaagagagaatctagagccctgcttttgttttgtcaggaaaattccatgatgtgtctgagagcactcactggactccgtttcttaaygcaagcgttcattatatccgagagaactatccccttccctgggagaaggtaggcrtggtcctccaatccttaaaatatttagcaccaaacctgccatgcactgtgtttgcacccgcattgaccccatttgtaccgctctgtaagggctgcccaccattccaccttcagtgtcatgcacattgcttggacatagtagatggctagctaatacttgaattacttataaacacgktttgggatacatcacttcatcattttgctccaatagtaattaatctgaaagcacttccaacacatcgtaaaacgtttccaaaagtccttatggttttgtgtgtgtgtgtgtggttttgtttctgtttttgtgtttttcagacagagtgtcgctctgtcacccaggctggagtgcagtggcgcgatcttagctcactgcaagctccacctcccgggttcatgccattctcctgcctcagcctcccaagtaactgggactacaggcgcccgccaccacgcccggctaatttttttttttttttttttgtatttttagtagagacrgggtttcaccatgttagccaggatggtctcgatttcctgacctcgtgatccacctgcataggcctcccaaagtgctgggattacaggggtgagccactgcrcccggcctgtgtgtgktttttttttttttgagayagagtcttgctctgtcgcccaggctggagtgcagtggtgcaatttcagctcactgcaacctccgcctcccaggttcaagcaattcttgtgtctcagcctcctgagtagctgggattacaggcaagagccactgcacctggcctcttatgtggtttttaataactagaaactgcaatttacttgcctgaaattttttgttaggtctcagtaacataaawgaatttatatttattaaaacttttaataggattgttattataaaatcacccaaacacacatgactctaatttgcttgtttggcaggacacagagaaactggtagctttcttgtttggaattacttctcacatggcggcagatgtcagctggcatagtctgggccttgaacaaggattccttaggaccatgggagctgtgagtacatccctttatggggaatgactttatgggagtgatactgtcwcacctaagatcaaaacctgacygttttaaaagaaaggaaaatgttaggttattcagacttctgcccaaagcagtgtttggttagagtcccatcttttccaatttgttccttttttttttttttttgagatggagtctcactctgttgccaggctggaatgcagtggtgcgaaggcgcgatcttggctcactgcaacctccaactccctggttcaagtgattctcctgcctcagcctcctgagtagctgggattacaggcacgtgccaccatgcttagctaatttttatatttttagtagagacggggtctcaccatgttggccagggtggtcttgatctcctgacctcatgatctgcctgccttggtctcccaaagtgctgggataacaggcataagccaccgcgcccggtccaattcattccttttattcttcttgccaactgggtagattcatccacaagagcagagtggctaatgtgtactgaaaacagtcatagatgtgatgttttgttttagtcacaaaaataattgataaatcttatgctttattcaagctgtatatcttaagaaggatatgaatacctgccacttggttctatttaaaagtaatacttctactttattggactttttctctctcyttttaactttctatatgaaaatgccatgtcctcaaactgaaaattgtgatcttacctgatgacttagcctctggaaggccccctggtccttaatttatgttaattacattctgttagaagtttcaacttcaactcagagatttttatatatatcctataaggcagagttgtctgtagtagctttattgccagacatatgtatccaactcagctgcatatatatgtgtgtgtgtgtgtgtgtgtgtgtgtatgtgggtgtggttttttttgttgttgtttttttgtttgtttgtttttgagatggagtttcactcttgttgctcaggttggagttcagtggtgcaatctcggctcactgcaacctctgcctcccaggtgcaagtgattctcctgcctcagcctcccaagtagctgggattaccagaacccgccaccatgcccggccaattttttgtatttttagtagagatggggtttcactatgttggccaggctggtcttgaactcctgacctcaggtgatccacccgcctcaacctcccaaagtgctgggattacaggcgtgagctaccgcgccctgcctttttattattattatttttttactaataaaatgttagtgtgaaaattgagtstattatgcgtcctcagcagttcattgagttagctgtcatctcccaccacttgcttgactgtggaagtaagagttggggctacaatttgtaatacacaccagatggttctctttctttcttagattgattttcacggctcctattcagaggctcattcggctggtgattttggtactgtttatttacatttgctaaattttctcgtggtatagttcacttataatgacatcactactgtgctttaaatatgtgtgtctttaatattttgctggttgcatgtattttctatttaatgttgcagttcatttagagtagagatgtacctcatttaacatagagatgtatttctaaaaacttgtgtctatatgtatttttttgttaaaaaattctacactttgttgttgacatgtcataattttagaaaaactttacttatacattgggttaaaattcattagctagtgtctcctactttcctaatactttagctttaaactagtaaactccaccttttgcctgtagtagtaaattgcttttaaatatttaaactaggtggtgaatggtgtttattaaacccttatggtcgatatttccttaaagtaaaacaaaaaacacctttggttatatggccagttctttcttaatttatatgtttcactaactaagatttttaaaagataattttttcttaaaaaaaaaaaaaaaaaaaggcggcctggcgtggtggctcacacctgtaatcccagcactttgggaggccaaggcaggtggatcacctgaggtcaggagttcaagaccagcctggccaacatggtgaaaccccacctctactaaaaatacaaaaattagctggscgtggtggcgcatgcctgtaatcccagctacgagggaggctgaggcaggagaattgcttgaacccaggaggcggaggtttcagtgagccgagatcacgccattgcactccagcctgggcaataagagcaaaactccgtctaaaaaaaaaaaaaggcatgcctttacctaaaacaatgaacaaaaacatgtaataatgtgaaaaactaataatccaacttgtcagacctcatgttgaatagatgcatgctatgtttgtcactaatccaccaaatgtcaatatttttctcataccctaggaggagatgtgttgagccagtttgaatttaattttaattaccttgcacgacgctggtaagagcaatgtacatctaaatatgtggtatctaagtggcatttagagccttgactttttttcttagaaaatayaactgacaatataattagaagtcttctgcactggtaaattttgaaaagtaaaattgcatattagcatagtttagattctttgagaaattgaattccactcaattttgaatggagtggagttgctgagtcatagtttactttttcaaaatgatcatcttaacttatgctcccattagctttgtataatcattctggttcttctgcattctccaatacttggtattgtccaactgttaaaatttccagcctgtttgtgtgtaatggtatctcattgaggttgcagtttgaatttcccagattgctaatgaggtyacacttttcttctattttatggatcatttgtgtttgattttaagtgaaaactttttccagttttcagtctatttttctgttgggttrtttatcctttttatttatttgtgagtatttatatattctggcttctactctcttgtcagtttgtcacttagttattacaaatgtctttcacagtttgtggtatgtcctttcacttattgtgtatcttgacaaacaggatttgttaatattcatgtagttgaatagatcagtttttcctttgtaatgtgtacttctgatgtcttatttaagaaatccgttcttagctaggtgtggtggcacagcatctgtagtcccagctactcaggaggctgaggtgggaggatcacttgagcacaggagtttgaggcttcagtgagctatgatcgcgcctctgcactccagcctgggcaacacagtgagaccctgtctcttaaataaaaagaaagaaaacctttctaccttgagggcaaatggttattctcttacatggacttctaaagcttttatagttttatatcttagctttatgtctttgatttaactggagttaattttttgtatgttctgagatgtaaatctaattttattttttcctctggagataatggattgtcccagaatgatttatcaatagtctcccctttccttgctgatctacaataccttctctgttttggttttctgtttctttctgtctttttttttgagccagtctaactctgtggctcgggctggagtgcagtggtgtgtgatcttgggtcactgcaaactccaacttccaggcccaaatgatcctcccacctcagcctccacctggctaattttttaatgttttgtaagagatgaggtcttgccatgttgcccaggctggtctcgaactcctgggctcaagtgatccgcccaccttggcctcccaagtgttgggattataggtgtgagccactgcaccccctttgggttataaattaaaatgttatgtatatgtatgggtcagtttctgggytttctgatatgtccttttggtccctgaacaatattgattattttaattgctgtagctttataataagtcttgggctctgttagggcagatcttataactagtccttctttttcttcaaaagtaccttgcctattctttgcctttgttctttcaaataagatttaggctcaagttgtcatgttccaagaaaaactttgctggaattttgattaagtgtttattgaatctagagatgaattggaaaattaacaattttgaaatattgaggccaggcacggtggctcatgcctgtaatcccagcactttgggagggtgaggcaggtgaatcacctgaggtcaggagttcgagatcagcctggccaacatggttaaaccctgtctctactaaaactacaaaaattagcctggtacgatggcacgtgcctgtaatcccagcaacttgggaggctgaggcaggagaatcacttgaacctgggaggcggaggtttcagtgagctgagatcatgccattgcacttcagcctgagagacaagagcaaaactccgtctcaaaaaataaaaaaagaaaaaaaaatttaccattcaaataaaaagatttgtaagttataagtaagataacatcactatttatttctttactttttatcaggtttatctactgattattaagagagaaattagtttcaaagatctcccacatgagggtagatttttcaatttcttgtagttctgtcagagtttgctttgctatatagattttgaagatatattgttaggtacattcaatttcaaaaggataccttgtgaattgagctttttatcgtgaggcaaaatccctctttatctctaataatagttgctgcattaaagtctcctttatcagatgtgactggagttatactggtcatgtttggtgatattccatggtgctagaataagtaggctcaagttaagaactgccgagatcatgccactgcgctccagcttgggcgacagggtgagactccaactccatctcaaaaaaacaaacaaaaaaaaaaccgtccaggttccaaacctaacgtgtagggtgtggcacacgttctcagggcaaaagctggttgtcccatttgcttacctcccagggtttttttgtttctagttgtttttggcctttgaaaaatttctgctgtcctgctagcttggtgattcatttaaaaaaatattttttgttattttgtctgactttttaagctatttttattgggaatgccattccagtgctcttataaaataaaaaatgagtctctcaattgtttctttcttttacctactaaaagaaacctactaaagttagattttattggttgcgattttttatcttgtttattctgaggatttttttttttattatactttaagttttagggtacatgtgcacattgtgcaggttagttacatatgtatacatgtgccatgctggtgcgctgcacccactaactcrtcatctagcattaggtatatctcccaatgctatccctcccccctccccccaccccaccacagtccccagagtgtgatattccccttcctgtgtccatgtgatctcattgttcaattcccacctatgagtgagaatatgcggtgtttggttttttgttcttgcgatagtttactgagaatgatggtttccaatttcatccatgtccctacaaaggacatgaactcatcattttttatggctgcatagtattccatggtgtatatgtgccacattttcttaatccagtctatcattgttggacattggggttggttccaagtctttgctattgtgaataatgccgcaataaacatacgtgtgcatgtgtctttatagcagcatgatttatagtcatttgggtatatacccagtaatgggatggctgggtcaaatggtatttctagttctagatccctgaggaatcgccacactgacttccacaatggttgaactagtttacagtcccaccaacagtgtaagagtgttcctatttctccacatcctctccagcacctgttgtttcctgacttttgaggatttttaaattaaaagatgattgagtataaatctggtttttaaatgctgctctttgcaatggaaataactaatatttgtgaaccaaaagcctgatttagaattcttttcattgctttatactgtaaaccaagaagtatctgagacaagtctcaatcaatttaggaagtttgttttgccaagattaaggacacacccatgatacagcctcaggaggtccggatgacaacatgtgcccaaggctgttggagcacatcttggttatctgtacattttagggagacttgggacatcaatcaataaatgcgaaatggctrttggccagttagctcagttgtggtgctaatgacaccagggtcgcaggttcagtccccttacaggtcagttgttttggccaggcatggtggcgcaygcctgtagtctcagctgcttgggaggctgaggcaggagaattgcttgaacttggaaggcggaggttgcggtgaaccgatatygcaccactgcactccagcctgggtgacagagtgagactccatctcaaaaaaaaaataaaaataaaaaaataagtaaaatgtccattggttcagtccagaaagatgggacaactcgaagcgaggaggaggcttccaggtcataggtagctatgagacatccttccgaatttccaattagcctttcactgaaaatgcagtttacagtaatagtgtcacttatgctgtagtctggtttagtgaaacaattaggcaaaggaagcaatcagatatacatttgtctcaggtgagcagagggatgatatttgagttctatctgtcctttgcccacatgaatttccttgtgggcaaattgtgagggaggtatgtagcttttaatctttgtagcaatctcacttagaaatagattgggagggccaggtgtggtggctcacgcctgtaatcccagcactttgggaggccgaggcaggtggatcacctgaggttgggagttcgagaccagcctgaccaacatggagaaaccccatgtctaccaaaaatataaaattagccgggcgtggtggcacacgcctgtaatcccagctgcttgggaggctgaggcaggagaattgcttgaacccgggaggcggaggttgcggtgaacggagattgcaccattgcactccagcctgggcaacaagagcgaagctccrtctccaaaaaaaaaacaaaaaacagaaaacaaaaacaaccacacagaaaccacacagaaatagattgggaggcaggtttgccctacacggttcccagcttgacttttccctttagtttagtgattttggggttctgagatttattttcctttacaatayttttatactttggtatacttttttgtatactttatatactctgaaattaagatgtcagggtgagragacatttttataatagtgtttttaaaataattcttttcaattcaacttgaaacmatgaaaatactttaaattacttcttgaactctgaattcacaaaattaaccactctttttgtacgttatagttagtttccaatctgagtatacctacataaatatttgatttaagttaccagttgtttgctctgcatcattgggccaattatttaacttttctgtgccttaatcatttcttcttatgtaaaacgggaatatgatagtactaaccacctgaggtcattgctaggattaaataactrgtgcatgtaaagacttttacatggtgcctggcacaaaataatcacggaataactggtagctgctgctgctgttgttactattttcagcttcagaatcaaaacaactcttactttattctgcatttttcaggtatgtgccagtcaaagatctactgggaatttatgagaaactgtatggtcgaaaagtcatcaccgaaaatgtaatcgttgattgttcacatatccagttcttagaaatgtaagcgtaaytcagaggacaatttgcarctgattttgttgtgacttcctttgcacagtttttatgtttttgtttcctgagactggattttggatttatggattctgcttattcaaaggcagttgcatgacggtggaaaagggtggatggaactttttcttcattatttgcttcatttctctgttacaaactgcaactcacagccaaaattattgtttattttgcaggtatggtgagatgctagctgtttccaaggtaaaggcgtcattcttccaaatcttaaaggattataaagataccaggaatagtaccatattcattttattttttctttctctctgccatagttatatcccacttactctacaaagtccccgtttttggtggaacaattccaagagtattttcttggaggactggatgatatggcattttggtccactaatatttaccatctaacaagcttcatgttggagaatgggaccaggtgaattcatattgcatttctattaccaatcactctctgcctttttaccccatcccccaacataactctcaggtttttcaactgatcacataaaaacaaaacaaaacaatctcatgaagtgcttttctaacctattcaaagagggaaagaatggaaactcagtgatcttataaacttgactggttcycatccagttggcttggttgatgctgctcgtgttttagaaatagagagacagttattgcaatatttggggtctgtgagaaatggctcagccaggcaggaatcagcctccacaggtggtgctccatttgtttctttctttttattttgagacagagtcttgctctgttgctcaggctggagtacagtggcacgatctcggcttcactgcaacctctgcctcctgggttcaagggagtctcgtgcctcagcctcccaatcagctgggactacaggtgtgcaccaccatccctggctaatttttttgtatttttagtagagatgaggtttcgccatattggccaggctggcctgaaactcctggcctcaagtgatccacctgccttggtctcccaaagtgctgggattacaggcatgagccactgcacccagcctccatctgtttcttttgggaaaacccatgctgggggctggagtgccaggtctccacaggtcccagagtggctgtgttcttgctgtggtgacacacctctccaccctgactacactctcagggtttcagggtgtcaaaggatacctcacctaatactaaaaaaacagaagcaaatagagctatagctacatgccccgacacacactccaacgtaaaatgagaaataaatgcatttgtaaaacattctgttgaaatttgacatctagcccagatgggacagctgctgaacctccagttccttttcttctcctaagcatgctcaggacaagaattaatcagaaactcagccgaaatatagataaggtagactgtgattgtccccacttctagctgtagtagatcattagactctcacagagtcttacactacccctagatcagagggagccaaggcccttctgataacccatttctttctttttcttttttttttaagagcacatgtgtttttgttttttgtttttgagatggggtcttgttctgtcacccaggctggagggcagtggcattatctcagctcgctacaacctccacctcctgggctcaagtgattcttgtgcctcagtctcgagtacctgggaccacaggctcacaccactgcaccaggctaattgtttgtatttttggtagagatggggttttaccatgttgcccaggctggtctccacctcctgagatccaagtgatccacccgcctcagactcccaaagtgctgggattacaggcatgagccaccatgcgtggccggaaaacccatttctttttttttcttttcttttcttttcttttctttttttttttttttttgagacagagtcttgctctgttgcccaggctagagtgcagtggtgcgatctyggctcactgcaacctccacctcctgggttcaagcaattctcctgcctcagcttcccgagtagttatgactacaggtactcaccactacacctggctaatttttgtattttttgtagagacagagttttgccatgttggttggccaggctggtctcgatctcctgacctcaagtgatccacccacctctgtctcccaaagtgctgagattacaggcgtgagccaccatgcctggcccagagaacccatttctgatcatgctgttggacatgcagcctctccccactactgacctgaaccgggttgagatgtgggtgtggctaggaagcacagggcagcccccgaatcggggaaagggcagagcgggaagcttaggctgtaccaccagcagtgggaaagagggttctctgggcgggacctgtgcctgggagactgttccaggtcaggatcatagcagagttagctgttcataagttggaatggcctacagaatgtagatccagaatattatactgggtgatattcctttacccttataaacatttgctagtacccaaacagtgttaaccataattatatattgtgttgatttgaaacaaaattccctttgatgacaaattcgaccttagcttggtacataataaacttgtttttaacaatcggtgagtaacaatttggcagggatagcaatctcatatgaatgccacttttaatagtgaaataaacctcaactaaaatccccaagctctcccgtggacctgggtttttaggtgcatactgccgtggttgtacagaatttaagrgatctgccactcactactgagttatctggaacaagttgctaaaccttccaaaatcttatttmctcacctataaaattgggacagcaatactatttttaccataggatttttgtgaggagtaaattagatcagtcatgtaaagggtttagaatagagtaagcacttactaagtattggttactattattattagaaggaagcaaagtttgtattggaaggactcataacataagggcatgtttgagtgattgacctgcacttacttgttttatataatccaaactggaaaacattttttggtgttcaattttggtttggttctccaaatagctaaggaaagatagctggaccttattctttcgttaggaaaagataattgagaaagaacatatttcttgtctcttgatccctgtcccaatttaccaaggtrtaaaattccatgagttgattgcttgtttgcatacatatacaaagaaagattcatcagaatttatgaaaatgtatgggaaattcagagaagtctccaaaaagagacaacacaaaaaaattcataacagaaaggaaaacataaatatgttcatagtaacaggcatttcccagcttactaacacaggttatcttccaaagctcacttatgttatttggtatattttccttaaaaaagcaatgaagtagtggtagttacattgccaagaactctactcacctcaaactctatttgaaagtatagtgctaatgctgtaaggctgccttttgtgtcctgtggtggacaagaaaaggtccaaagagagaaccttttcctcagctcaaacctggccagagaaatgttttggtaggaagagtctgccttcagctttttcccacctcctttttggaattcctttttcagcaactaattttcttcacccctacactccacattacttttgtattaccccagcctccctcagtgacctccatacaaatcttaagatagtcttcattccagaatactcttcttatattaatacctgcttcctcagtgcttctgttcagtgttgggggaaagcctctattgggaagagtttatctcttaygttctcagaggctttttcacttgtaaaaggggatcmttcattagctatttaattattgaaattatggaattttttttaaagaaatgaaattgagaaattcagacacatttaggcataaatgtgtataattgggcagaaggtgacataattggtaaccagtgttgataacactctcaaattctgagacgtttcgtgttagcgtggaacagctcagcaggtggagcggggagggaagaggaaggctgagtctggggtgactggcagcatgagccttcctggattaccatgatagtgacaaccgtcagcctacccaccctctctgggagaacrtgggctcttaattagtcctgtatggctaggtaataaacactttaagcctttgggagatgattgaagcgcactaccgattctcggtaaaattcatgcttgtgaagaagtagayaaatggctaactcatttgactgtttcctcagtgactgcaacctgcctgagaaccctctgttcattgcatgtggcggccagcaaaaccacacccaggggtaagtggattccaaaattgttcatagaaaaagtacatctcacctggaggagatgccctatagakgttgagaacacgggatctgttgagagacagctgtaggttcaaattccagatttgtcacttgcagctgtgtgatttttaaacaagctgcttgatttttggagctatagcttcctccttttgcaaaatggaaaaagcacatcaacactcccagaattatggtgtggatgacatgcagtggtggatgtaaagcaattagcacatgttgagttgctcattaaacggtagttagtggctgggcacagtggctcatacgtgtaatcctagcactctgggaggctgaggcaggaggatcccttaagtccaggagtycaggaccagcctcagcaacatagtgagacccctatatctacaaaaaatgaacaaaattagccaggtatggtggtgtgtgcctgtagtcccagctacttgggaggctgaggcgggaggattgcttgagcctaggagttcgaggctgcagtgagctgagatcaggccagtacactccagtctaggcaacagagtgagatcctgtctcaaaaaaagaaagaagaaatgtagttagtattattgtaactatcaatattattgtcttactcataaacttcacccagattttacatgaaaatttatttattgatgagacagtgttgggagaagccctcartgttaagggccagaagcctggtttgtattttaagaaatgatattttctgctggagtcaggtaccaaccgacagtcatttatgcattcatttaataagttattaatattacaaatatgtgtatatttattaataaaatagaacaaaataacacaaataataaaatatcatttattaatcagtacgtgccaggaactggttcaggcactagagatatcattgtgaacaagacagaaacagttcctgctctcaggtatatggcctggcaggtagctgggcactaaacaagtaattgtggacattgttaagtgttaggaagaaaaaatgcaaggtgctctggggatttgcaagcgtcctggcctgggcacaggagggttctccttgaagaagtgatggcttaacagatatttaagtgtcaggaattaaaaatgcagggtgytctggggatttgcaacagagcgtcctggccctgggcacaaaagagctctccttgaagaagtgatggcttaaccgggatatttaaggatgatcaagagtgagatatactcaaaagtagagtattgcaatgataaaggtactgagaggaatgatcttagcactttggaagaatgaaaattacacagaaagtgttcagtgaagtcgtcattgttgtatttgaattgggtaacttttttttttctttttctttttttcctagcaaaccattccttcaacatactttgttgttgtttaatcacattgagcaccttttgattaggcttgcaatctttcttggggttgccagaaccctgacactagttggtgtcatgcccagggccccgtcasttacggctgttgtccactccctacttcagtcatttctgaagcctctctggctccctgagtcatctgctttttggctggttgacatctttgaatgtgaaaatgtatttttattgtataattaattttagcatgtctttgaagataaatcagtatgctggctgggcgtgatggctcacacctgtaattccagcactttgggagaccgaggcaggtggatcacctgagctcaggagttcgagcccagcctggccaacatagtgaaactccatctctactaaaaatacaaaaaaatyagctgggtgtggtggtgcatgcctgtagttccaggctactcaggaggctgagacaggagaattgcttgaacccaggaggcgaaggttgcaatgagccgagatcgtgccaytgcactgcagcctaggtgacagagcaagactccgtctcaaaaaaaaaaaaaaaatcrgtatgcttgcaaagcagtttccccaccagctgatacctgttgctaaattttttcataatctggaaagaattgaagccttttactcctaccatagagctctgatattataggaartatgttttataaggataggcttttaagccttagaaatgtgtttactaaaagattttgtgaaatgaaggttttctaaaactttctgtgttgctccttcagccttctgacgttaaaattttgtggtcttttaacctgtgattaacwtgactatattcttcaactcagttttacrgggggttgttttctcagtcgtaaccagtttattcctctttctcttcaacagctcaaaaatgcagaaaaatgattttcacagaaatttgactwcatccctaactgaaagygttgacaggaatataaactatacygaaagaggagtgttctttagtgtaaattcctggaccccggtaagaattttctgctctaagttgagaaagaggaatgctgcttcttgagataccttgtttcgctgagtccctgggtatttatttgtccattgaaatttacctgtggtgggatgtggtggctgggaggctgagttgagaggatcccttgagtccaggagtttgagacctgtctgggcaacatagcaagaccttgtctctataaaaaataaataaattagctgggtgtgatggctgtgcctgttgtcacagctacttgggaggctaaggcaggaggattgcttgagcccaggagttcaaggctacagtgagctatgatcatgccagtgcactccagcctgggtctaagcatgtgccaggccggcaaatactcttggcatccatatgtggtttgttctggagatgccctgagtctgcacctcagtggtctctgtcaagtcaagatgaccctgggcacccaggccaatccttctttggacttagtcccaaaggcgttcacaatgttgaaggctcactgtgcatagccccattgtgtatgaaattaatcaatgaagttagctgttaagtgaagacactctactgggggatataaaatgaaagacaaatgaactctgacccttaaaaaatttcagtctgaaaggagtgacaaatacaaaaataaccattatgtgagtagactgcaacacataccatggtgcggtaagtgcatcattagatagtagggagaatgggcgtggtggctcacgcctgtaatcccagcactttaagtggctgaggcaggtggattgcttgagctcaggagtttgagactagcctgggtaacatwgagaccctgtctctacaaaaaagtaacaaaaaatcagctgggcatggtagtgtgcacttgtagtcccagctattcgggaggctgaggtgggaggactacttgttcctggaaggcagaggttgcagtgagctgaggttgcaccactgcactccagcctgggtgctagagtgacaccctgtctcaaaaaacaaaacaaaaaaaaartagcagggagaaaagcttcaccttggaggctatcagacagagaaggcttcctggaggaggggacattcaagttaggtcttggacagtagatagtatttcatcagtgagagtacatttctgttagtgggttgggaaagtttcaggtgttgggaaatctgagtagtcgtatttgcctggagcacaggacaaggaatatgagttactgtgagaggcttaggaagctaagtaggcattggattgtagtgggctcttaatgtcagaagggtttagacaactttgtgaatggggtctctgagaattgcggaagggcctagtttaggtttaatatactgctgtcactgccttaaaattcttaacaattttttttttttttgagacagagtcttgctctgtcacctgagctagagtgcagtggtaccacctcagctcactgtaacctctgcctcccgggttcaagcaattccctgcctcagcctcctgagtagctgggattacaggcacccgccaccatgcccagctactttttgtatttttagtagagatggggtttcaccatgttggccaggctggtcttgaactcctgaccttaggtaatccgcccacctgggcctcccaaagwgctgggattacaggcgtgagccaccacacccggctttaacaatttttttaacaaaaggctgcatgttttaattttgccctggcctccttaaattatgtagctggtcccggaccggggaggggaacctctatcaaagcacatgtcattttgtcttgccatatttggattttctcctttgcaaaaaaatgaattgtctaaggagggactttatgttcccagtgtctgctgtggtacctggcatatagtaggagctgattaattgcttcctggatgaatgagcaagtcagagctaggctttaggatgaagcaatctatgcatggcctgccagtgagattagaatgggcaaagcagaaggcatactcgtgcctgaaagatcctcagaccctgtgcttttgcagmgcctgagccatctgggctgccttcatgctctgagccaactgtgctctgctttggagcagacctaggaaatcttgtttggtctcatgtcacccttgggcagatttagagttgtgtccccttaacttggatggatctagtatctggccagcttgttcagggccactctcgtttgtgttttttgtctctgcagtaaccacattaagaacgattcagcatcccaagctgaggggcttgttgtcccccaaattctgtggtgtacggctcctagcattctgcatgtgacctctcgtgcctgcctggcagcaaatacarccrcatctcagcttgggtgtggtttggaggatatcgttttttttttttgagatggagtcttgctctgtcacccaggctagcgtgcagcggcacgatctcagctcactgcaacctccatctcccaggttcaagcgattttcctgcctcagcctcccaagtagctgggactacaggtgcccgccaccactcccagctaatttttagtagagacggggtttyactatattggccaggctggtctcgaactcctgaccttgtgatcctcccaccttgacctcccaaagtgctaggattataggcgtgagccaccrcgcctggccggtctggaggatatctttggcatcctgttgttccagtttatttgtttgttaatatatatacacatatacaaatacaattaaagttctgcattgaaaggacttgttctttttcttgttgttgagacagagtctcattctgttgctcaggctggagtgcaatggtgagatctcagctcattgcagcctcaacctcttggatgcaggtgatcctcccatttcagcctcccaagtagcagggattacaggcacgctccwccacactcggctaattttttgtattttttgttgagatggggtttctccatgttgcccaggctggtctcaaactcctgggttcaagtgatcctcctgtctcagcctcctaaagtgctaggattacaggtgtgagccactgcacatggacagacttgtcttttaaaaaattttagtcccctgggcatggtggcttacgcctgtaatcccagcactttgggggagccgaggcaggtagattgcttaaggtcaggaattcgagaccagcctggccaacatggtgagaccccatctctactaaaatacaaaaattagctgggtgtggtggcgagcacctgtaatcccagctactagggaggctaaggcaggagaattgcttgaacccagggggcggaggttgcagtgagttgagatcgtgccactgcactccagcctggtgacagagcgataactctttctacccatgctggtcccaacctcttgggctgtaactctgccatccctcagcataatttgggggtatgatttcactatcctaattgcctgtcctaagtgatcttacttgctgataggacctaatgttttattttattgtttagcacttctaaaaactcatttcctttacacaagtccaatactttggacaggaaacagtagctttgttgattakgctacgtgtctttactgtctataatgattcttttatttcaggattccatgtcctttatctacaaggctttggaaaggaacrtaaggacaatgttcataggtggctctcagttgtcacaraagcacrtctcyagccccttagcatcttacttcttgtcatttccttatgcgaggcttggctggtacgtataagtttatctaacttgtgaatgttttcttcagtattaattttattcaatcattctgcaactgttttttatttcattttattttattttatttttgagacagagtctcacttgtcacccaggctggagtacagtggcttgatcttggctcactgcaacctctgcctcccagkttcaagtgattctctgcctcagcttcccagtagctggggttacaggtgcgcgccaccatgcctggctaatttttatrtttttagtagagacaaggtttcaccatgttgaccaggctgatctcraacttctgggctcaagtgatcttcccgccttggcctcccaaagtcctgggattgcaggtgtgagccactgtgcccagccctctgcaactgttttaaatggtgcttgttagcaccttgyttgtcaatgaattcatcatcaacaaaagcattaatttatttgattaaaaaaatttttttttctgtactagagatggggtcttgctatgttgcccaggctggtctcaaactcctgggctcaagcgatccacctgcctcagccccccaaagtgctgggattacaagcatgagccactgcacctggccaaaagcattaatttaatggttaagttattgtaacaatgaaatgatctccttacacttggtcaaatatgtttaaatacaaggaactttcggtttactaaataatcacaacaataaaggattgtttcatggaatttttgtaaagctctgatgttcttggagataaattcttacagatttcttttgtaatctagtcacatcagaaggatataagcagatagctgttatagtgatttaaatattgtaacttcatatggtaaaagctggtataccatgacagttttataaagagaatgttaggaattcctctgattttaaaattcaaccaaaactaagcccccaaaataaataaaaaaataaaacaaaacaacaacaacatacaaaactaaccccaagtatataaaagtgactattttctggaagtttggatgaaggctttttaaaaaaatcatactccttaattccaaagggcattgcatttccttggcacaatttcctgacagtccttcctttcagggcttctgtgcattcagctctagtgcaggagatggggaggtgaatgctgtctttactggtcgttsacttgtgtgtatggctacctccctgaaagatccgaaaggcctcctgctgggctggcagctacataagcacagccagccacaggggcatccctagggccattactggccagcattgagcctccaaagtgcagagaacagcaaygggtccactggagtgtctgtccctcccaccaggtatcacagccttaaacaactgctcttgactttttcctttgttctgccgtttgttctgatttcggctcactgggttctctgcctcccgggttcaagtgattctcctgcctcagcctccaaagtagctgggattacaggcgcctgccaccatacccagctaatttttgtatttttagtagagacagcatttcacygtcttggccaggctggtatygaactcctgatctcaggtgatccacctgccttggcctcccaaagtgctgggattacaggcgtgagccaccatgctcggcctgccatttgttctttatgtgatgataagcactagaataaacaaatgacttttggtctttccagcccctgtagtgacacttgaacctttgactcggtttatccagctctgtaactggtggctcttggaatctcatctaggagcctctactaaacatgtgggactcttgatttggcccactgccaggtgcctttgtggctgtggtaaaaacatagtctatttcacacaagctcgtctttgatcagataacacattgaaacgaattgagcagatcagaaagtggcctgcgccattggctagaggggcttggctggacatgaatttcctctctactctcaggcaagccctggttttgtgtataagacaagcttcatgagtatacttttcatcctctcaggttatgtagtccagaaatgcttagaggccttgatttgtccatttttattttatttttccccttgaagaatgagactgaatcacactaacaatacaacctgagaagtgaatattcacaacagtcacgcagggtggaaaagtcagtgagagaaagttaatggactgggctctagaaaggaaagaagcaggcgacagctttaaccctagtgctcagtgcataccatggtgggtcccttcacttccctaagggcaatgacctcagctgacctcaaccaggatggkcacrgtgacctcgtggtgggcgcaccaggctacagccgcccyggccrcatccacatcgggcgcgtgtacctcatctacggcaatgamctgggyctgccrcctgttgacctggacctggacaaggaggcccacaggatccttgaaggcttccaggtgagacascatctcatcctttctcttctagtggttagtagctactmttgcattttgtggcagattctccaggatgagtaactaataacaagaataattacagtaacaaacagctggtggtgtacatttgtgaagcactttttagttttagaagcatgtttacatcatttattttattctatcattagtctaataccttccaaaaacacacatgctattgagaactgctttgagtggccagttgggatgtgatttcttgataatataattgataatataaaacctctttatacacacacacacacacacacacacamgaaatgtatgtatttataaaactttgtaagtattttattttaattaattwatttatttatttgagatggagtctcttgctctgtcacccaggctggagtgcagtggtgcaatctctgctcactgcaacctctgcctcccgggttcaagcaattctcctgcctcagcctcctgagtagctggtactacaggtgcacaccaccaggcccggctaatttttttatttttagtagagatgcagttttgccatgttggccagtctggtctcaaactcctgaccttaggtgatccacccaccttggcctcccaaagtgctgggattacaggcgtgagccactgcatccgtccagaattttagattcacagaaaaggtataaagacagtacaaagagttcccatgtactgtttactcattttcccctatgttaacatcttacataattatggtatacttgtcaaaaattaagaataaaaacaacactstacatcactattaactaaacgccaggctttctttagatttccttcttttgtcctaagtggttattcatcacctgaaaaaacccgcagtgactacaaacgttcctcgtggagtccaagcattaattcctcccgagagcgctagggtcctggaaagtttttctaacatcagaggctttagtttttgtaacagcaataaggaggagcgtgggggggtggggtagacagagctctgctactagtcaccaatgartstggggcttttggtgatactggcctggcactgcattctctgagtgtcaagtgctagggggagaaccctagacttccagtcagatcgtcgtggttcttgttccaggcaaggcacttaccctttcgctgtgaagtgaatcctgtgaagagaaaataagatggcacacctgaacgtgcttgctttttttttttttttgagataaactctcactgttgcccagactggagtgcagtggcatgatcttggctcactgcaacctctgccttctgggtttaagttattctcccatctcaaggtcacaagtagctaggactacaggcatgcaccgccatgcccggctaatttttgtatttttagtagagacggggtttcaccatattggtaaggctggtcttgaactcttgacctcaggtggtccgtccgcctcagcctcccaaagtgccgggattgtaggtgtgagccaccacgcccagccatgaacacgctttcaaaaataagaagtacaatgatttatgatctagtttaggctctgatgaaaggagctctgaatccaacatgtacaaataaggtgactggtcagtgtgtaaggtcacagtcccagagggacagcatttttcagggccttctgacaccacatgaaaaatttccaaaataaatttatctaatcttgttgcttcttacttctctacaaagcctttccccgacagactgttgtgtaaagtgtaaacctttgggcacatatagacagggaataaagagaggcacctgcttcctgtggctgctaaactctctcaaagaccacttgggtgagaaaggaagtggctccatgccctcctcccctagtgacctttgatcatttcaaagatggcaagataaaggcatggacgaaggatggaaatcctgccctcaggccctgactgcagtgagcatctctgtgtcctcattgatacaatgaaggtttatgataggaaactcaaggcctggcctgctttaaagttctgtgctcctctcggaatgactggctggcccgtaggagggccggatggtgcagctgatagtgataaaatgaaccagtcctcagctggcagagccctgagttattggttcccaccctgccctagcgtgttttgtgtccccaggcaaccttatcttgtttatcaagtttctgccttacagaaaggggcagcacttatagatgccactgcacacgggtgtggagagattacctaataaataatggacgtgggtccttcagcatgtgtgttatgtggcaagcaccactgtgtgaaaggccattcgttgttatgtaagttgtgaaagaattggagaacctggccgggcrcggtggctcatgcctataatcccagcactttgggaggccaaggcgggcagatcctgaggtcaagagatcaagaccagcctgatcaacgtggtgaaaccccgtctctactaaaaatacaaaattagccagatgtggtggcatatgcctgtaatcccagctactcgggaggctgaggcaggagaatcgcttgaacccaggaggcggaggttgcggtgagccaagcactattgcactctagcctgggcaacaagagcgaaactccatctcaaaaacaaaaaacaaaaacaaaaaaaagagaaagaattggaaaacccagtgaattactttcaggtttaggctgattccagacggtaggataagaaagatctagaaagtccactttggaaaaaaaaagtctgaagagattgagttttccatctgtacactgttaaagtgaggatgctaacagttcctaccttaatccatttaaagtgcttagaacaatatctacaccgtcctacaggactttctgcactgataggaatgttccgtagctgtgctgtccagtgcgggagacataaaacacaggctttgaacatttgaaatgtggctattgcaactgaaaaactgaatttttatttatttatttatttattctgtttgtgtgtttgttttgagatggagtttcacttctgttgcccaggctggagtgcagtggcatgatctcggctcactgcaacctctgcctcccaggttcaagcgattctcctgcctcagcctcctgagtagctggaattacaggtgcccaccaccacacctggctaatttttgtatttttagtagacatgaggtttggccatgttggccaggctggtctcaaactcctcaggtgatctgctcgcctcggcctcccaaagtgctgggattacaggcataagccactgcgccagggtagaaactgaatttttgattctatttaatgttaattactttaaatttaaatgtaacagccctatttggctaggggctaccaccttggtcagcatggctctagaacatcctgagtattcaacaaatgttagctattgttgctgatgttatatgattattattttagatactttcttttttgtttgtttgtttttttgagatggagtctcgctgtgttgcctaggctggagtgcagtggcacgatcttggcttactgcaacctccgcctcccagattcaagggattctcctgcctcagtctccagagtagctgggattacaggcatgtgccaccacacccggctaattcttgtagttttagtacagatggggtttcactatgttggccaggctggttttgaactcctgacctcaggttcaggcctcccaaagtgctgggattacaggtgtgagccaccgtgcccggcctattttagatactttcgaagataagttttgtgcttaatgtgggtctgaacatamacgaggctattttctacaaatctagaactcataagaaccaaccctctactttctggcatctctgcttcccctcaaggcagacagacatgctgaaaatatacttagggcagagctacctaactgatgtgttgcagatatgttatagcttactgcaccttcggcttttgggtggcggggggcgggggttgtcccaggcctctctactccctgggggtcaggagtgctctttccgaggccgtggctcagcccaggggaagtaaacttgtgcctcttcagccctcaggtyggtttggctcggccttggctrtgttggactttaacrtggayggcgtgcctgacctggccgtgggagctccctcggtgggctccgagcagctcacctacaaagtaaggctgctgctggatagggttggaggagaatggggtggcagggaggggactctgagggaggccaacgctgggatgagcccctggagcaaagcagacagccagtgtgtgagacagagcatttgtgagcagataatctcaggcccctatggggttcttgccgtgaccttgagttaccttgtagcacctgctgctgcctccctggccttattttggccctatggtttcccaattccaccaggtacttagccctttttttcatcccccaccatgctgaatgccagtgaagggagacagaaatcccagctcatctgtagtttctggttatcacaacagcgaggtgacttccctgggcctctcctcaaatggtggatcccygcctgttgcctcctttcttactgagttagagatcctggaccctggcccacagggcttgcttgcttcccacagatgcttcctaccatagcagggaccacgcatccgggcaccatgtgtgactgtggaggtcgagggccctcccttgccagctgccctctgcagactcaactcttgccccttcctcctcacactccatttctagacatgccagcagtctgtcaygtcctgaactcatcaggctgtctcactttgcgacctttgctcgtacagtttcctctgcttgaaaagctttttctcccctgtctttctttaggagtgacatgtcacttcttgcagaaactattacctaactcctgggcgaggctgatacttccttgtccccacttagcatcctgtgcttgtacctgttatatccccttcttccctgggtgtcataatgacctgtgtgccagcctttcaggaggaaagagattggtcttatttgtcattgtgtacctagtacctggcttatgatggaaaagaagtgcttgtagaatgaatggggatggagacaggcaagttataagaggaactgattggtaacacagaataaaatagcacagtgtgtatcctcaggcaggtaagtggtacmgatgtggtatgttggcattcagatgtgccatgggtacaacaggctgtggcccgggggcttcatggaagagcctgaaactgtgctggtccttgaagtgggcaaggagttgagtaagtcattctgcaagcacactgcacaattgtgtgtggaggatcttgagtaagacatcagggaggcaaagatataaatgacatcatttctgcattgtggactctcatagtctgatggaagtgacagactttaaaaaaattcctttcagcccagcagcaatgcrcagaatggatttctgtctgtcattaagctcccaatcattgggggtgrtgataatttgacaaggtctcgctttaattaaaagttttwttcgtggacacaggatctcactgtgttttcgaggctgctcttgaactcctggcctcaagcaatgttcccacttgggcctcccaaagcactgggattatagacatcagccaccatacctggacccagagtcagtcctttttatcttctgttatttaaggttcttgggtcaccaccagagcctcatgtctrtctgctgtttgtccttatctagggtgccgtgtatgtctactttggttccaaacaaggaggaatgwcttcttcccctaacatcaccatttcttgccaggtatgtttaccactttagccaggtgcagaaacctagaactcgctgtatcctaactgccaccagggctgggtaaaatgtgctttcctggtttcttcttaaggacatctactgtaacttgggctggactctcttggctgcagatgtgaatggagacagtgaacccgatctggtcatyggctccccttttgcaccaggtggagggaagcagaagggaattgtggctgcgttttattctggccccagcctgagcgacaaaggtagtgcctgagggggaatgggtgagaccatggctgctctgtgkgtctacgacaacttatcctgcataggggtttatatcctttttccttaytccatatcatttcaccaacattttctaacagtctgttactcttaaagatgtgttggcaagtgatgtgcatagattcactgaaaatacaaaaggtgacccacagtttctaggtagagagccaaagagggcaaatagactattcccatagtgtctccatgtaaaayagaaacactgaggaggctttgcaccggaggcatctcagtggtgctctcgactgtccatagctgttgttgttgttgttgttgttattgttgttttttctttttttttgagacagagtctccctgtgtcacccaggctggagtgcagtagcataatcttggctcactacaacctccacctcccaggtttaagcaattctgtctcagcctcctgagtagctgggactacaggtggggactacaggcgcatgccaccatgcccrgctaatttttgtatttttagtagagacggggtttcatcatattggtcaggctggtcttgaactcctgacctctggtgatccacccacctcggcgtcccaaagtgctgggattacaggtgtgagccaccgcacctggcccagagcctttttaaatagcatcctctgctccacagaagtgagctctagaaatgtatttcttgtatgaagagtgagattcaatgacattggggtcctgggatcagcatggggacatataagacctctggcaaaaactcagcaaaatgaaccsacttctattaggctrcgagaaggaccctttcttttcatcccagtagtcctctcacttaaagtattagtaaaaaggatgagttgtcttctttagaaaaactgaacgtggaggcagccaactggacggtgagaggcgaggaagacttctcctggtttggatattcccttcacggtgtcactgtggacaacagaaccttgctgttggttgggagcccgacctggaagaatgccagcaggtgaggctgatgctgggggctgggaaccatgaacacaggggcaggtacctgctgctatggagcgcactgagcatgaggctgagggaaaagggctaggaaatgcttgacttttgaaggaaaagccaaggctctgggcaagattgcaaattctcctccttagaaatttaaaaatacaatagacaartgtattattttctcacagttctggaagctagacgtccaagatcaaggttgaggtcagagggttggtttctcctgaggcctgtctccttggcttgcagatggctgtcttccctctctgtgtgtctgtgccccattcctcacttctgttttttcttttgggaggagggggtgagggttcactctgttgcaaagggcagagggcagtggtaactcactgcaggctcgaactcgtcctcctgcctcggcctcctgaatagctgggactacaagtcgtgtgtgcccatgcctagctaattttttttttttaatttaaaaacatttttatagggatgggtttttgcagtgttgcccaggctcgtctcaaactggcctcaagtgatcctcctgcctctcctcttctttgaaagacaccagtcctattggatcaggatccacccaaatgacctcatcgtaacttaatcacctctttaaagactctgtcttcaagtagtcacattcagagatactgggggttagggcttcagtgtagggatcggggggaccaccactgagcccataacagtaggtacccctatatctctatcccagagagtctgctgggaggcctgtcagttgggaggcaggatggtgggtgtggcacctggagagcctggatgttgcgattaactccaatagtccccacacttccaggcctggggtcrcagagacagagcctgctgggaggcctggatggggggaggtgcatttcctttccttgctcctgagtacctggccagctgtcagtcttgtgccctggcagctaagcccagtgtgcttcattctaggctgggccatttgttacacatccgagatgagaaaaagagccttgggagggtgtatggctacttcccaccaaacggccaaagctggtttaccatttctggagacaaggtatgacaagccctccccacacaggagagtggacactccaaggaagttttctcacctatacaatattgatttattgtgtctcacaggcaatggggaaactgggtacttccctktccagtggccaygtrctgatgaatggractctgammcargtgctgctggttggagcccctacgtacggtaggtcacacactgtgaaactgtgcttcctttcagtcatgtggctgcttgtacaygtcgtattggaggaaagtgatgagatctggagctgaacagatctaggtttcaatatttccttttttcattaataacattctgtgtaactttggggaagttacttaacctctcagaacttttgtatcaccatctacaaaactgaaattgtaaatacctatttcaggccgggtgcggtggctcacacctgtaatcccagcactttgggaggccaaggtgagagaatcacttgaggtcaggagttggagaccagcctggcaacatggtgaaactttgcctctactaaaaatacaaaaattagccaggtgtggtggtgcatacctgtaatcccagctactcgggaggctgagrcaggagaatcgcttgaatctgggaggcagaagttgcagtaagccaagatcatgccactgcactccagcctgggcaacagagcaagacttcatctcaaaaataaaataaaaataaaataaaataagataaaataaaatttgtgtttcaaagctttgttgaaaatgacatatgaaagtaacttagtgtatttttaaagcccctatcccatggaacttggagccagagaaaaattgtatargtcagttcactaggaataggtccactatgaggacctatcttttatttttcttttttgagacagtcttgctgtgtcgcccaggctggagtgcagcggtgtgattatggcttatggcagccttgacctcctgggcaaagtgaaccttgcacctcagcctcctgagtagctgcgactacaggcagtcagccaccacattatctaattttttattttttgtagygagagggtctcaacatgttggccagactggtctctaactcctgggctcaagtaatcctcccaccttggtctcccaaagtgctgggattacaggcatgatccactgcacccacccctgaaaacatactttatataaaccattattttgtttactttatgggaaagatagtctttaaaaaaawaaataaataagaaccatttcctcccagattataaaggtgaattatgcttattgtggaaacttctgaaaatacaaggaaatatatagaaggaaaaaaaaaacaccccttacccagatatttaaaaactgaagcttatactatatatgatattgtcatgcctaatttttttacttatatcttaagcacattctcatgktagtaaatattcttctaaaacatgacttttgatatctgcattgcatttttttaatgccagcatttactaacatcatcctgttgctggaattgtaggctcgtttccagtttcacactattgtgaataagtaattattgaacactcatgtacctagtctttgactgcctttctgattagttttttggatagattcctggagatggaattactggagtagaggttctaatctttctaaaagctcttgttatatatcatcaaactatttttcagaaagattgttgtttcttgcaatatgggaaagatttgaataataagcagaagtgggtcagacaggcggggtgcagtggctcacgcctgtaatcctggcactttgggaggcagaggtgggtggatcagttgaggtcaggagttagagaccagcctggccaacatggtgaaacctgtctaaacctactaaaaatacacaaattagccaggcatagtggcacgctcctgtaatcccagctactcctgagcctgaaccacaacaattgcttgaaccctggaggcagaggttgcactgagccaagatgacaccactgcactccagcctgggtgacagagtgagactcagtctcaaaaacaaaaaaacaaaaaaacaagtggattaggcaaaggaatggctaaatttttcattaaatcgaagacacagcattataacaaaaaaaaagtgctgacttagctttggaatcatgttggaagccaaaagaatgagggtcgtgataactcagtataccactggaggctatttgagtaagcagcaaaactgtttctcataaatgcagaatgttggcaaactgacaaactgcatttgccacccagaaggaaagctgagggcagtcacgccccaagtgccgtgtttcttgtgattaggcacatctgaagcctgttaataataatatgaacctgtgatcaattaagcagctgaccaatcgttacctcctcctccctgcttttgctaaccaataaatgggaagggctgtggaagctcgggagctagctgcctttgctcactagaagccgggagctctcttcttcctcggttccccttcctttaaaacagtttcttttgcttcaagttttcatttctacgttcgtcctccttsgttcagtcttgtaatgacgctctcaagcagtaacagtagtaattgctgtgatgacggtctcaagtagtaaccatagcagtcagccacagaatcatttttgcttttcagagtctagggaatgatttctaagctcttgcaacacacattattaactttattttcttcaccactctttctacccaagtgttgtgaattagagtttctcaaactttcttggttttggtgcccttactctcttgataattttttttcctatgataaagtccaatataaaatagaaggtcaggcatggtgggtcatgcctgtaatcgcagcactttgggaggctaaggcaggaggatcactggaggccaagagttcaagaccagcctgggcaacacagtgagaccctgtctctacaaaaaattttaaaaattgggccaggcgcagtggctcatgcctgtaatcttagcactttgggaggctgaggtgggtggatcatgaggtcaggtgatcgagaccatcctggctaacacrgtgaaaccctgtctctactaaaaacacaaaaaattagctgggcgtggtggtgggcacctgtagtcccagctacttaggaggctgaggcaggagaatggcgtgaaccccggagccagagcttgcagtgagctgagattgcgccactgcactccagcctgggtgacagagtgaaactccatctcaaaaaaaaaaaaaaaaaaaaaaaaaaaaaaaaaaaaaaaattagccagatgtggtggcatgcacctctggtcctagctactcagcagactaaggtgggaagattgcttgagcccaagaatttgaggccagcctggacaatatagggagaccccatctctacagaaaaagaaaaaaaggtaggcatagtgatgggcacatgtagttccatctactgagraggctgaggtgggaagatcacttgagcccaggagttcaaggctgcagtgagctatgatcacacccactgcactccagcctgggcaacagartgagaycctattttttaaaagataaataataatagaaaataagtttaattataacttttatgtatgtatataatatrctaatttataaagtgtrtataagtatactaatatataatataaatgtatataatatgtatatattatatatacatgtatgtgtctatatataatgtatgaatgtatatataactatatattatatataaatatraattaatgtcacmatcaggttattgttattgatatatttcacccaaattgttcagattttcccattattacttgtattttacttgtatttcacccacacagtttgcggggcccagttccaaatraaaatgcagggccccttgttaaaacattgttgacaatttcaagtcagagacaggacaacatgaagacaggcataggtcctttcraaatgcagtgcctgtgtgaccacaggggcacatgccctgcatttatgtcctaaccacttagcttctctcggcactgtacagcttttcaagtcttggaatcaggttagacacaactttcytcatttcctaatccacagcaattttttcattagtgcctgctttttatcacaaccatccctgaatatgcagctttgcaaagatgtgkcatcactgaaaygaatgcaggactctcgtgtcgtaactgtgaccggcctccacccagtagttcgtgtggtgtcagatgtcactgttatctttgaaatgtcaaaatatctacagcatctttgcsagttcactgaagcgcttcagtgtgcagtttgggaatcacagctataaggcacagattaatctaaatttgagatttttgatatacttttttttttttttttgagatagagtctcgctctcttgcccaggctggaatgtagtggtgtgatctcaagctcactgcagcctctgcctcccaggttcaagcagttctcctgtttcattctcctgagtagctggaactacaggcaygcaccaccatgcccagctaytttttttttttatttttagtagagatggagtttcaccatgttggccaggctggtctcaaactcccgatgtcaggtgatccgcccgcctcggcctcccacagtgctgggattacaggcgtgagccactgcgcccagtcactataccattttatatcaggggcttgaacatcyrtggattttggtatctgtgagaggccctggaaccaatccttcgtggatactgagggatggctgtattgtttatagtagtaaaaagctagaaatagcctaaatgtgaaaagaatcagatttaaaattttataatccacaaaatctccattttgtttaaaatgtgtgtttatagatatctgcctacctacctacctatctcactttccagaaagaaatatatatagtatatacattttcttctttatgcttttttttttttttttaatagttggagtcttgctatgttgccgaggctggccatgaacttctgggctcaagtgatcctcccatctcaggttcacaagtagccgggaccacaggcatgtgccacaacacctggattatgcttctttttttttttttttttgagtattttttacacttttgataatgatcaaatataaaagatcttcttgacatcttcatagttttgacttttgcagtaatcctgaaagctggtgacattaagtaacttacagttgataatttttctttttctttttaagccatagggtcttgctctgttgcccagrctggagttcaatggtgtgatcacagctcactgttaccttgaacwcctgaggtcaagcgatcctgccgcctcaagcctcttgagtaggtcagactacaggcacatgccaccacaccctactttttgtagtgatggggtctcactgcatttcccaggctggtcttgaactcatgagctgaagtgatcctcctgcctcagcctcccaaagtgctgggattataggcatgagccaycatgcctggcaagtttatagtttttctgagacacaaatatgaaccacattacaagatgataycctctttcctgtggttttcaagagagtagagttggtgagatgcacctgtgtttcacaatagctcttttgttttctgctccctccactggaagaaaagttccacatgagaagtaaaacacttgtgtgtgtatttaaaaaatacccrccacccctgcatcccaaacacaaccctagggactagtgctcgtggcagaaattaagscaatatggaggtctaaaagataatggtccttaatcagagggtttaagcattacagaaggaattctatgttaactagaaggtataagcattacagaaggaattctgtgttatagtagcattctagaatttgggaattcataaaggcctctgcatgtagcccttttaaaagccaaagttcttcagaattattttcagtactgaaataatatagaaatgcctacaacattaccttgagttttttctccttgtctaaatgtgtatgataatccattgtttaatttgcatgattgagaaggtgaggtgttttgaatggctgaaatttccaagtgtctagattcttctgttttaattctgaagaattaaaaaaacactttgatgaaattattttaaattatatgcttctcttctttaacagactgtgatgcgtgttagagatttgggagtattgattaattacaattcttcctcatccttgtgcatttcaaatcatttctgaaatagattcatgaatcattcagagggatatcaaaatatgtacttttgaagagytgacatagttggattagagaacacagtctcaatgggcagccctattcaggctttctaattcttgctccgaaagctagaccttggggtgacttctctgagattctcccacatgcactggggccagtgttcatcctgtgggcggcagagccagagggagaagcctcaggtatcctcttgccatggaaggactgaagcagggagtagacagagagctggaagtgttactggattcctgggcgctccagggagctcatggttcctttaggaggcacgaaaagaaagggaatgtggctgggcttggtggcttgcacctgtaatcccagcacttttgggagactgaggcaggcagatcacgaggtcaggagatcaagaccatcctggctaacacggtgaaaccctgtctstgctaaaaatacaaaaaattaggcgtggtggcgcgtgcctgtagtcccagctactcgggaggctgaggcaggagaatcgcttgaacccaggaagcggaggttgcagtgagccgagatcrcgccgctgtactccagcctgggtgacagagtgagactccatctcaataataaaaaarraaaaaggaatgaagattttctcttatttcaacttttcttgatattttgggctttcactctgaatattaactgttgtgctggcacattgttctcttaggagacattgtgttaggtcatgttgtttgccctgtatcagaaagctccagattgctgagcttttaaaatactctttcttatttcctactgttttctagctgttatatctgactgttgttgccgactctgctttgagccctcagtggcttctagtggacagtttcccataaacaaggcacaagtttgtcygaaaaaacaggtcarattagctcagttttacacacaaaactcagtggacgctgacgtgagattgtatccacrcactgacactttgccagcatacggcaaacttctcagagggccactagccccatcaacccacaggtgccatttatatttctgaaatcaaagctgtgttccaaataataaagtttacagcgaaattccaacaactagctttgagtttgttcaaaattcattaattcaaaaaacactttattgaatacttgtacagaaccaagcaccatgctaggtacagtggatagagagacagagacgtgaccgcatttcttgtggaatgggcgcctgatgcaggagacacagaagtgaatgcagagcgatgctgccctgccgtgggtattcagaaggcactgggcacagctcatgtcccctgtaaaatgcttacctgaactcagaggtcctggggtcaggacacaatcacttgcccatgttttgtgggccccagctgtctgcagttcttgcagttctgtagcgtttgtgcccagagctaaagtcccactggactcggtgttattatgtatgggagcacakggaagcggcctcttctctagaccagcgagattaggaaaggcttcccagaggaggggacacctgagccaaattctgcagggtgacaggagtagccagcagagggatgtggacaggggagcacgcggagcatatgcctctattccaggcagagagcacatcatgtccaaaggcccaaatttaagacatagattgggctgtggtttaagttcattttggtgaagtgtgggtgaaaaggttaatggcgctagatccccaagtgggagtcagattctgtaaggccttgtgaagagtttggactccatccagagtccacttgcgtttggatgtgtcagtcatgggggtgacctagtttgtgatacgagaaaataaaaaggtggctgtgtggagactgtattatggggataagactggaaaaaagaatacctgcctggagggaaatcactgaagctctctggtgtttgtgccttggtgcccaagctggttgtacctccctgactgccggagatgaccagcwccgaaaccgactgtcctgtaggatccygagtgatcagtgtcacttgaggatggggtgctattccgtgttctgtaatgccttcctttctgtgaggccagcaggaactgtggttcrtttcagatgacgtgwctaaggtggcattcctgaccgtgaccctacaccaaggcggagccactcgcrtgtacgcrctcayatcygacgcrcagccwctgctgctcagcaccttcagyggagaccgccgcttctcycgatttggtggcgttctgcacttgagtgacctggatgatgatggcttaggtaagaaaggaacaggaccctttgacaagaattgagtccctttgcccagggggtgggtcccctaattgggtcatctgggctctgcccttataattgacagcccagtggcccaaggacctttagacagatcttgaatgaggcaagaccagagagggagttgcacttcttgaagctggtaatatgagaatcacctgtagtaattgctattgatgaatgaagtaggaaacaaaagcctttgccaggatgaaatcacagccgactaaaggagatactaatattatttgyaagaggttgggttaggatccagtagcggaacaaggaaaagatgacagtgaggagtcaaatacttccttctgtcggtttttattgttttcagatgaaatcatcatggcagcccccctgaggatagcagatgtaacctctggrctgattgggggagaagayggccgagtwtatgtatataatggcaaagagaccacccttggtgacatgactggcaaatgcaaatcrtggataactccatgtccagaagaaaaggtaartgttctacaaaattctatamcttattgggaaaggatcantaattgctgattccttgttaactcatgtccactataaagtgcttacctgaattcatacctcctrgggtcaggacaccatcatctgtccatgttttgtgggccccagctgcctgcagttcttacagttctgcaacatttgtgcccagagctaaagtcccactggacttggtgttatgtaggtccctggtcacacagcctgccactgcttggttaggcacccacagcacagaagaaagaaaacaggccatggccattggagtttctctttttaaaatagagacgggttcctgttccattgcccaggctggagtgcagtggtgtgatcatggcccactgcagcctcaaactcctgggctcaggtgattctcttgtctcagcctcccgagtagctaggactacaggcatgtgccaccacacccggctaatctttttattatttgtagagatggggcctcactatgttgcccaggctggtattgaactcttgggctcaagcagttcttctacctggcctcacaaagtgctgggattacaggcatgagccaccatgctcggccagccactggagtttcattaaaacgtcctctcttttgctttttgtttcatttctttgtttattccttttttgggtgagtttccttaagttacatttcctgggcctaaagcatttggccattatttaactttttttttttttttttttttttgagacagmgtctggctctattgcccaggctggagtgcagtggcacggtctyggctcactgcaacctcctcctcccaggttcaagccattttcctgcttcagcctcccgaatagctgggactacaggcatgcaccaccacgcctggctaattttttgtatttttagtagagacagggtttcaccatgtcggccaggctgggattacagcccaaagtgctgggataacaggcatgagccaccgtaccccacctattttaaaaaatttaaaattattttttaaattgcaaaattagtgaaagtttattatggaaattttagaaaatacaaaaatgtacaaagagaattaaaaattatctacctaaaattccactctgcagagctaatacctgcttacctttagagcggatcctgctagtatttttcctatgaatttaattactaccatttattgtgcatttagtatgcatatgctaagaactatgtatcatttaatccccataaaagctatgaaattggccgggcgcagtggctcacgcctgtaatcccagcactttgggaggctgaggcgggcggatcacaaggtcagaagatcgagaccatcctggctaacactgtgaaaccctgtccctactaaagatacaaaaaattagccgggcttggtggcgggcgcctgtagtcccagctactcaggaggctgaggcaggagaatggcgtgaacccgggaggcggagcttgcagtgagtcgagatcatgccactgcactccaacctgggcaacagcaagactctgtctcaaaaaaaaaaaaaaagaaattaatattatgcccatttacagattaaaaaaattaaagatctcagctgagtgtggtggcttatgcttgtaatcccagcactttgggaggctgaggcaggaggatcccttgagctcaggagttcagcaccagcttgggcaacatagggagaccctgtcttttttttttttttttttgagacggagtctcgctctgtcgcccaggctggagtgcagtggcgtgatctcggctcactgcaacctccacctcccaggttcatgccattctcctgcctcagcctcccaagtagctggggctacaggtgcccactaccacgcctggctaatttttttgtatttttagtagaaacggggtttcaccgtgttagccacgatggtcttgatctcctgacctcgtgatccgcccaagaccctgtcttaaaataaaaaaattaaagatcagcgaggaagtttattcaaggttacactgccaggaaggcagggcacaacagagatttgaaccaagatctgattctaaagcctacccttaagtattacactatgtgcgtgcatattttggttaacaattgtgatcctattgtgcataatttgtgcataattttgtaacttttttttttttaatggagtctcactctgtcatccaggctggagtgcagtggcatgatctcggctcagtaaaacctccacctcccaggttcaagcgattctcctgcctcagcttcctgagtagctgggactacaggcgcacaccaccgtgcctggctaatttttgtgtttttagtagagacggggtttcaccacgttggccaagctggtctcgaactcctgacctccagtgatccgcctgcctcagcctcccaaagtgctgggattataggtgtgagccactgtgcctggccgtaacttgatttttctttctacctaacaatataccgagaacattttcttatgttatctgatattcttatataatatgatatttaccggcygatgagtattttatctacagacaaaccatagtttatttacccattattcaggcaaccattgttagtcaattgtgccatttccaattttcattgttttaaataatatggtaaatagtcacataaatgtttttatacatctggttatttttctgacctgtatttctataagtagaatttctggggtcaaagggcatgcacatttgtaaggctaatcaagaaatgtagaaatgaggctgggcgtggtggctcatgcctgtaatcccagcactttgggaggctgaggtgggtggatcacctgaggtgaggagttcgagaccggcctggccaacgtggtgaaaccgcctctctactaaaaatacaaaaaaattaaccgggcgtggtggtgggcgcctgtaattccatcaactcacgaggctgaagcgggagacttgcttgaacctgggaggcagaggttgcagtgagctgagatcacgccactgcactccagcctgggcgacagagcaagactccttctcaaaaaaaaaaaaaaaaaaaaaagtagaaatgagggtataagggtataattaaaattgattttaaaaagccacacaaacagtaataacattgkctctctcctcaatttttttcttcaggcccaatatgtattgatttctcctgaagtaagtatcccttgaaagactgaagaaagaaaaattaccaaaacaatgccccttggtttattttaaacggataaagtattacactatgttcttcaaagcccattaacrgacggcatgttttacaggccagctcaaggtttgggagctccctcatcaccgtgaggtccaaggcaaaggtgagcccaaggactgaacttcattgatgtttatgttagtactacgggtgggatttggtggtctcacttgttaggtttatttcagattttatttttatttgaaaaggagaggaacacacagaaagtaacattcacatataatctcatcacttccttggtggaaagtttccctttttactcttcctattttatcctctacagcaggggttggggccaagtcgtctgccacctaattttgtaaagccatgaactaaaaaagtcagctcatgttgagatggttgaaaagaaatcaaaacagaatgttttgtaacatatgaagtttaaacggcagtgcagtttcagcgcccacacagctgtagtggaacatagccgggctcgtctgctgtggactgcgcgtggctgcygtcgygctgccgtggcagaactgactggttgctttggagactgatgccccacaaagcctaagtattattatctgcctgttctccaaaattgtttgctggcccttgccttagaaaataaccattattagtattttgctattttcttccagactttcagagttttttctttctttattattttttatacagaaccttgctctgtcgcccatgctggagtgcagtggtgcaaatttggctcaccgcaacctccacctcccaggttcaagtgattttcctgcctcagcctcccaagtagctgggattacaggtgcccaccaccaggcccagctattttttcaaaaactttttgtagacatggggttttgccacgttgtcaaggctggtctcaaactcctggcctcaaatgatctgcctgcctctgccttccaaagtgctgggattataagcatgcaccactgcayccggcccagagtttttctgtttttctatggcttcagagatacacacacacaccttttttttttttttttttttttaagacagagtctggctcttgtcacctaggccggagtgcaatggtgtggtcttggctcactgcaacctctgtctcctggactcaagtgatcctccaacctcagcctcctgagtagctgagaccacaggtgtgtgacaccattccatgctagtttttgtatttttaggagacaagagtttcaccatgttgcccaggctggtcttgaactcctgggctcaagagatccacccaccttggccccccattttttttggctattacagacaaggccatagtgagcattcttgtacgtatgtgtagctttttataattgagcaagtatccccacaggtgagaatcttaaaagtaggattgctagatctaaaagtgtacacagtttaaatttcgatatggcagattaaaaagtttaaccttggctgggtgcrgtgggtcacacctgtaatcccagcactttgagaagccgaggtyggtggatcgcctgaggtcaggagttcaagaccagcctggtcaacatggtgaaaccccggctctactaaaaatacaaaaaatagcccggcgtggtggtgcatgcctatagtctcagctattcgggagactgaggcaggagaatcgcttgaacctgggaggtggaggttgccgtgagcctagatggtgccactgtactccagcctgggtgatggagcaagactctgtctcaaaaaaaaaaaaaaaawgtttaaccttaaaatatacctgtaaaccactgattgcattcatccactgtataggctataagaaataaaaacagagagggcagagtccctgttcttgaaaataagattcatatacatggaaagtcaaataaaatgcaaattagtataggattaaatgctaatgagtagtctgaagaataagtctttacagtgggttgaagggctgcagaagccttcatagatttatatatataaccargtctgtaagacttgttaagtgctgtggaccaggttcctgtggaccagggtggaaggtgggaggaggaagaggattaggaaaaattgtggtgaaactgccctctagtggccartaatttaagtgacccatttacaggcaggtctaaaaatgtaggattaaccacataacaaaaatatggttattaactttatgggaagattctcggaaggtctgatcacagggatcctttatatgacaagcttggcttatatctaaaattttatttgtttcaaaaattaggcattgtcaagaacccatgtattatataaaactatacatatatcaactatagcttacatcagttgagagtagtggtatatataatctaaaagtaacttatattttattcctttttgtaaaacactgcaaatgtaccttcctaattattgtttacctgggttagtgttaaaattacttcacttttccagmacatacctgagcttgggggcattgaacgctctgggtgtaaagataaatcagatgttatgtttcaaaaatgggyattgacaatcagaggatgatcagagtggcctttttctgagatttgggtacaagttatgttctgaagattccttcctttctgtggcataagagcattcagtaatgaaattagtcgtaacaaactagaattaggatccggcgtctacttaagtagtgctctcactgtctctgtatttcagaaacttctcatggggctgccttccatcagctcaggagcctcagcagagcagtaacttagtgtatagtgagcagtgttgtatcaagcacctgtgagatagacaaagaaacctgagacatggtcccagccccaggtgcttgtagtctaggtgggaaaatacagcaggcccacaagaccatccagkttggtgtatgatgaccaagagccaaacgaggtcagacagcaactgcagcagaagtctytgctggtggagtcagggaagggcctgcagagatcatgggcccggagctgcatctggaaagatgactagactctgacaaaacagagwgaagccgaaggccaggcaaatttagtaaatgagtaattccataaattgggaaagagagggagaataaagtaccatttgatgctgttttcttaagtgtagattttccctattaattgacactgggtattaagggataagataagcacagggctaagcatagtgtctgacccatgatacaacctcmacaaattttagctattattattatttctagatttcatcagtagttttcaaaattaaataagaaactgtcatatcctgctctgaccaaaatactgtcagccagtttgatcacccgtacctcatgtgccagctttggttcagaataacttttgtcagtttccacaaatcaaatccgacctcggagtatgaagatttgccaccactgaaaatatttaaagaccaggcatggtggctcacatctgtaatttcagcactttgggaagccgaggcgggtggatcacttgaggtcgggagttcgagaccagcctggccaacatggtgagagctygtctctactaaaaatacaaaaattagccagatgtggtggcacatgcctgtaatcyccgctactcgggaggctgagacatgagaatcacttgaaactaggaagcagaagttgcagtgagctgagatcacatcactgcactccagcctgggtgacagggcaagactctgtttcaaaaaagaagaaaatgttttaaaaacttgcagcaggttttgaaggcaattctgaaagatgggtcctaaaatgttttaagcagcagggtaggtgggaggtacgctaaacacattgacaaagccagcttctaggggaagtccttactattcaagatatgttttccacattgtaccagaactaagcatgcactgccctacttctcctttatgatttatgtgccagaatagggattggggtgagcatccttagctgcggttttcagaacttatagatgtgagaaagcggtctgtaaacaaagggaaagtggcatttgagttcaagccaggggatctggccagtgtcttattcatctttatatttctagagcatagcatgatgcctggactaccataggaactcaatagatgttatgaatgagccatgaattctgtcttgtgtcccttacagaaccaagtcgtcattgctgctggaaggagytctttgggagcccgactctccggggcacttcacgtctatagccttggctcagattgaagatttcactrcrtttccccactctgcccacctctctcatgctgaatcacatccatggtgagcattttgatggacaaartggcacatccagtggagckgtggyagatcctratagayrtggggctcctgggagtagagasacacacyaacagccacaccctctggaaatctgatayagtawatatatgactgcaccagaaatatgtgaaatagcagacattctgcttactcatgtctccttccacagtttacttcctcgctccctttgcatctaaacctttcttctttcccaacttattgcctgtagtcagacctgctgtacaacctatttcctcttcctcttgaatgtctttccartggctggaaaggtccctctgtggttatctgttagaacagtctctgtacacaattcctcctaaaaacatccttttttaaaaaaagaattgttcagccataaagaaagaacaagatcatgccctttgcagggacatggatggagctggaggccattatccttcataaactattgcaggaacagaaaaccaaacactccatattctcacttgtaagtgggagctaaatgagaacacgtggacacatagagggaaacaacacacactggggcctatgagagggcggaaggtgggaggagggagagatcaggaaaaataactaatggatacttagggtgatgaaataatctgtgtaacaaacccccatgacacacctttatgtatgtaacaaaccagcacttcctgcgcatgtacccctgaacttaaaagttaaaaaaaagttgaacttaaaaataacagattggcccatgccaatcaaagtataatagaaagcatagtatacagaaaaaaaaaaaaaaagaaactgagggaggaaaaatagtacagagtaaagcatgggggtgagggataacctcacattccaaatcacttgtgacttagtcctttttaacttttattttaggttcagtggtacatgtgaaggttttatcttttctgttcctcccaccttccccactcaagtagaccccagtgtgtgttgttttgtgttcataagttcttttaacttagcacccacttgtgagaacatgctatacttggtatttggttttctgttcctggtcgtgtgttagtttgctaaggatgatagtccttttttttttttttttttttttgagacggagtcttgctctgttgcccaggctggagtgcagtgatgtgatctcagctcactgcaacctccgcctcccaggttcaagtgattctcctgtctcagcctcccaggcagctgggactacaggtgcacaatactacgcccggctaatttttgtatttttagtagagacagggtttcaccatgttggccaggctggtctcgaactcctgatctcaggtgatccacccaccttgacctcccaaagtgctgggattacatgtgtragccacaggacctggccgataatcctttcttaatgaggattaataccttttcaatgtttatatagtgaaggacaaatataaaaaccaagactatcacccttctgtgccctccaatacttttgtagagttggctgttctaacacctaaagagcctagcgacactgctagttttaagccatctcatgagggacctttgtcgcattaggttacaacttgtgccaaaagaactagagggaaaagatgyggcctgagccacacgctactgtaagggccggagaggaaagcaggccttggcctcgcttgttcctgggctgtttttcgtaggatggatttcatttgtcagtcctgcagcgtggcacacttaagggaatggaatgtatcatagggtttcagtttcagtaaacattagcgggcattatctgtaaacagtaactagtttattttgtgttaaattgggaagaacctctttcttctgccacgggtgagatgatactaaaagcaggagaaaataacaaatgagaagagccmttctcttctcagcttctctcaagagtagagactggtgaaaaggggacaggaagaggaatccagctgaagagtggaaagttaacaagaacatcaagaggtacatccctagagagcatctctgggtcactcccaggatgacctcatttttctggaagaggtacatgtgctagctgcatagtaacctatggcacagcaaaagcacaaggaagcgccatttggttttgtttagggacaattattggtagcccaacctatctgaagaattacttttaattaaaaggatggttatttttaggggaccagaaattacttagttgtattmacttatgagttgagcagttagagcagactctgacatctgacacttgagtaaagggatgtttttctcagtactgggtcttttcattagacggatgcatttatatagtgtcagtttttatgcttcactaaatgataaggcytstgtttaaacatgaccattatttacctcacgatttatatttttctcaatgcctgaatacacccaatagcaagcaccaggtggaggttaagacccacaaaaatggaagcaagcccttcaagtttataggacatttaaccatactaaccccaatgtcaaaaacaatgtaaattatactcctactgtaaaaggtcaactgatatggcacgtatgtaaaaaacctggcatacaggaaaaaattaatgcatgayagtctaatatattatsctgatacatggattaaattttctttccactaagtattaactatagttttaagcattgattctgcttaataactaaaatgtaaagaccttaccttgtagggttgtaatttctcattaacagaaatctgaacttatacaagtttaactgaaatttatctttatttcaagatatcagaagacatttacatatttgcattttctgtcttgctactatctgcgtatatgtaacagcttttctcaaggcttcaagataggaattgttttatgcctttgtatcacagacctaagagaccaaaattatttgaagatggagtggggacaaaactagggtctctgcagtccctactccatgtaccatccattagctcacctctgtaggtattactaaagtcatgagagttaaatccaacgtgcaactttaatattgcaattccaaaaaataaagctgtatacaactcttggaataactcaccaaaataaatagctttttaatataaaattggttagtgctgcttaacagtctgtgttcatgaagaataaggtgttaataattgtgctcacatttgtttaggagccttccaaagacagtatcacaccttgacgtgttcgacacttgatgtgttygacaggcgatatgattgcttactcactcacataacccagtgtttggtacctactttcaaacagtaattaatgtrmtcagtccattttagttcaaaatttaaaaccaaggaacttcatatatttttggcataagctgatttattatttatgagaactttagtataagaagcatcctgcaatcacaaaagtggaactagttgatattttgaaatcatacttgatttaaccaccttcagaaattctayaaaacactagcaacttccytttatcagacttatgaggtagttacattatttttccttttattgacatgattcatcaaaaawttattttatccaagctcataaactaagtcaataaaactgcaaggaaaaatgacaaaaattctatcttatgcctgatcttagtcaaatcaaatgttgccctctgggattccaattcttcatgtcacagttaagtagtacttaytatgtattttacagtgatacgacccaaaatagcagcagtgtgctctgaggtgtgccaaaagtgtgccctgtgaaatataagtattatcaaatacaatcttaaaaatcctaagagattcgtaatgctagagggtgctgtatgttcacattccgacaagaacaccatgacgcgtgttcctgacccacagtgtggtggcacaggggccactgcgtgctcgagtctagcccagcctgtcctgttccattctgttctscagcttccctctaatggcttcccatgaccacacacaggagtggggaaaccttacttgtacttcatcggttttcttccaaatcagcgacrggagtaacatttttattcctatcaccaaaccacctgaaaaatggactcctaaacttcctcatatgacatcacattaggctaatcatgtaccctcaatatcatcagggtaagtgtatttattctgttattattacatttgtagtgcaagagctggacactctagaatcttccatgcacactactttgggaggcttaacwaatgttctagtgcctaactgtacttaacctccagaaaatattttaaaaggtaggtaggatgttaaagaggatggcagctttcaggcttacaaatattagccatttgttttaaacccaaatctctgtggaaatgagaagatatcacagttctaacatttattcatcctcatgttttaggaagctcatctgtcagcttctgaggtgtaggcatatagattagcaggacaataaacatttttctttttggggcagggcaggggtggtatctaaatatctactttaaaaatcaataaatggacaaagtgctacaaaacagtaacagaatggaaatacttcctttcaactttgcttccaaaggctctaattacagagagcaaagaaaactagtctcaggggctgagaacgtgaaatcttgattaggaatccatacaatggtgatattaaattatttctttttattcaccttttataaaaaaaagggggcaaatacaagaaataaggttatgtcaaagtttggtttttaaagctcaaacttacagagtctgttgtaaggttaatacatagaatgctagctttttagtcacctgagaatcaggaaattcacatgaacataattccctatactgacaaagaactatagctacctatgggcttgtcaagttcctacgcttcattcagcatgaaattgcacttttcttgatatgtataaattaaaatctatgcaactgtctgtgcttgtgttgcctcatatcacatctataaaaacagcatttaaagtttgtaggaaatagaattttggccttttacaaagcaaatactttgtttctttaactcagaattctggaaatgcaatccagttctggtattgtgactgccaaaatatttttgtcttcaaacattagtttttttcaagtgtctgactctatacaagaaaataataaaaagagtatcagaagtttcctgtaactaccataaaaaaaacttcagtatccacggsgctgttcctaacggtttgttaggatgctccttcctgatccaagtccatccagtctgaggctatttttcaattccatgcttctatctgccagaagagtctttttagrtaaagaagccatctaaataaagcagaagtattaattttagtatcttttttaaaagaaaagccactagtaaaatgatgtattatgtaactactcagtgaagaaaggactataagcagtatcagtgtcttaagtatttattccagtggtgccatcttcaagtacaaagaaaatggaggtgaattttctatcttttaagaacgttataaatgtttcctacatttccatttggttatgacaaaccttataccagaattactaacatctgtttaaatgtatgttgtcagagttctacacaaattatatttctaacttattgtgttaggcagtgtgctagtaagtgctttacacatattgtttaattcttcccataaccctatgaagcaggtaataccgacttaactgacagatagggaaactgaaggaagtttgagaaagcaactcgcaagggccatagtgcctgtgacaacttaatcccaggcgctctgactttagggcccatgatcataacccttccacaataccgccgtgaaccatatccttcataccrtaggaggcaatggagcttctagctgtcgtccaaggaatgaaagcaggcgcctccagatgaggccacttcccatgaacataattcctgtaatcagccaaaaaattctatggtcctaaaagagaacacagttcatttccatcgcaaaacgccaggttccttagaagattccttgaattgttactgccccagagtttgaaagccttatgttatttgtacagctctttcctgtagaaaggaactaagaaaaacaagggccttgatagcacccacagaataaagcaggagaagaacatgatttaaaaggttttaaatattttaaaatcatctatatgccaaatgtactgcttttactttgtgtttctttgcagcctttgtttacatgcgtgcaaatcttaagtcatgatgccagaggacacgcaatttaaggtctttgcttatatccacagttctcaaactgtgagctgaatgtctggtgctatgctgggcacgatagcacctcagaatattttaaagttgcaagggaaataacataaaggaatctgtaacataataaattttttgtcttccgatactgtgaaaaaattactaagacactaagggcatcgtgatccaaggaagtttgggaacctcagacttagaaaaacattcttcctcaccgtcattttcagagtggtaatattttgcagcacactgtttttagttaatgtacagaatcacagaatttaaatttaatctctcacaaggaaggaatcccatttatagctatgctgttatcattggctccaatgattgagagctcacttcctcaaagatagcctgttacacaactgatcagctatcactgatggaaatgcatgtcacttattgaacagaaatctgcctcctctttttgttgttgttgagatggagtcttgctcttcacccaggatggagtccagtggctcaatcttggctcactgcaacctccgtctacctgattcaagcgattcttgtgcctcggcccccctgagtagctgggattacaggtgtgcggcaccatgcccagctaatttttgtatttttagtagagatggggtttcaccatgttggtcaggctggtctcgaactcctggcctaaagtgatctgcccaccttggcctaccaaagtgctgggattacaggtgtgaaccacaacccccagtcctatatgcaatatgtgatctaagattttctttgtgataaaaagcactactgagataagtggcaaaatctgagtagggtctttagattggaaaataacttcagtattaacttcctgattttgatagctgcactgtggttatgtaagaggatgtccatgttttaggaaatacgtattaagacatttaggagtaaaggaacatcacatttgttcttagtctcaaataatttagagaataaagtatgctagcaaagaaatgataaagcaaatgtgataaaatgttgatatttggaatctggtttaagaaaatggaaattctttgactattcttggaacttttccagaagtctgaaattatcttaaaatatttttcctatctcagattcaccatggcaaatattaattttaactatatcgaaataaagacatttgacatccatggatttaatgttttcaactattcttcaggacacctacaaagatgtgtaatttgtaattctgataagacattaatttgaatcttttcagcctactactgagcaagcgtagctcactaccacctaccactcttatctcattacaaatgggctgtgctgtacctaggattgcacatactaaaactataagaaaggaatttgaaaaatcttccattgttttgaaaagttggcaattaagtgagagaaaaatatcaaagtataaaatggagttagcttgtagattgagtatatatacataaacatgattatgtatttagagaaaagacagggacttgtagagaaagtcctgtagtcacacttagggaatctgtaaaggtctttggatgtatcttttgagaatgtcaatggctggattatgttgcacaaggtattctgcttgcttctgaactttccaatgatctagatttgagttcaaacctccagtgggttcctatcccacttagaaatccaaacccctaccacgctctacgtcactgacatgatcatacttatctgcatctgggacctcattttccacctgactcatgctcttctaaccattccaaccttcttgccatttcatgaacaagctcagatcgttcctgcctcaatctttacttctgtggttccctctacttagaacactctcccccagatcttcctgcctccaccagggtgttaccgccttacatcttccttgaccaccctatctctaaaatgccacacatcctactgcctaacattctctatccgcttctctggctttatttttctctgaggcacttagcacttaacatactttgtttgtttatgaactctctcctccactacaatataacctacgcaagggcagactcactgctaaatgggcctaaagcagtgcttggtatataacaggcaataaaaaaacgtatttgtgagatgaatgaacacatgtatttccttttcttttatactttacattaaaaatgactaatactgtctttgcttcaaggagctcatgctcttttgcaggctttgaacaagggattgcagatttaaggaatgtagcagatggaagggtaggattatttgggcgcagacgacaaagtaactttactgggccaggttgtcggtgcattcagtgaagggacaactactttgagacctgaaagatgaggaggaagtaactaagcaaaacggggatctgaggggagaggagtggaagcagcatgtctgggaaggacactgagagaggtagtaacaagtggctacccacaagatggacaagtcggtgcggcaggacgggatttttatcctaaggctaatcaaaagccattgaatagttgtatgcagaagggtgtcataatacttacatcttataaagaccactttttaaaagggcatggtggtcctaatgggaggtgatgtgggcaacagagtagactcgttagactaatgaggacacagaatccagcatcacactgtgccagatgcacatccaggttcagttctagaaaacttacaataagctattctgtgaaaacacagtcagtgggttctgtatctgcagatatgcaaggttgactgtactgggtcattttatatcagagacttgaatacccacagactttggtatctgtggggatcctgtaaccaattcttcttggatactgagggatgactgtacaaaaccacagtgaaatgaaaaactctgggagttaagtattatcttaatacagaaaggcaacagagcagtagaaagtgcaagtctttggggtcatgtcctaattctgttatttttccagctctatgcctgtgggcaagttaaatgttctgagcctcagtcttctcatctacaaagtagggataatatatctattttcagagttgcaatgattgagccaaataaagtatgcaaaccgcctggtacgttgccagacatgtaagaattaaaaaataaaaactcttcattaacactgcttcacagagacactgttttatcacacctttcccatctgtaattatatgttttgggaaacaaagtaacctaggctgtatttatctaggttataacatggtccaacagtactgcctgaattgtgagttacattatatattttatttcaccatggtagtttacaggttagactttttatttatttattttttgagacagagtctcactctgtcctgtcgcccaggctggagtgcagtggtgtgatcctggctcactgcaagctccgcctcccaggttcatgccattctcctgcctcagcctccggagtagctgggactacaggcgtctgccaccacgcccggctaattttttgtatttttagtagagacagggtttcaccgggttagccaggatggcctcgatctcctgacctcgtgatctacctgcctcagcctcccaaagtgctgggattacaggcgttgagccaaggtgcccagcctttattttttaaatccattaaaaatatcgatcttcaaaacccaatctttttttttggagacagagtctcactctgtctcccaggctggagtgcaacggcgcgatctcagctcactgcaacctccgcctcccgggttcaagtgattctcctgcctcagcctcccaagtagctgggattacaggtgcctgccaccgtgcctgtctaatttttgtatttttagtagagacagggtttcgccatgttggccaggttggtctcaaactcctgacctcaggtgatccacctgcctcagcctcctaaagtgctaggattactgacatgagccaccatgcccggccaaaacccccaagttttagaaataataatacattctcacctcttcaagggaag

SEQ ID NO: 95688 - DNA, 152589 bp, Homo sapiens
  misc_feature (1)...(152589): n = A,T,C or G
ccataattttcaaacatatttaatatgagtcaccctttcaaataaaattgtatttagaacccaacatatacaatgtgtaaaagtggtactttacagtttaaatgcattttatcattttaattgtgaaatattttcctgttatacatggaaaaaatgagaataatgaagctcttcggagaagctaaatattgcagccatggagttatatctgatattttgcttattttatttctgtttggctgcacaataataagaaagttctgattcacactgcagcttgtcccagaatttcagtatatgcttcaattaaagtagatcagaagcttgaaagaaaagtagcaggaaatgtttgcttcagtggtcaataactaataatgtcaattacctcttgttcacatatgtaaatgtcagacaagatgtagccaaaatggaaaataatctctaaaactatttatagtacaatattatcatgaagtgttttatatgctctttttgaacaactacaatgctgtgataagaaataattctaggcagtacatgtctctgaccagagcctcaaagtattatatacttatataaatttaagtgagtcaaaatgcagaggtctaaatgataaaaagataaatacagagctacaaacatctttatcaatgacatattttatatattcaaatataggaaatttgatgatgaggaacctttaatctaaggtttgtctcccaactgcacaatctggtctgtttttttttttttgttttttgtttttttttttgagatggaatctcgctctgtcacccaggctggagtacatggtgcaatctcagctcgctgcaaccttcatctcccaggttcaagtgattctcctgcctcagcctccagagtagcttggagtacatgtgccatatgccaggctaattttttatttttagtagagatggggtttcaccatgttggccaggctggtctggaactcctaacctcaggtgatctgcccacctttgcttcccaatgtgctgggattacaggtgtgagccaccatgcccagccacaatctggtaatttttaatacttttaaatcaaagatagatcacaattgagtgtgcatgctccttttgttagtgttgatagaatagtaaaaatgtaatctaaaatttaatttcaaaatataatgtttgcatagcccctgaagtacctctgcagagcccttaaggccacatgatttgttgaggctagattaaacaaaatcttgcctataattgaatgttggacttcacttgcagcctttgagcatttcttgaaatattttagaaaaagatgtgagaagaccagatcctgtatttgaaataataattttaagtatgtttaaattgagggagaatggaaattcatttggaaggaaactgaaataattcagatgagagaaactgaaactgaggccctgaagtagtgcagaatgagtgaaactggagagttggggtaagattcaaagatatctcagaaagagggaggtataaagaaatagcagcttttaataacatatggtccagggtttgaatcttgccttatttttttcagtttattaagtaaatttttcagtttactttatgttttcagtaaccaaagcacctgctgtggtttgaatgtgtcctccccaaattcatatgttgacacttaattgccagtgtgatagtattaagatatggggcttttcagagtgattaaatcatgagagctcatgaatgtgactagtgcccttatagaagaggtacaagggaactgtttatgtcttctgccccttccattatgtgaggacacagagaaggtataatctatgaggaacaggctctcatcagacccttgttaaaagaaaaactttagacaaattaactttagcagagtttatttgagcaaagaacaattcatgaatcaggcagcactctgaaccagyagaggttcagaaagccccactcagcaatgtgagcaggcagtatttataggcagaaagaggaattgaggtacagaaacagcttgattgattatggcccagcatttgccttatttgggcacaatgcaatgtggcatttgccttatgtggacatggtcttattagttggtagtatgtgattggatgaaacctggctgctgtaattagctgagactcagctatctgttacaagaacatactcttaagtaaggtttatttaaacactaacttaggtgcagtttgctatgcagaattccaaagtatggaagcagcttttggccaaatttaatttaatttaacatattcaatatgctggtgccttgatcttggactttccagcctccagaactgtgagaaatacatttcttcttgtaacttacccagcctaagatattttgttgtagcagcaagaatggactaagatagcatctgggaaataattaataatgtataatcttttaacacctgaataatgcaaatattgatctagagattaccttacatcttgacattctgtaagccctgcttaactactgcaccacagaaggccgtatagctagagactgcagagctgagacttgaaccctagaagcctaaccacagaattcctgctctttattattttgctgtcaacacttgattctgaggttgtgcaaattcactgtgtaaaaatcaagaggcacatatagtttgaaatataaagcagacgtgtgggggaaaggaagaccagaagagatgatcctcttctatgtcatgttattaagtatgaactttggatctcaaaggcagtggggaaaaccaatgacaggttttaagcagaaataaagtgatcagtcttgaatgtatacaagatcactctggtgcattttactcttttaggtttccttagtatcttatcataattttcaatttcattccaggccttaagccctctccaagtatctcatgcatttattttactttttttctgagaaaactacactttataaaaatcaatctattttttctttaatcattgaacaaatattaaatacacactagttaatacaagggactcctttaaaggatctatgaaaataagcttgcaaaatatgcaaattaatgggtgtcttgcactataaaacaatacttagatttacagatttatgtgaaatttcagatttatgttcttcaaacctactagaagcaaattgtttgaaggactatgttctccatatattaaaggactattgtgataaaatgaagcacgcatgcacttttataagtgactcaaatgacctacttaaaaactgctatttctagtgaaaccagttaatcracatttgaaaaacaagtcttcagatgcccctggttatcatcctggggagtacaccatcaactgtgagaataggatgtcatatcttgcactaatgagatatgctaatgcatcatattttaggagaattaaaatgaaactccttaaaacagagaataatttacaatctaataaactctgacacattacctgcatgtatctgataaaatggtgccacacagtcatgccttgcttaatgacaaagacaggttctgagaaatgagatgctaggctattttgtcattgtgctaatacagaatatactgacataaacctggatggtctaacctactacacacctaggctatatggtatggcttatgctcctaggctacaaacttgtacagcatgttactgtacaatatttagtaggcaattgtaacataatggtagttatttgtgtatttaaatttttctgttctttcttttattttgagacagagtcttgctctggcatgcagaggagcaatctcggctcactgcaacctctgcctcccaggctcaagcaatcctccttactcagtccccactgcccaccccaccccagtagctggctacaggtgtgctccaccacaccagctaatttttttgtttgtctgtttttgtagagacggggtttcaccatgttgcctaggctggtctcgaactcctgggctcaagcgatccacttgccttggccacccaaagtgctgggattgcaggcgtgggccactgcacatggctaaacatttctaaacataaaaaagctacagtaaaatatgttattataatcttatgggaccaccatcatatatgctgtccattattgaccaaaatgttatgtagcacatgacttggtgtatgtacacccacacccacacatacacatacgtatcataacataatacaaaaaaacaaaaaaaaatacaaaaaaacaaacaaaaaaatctttcctcattgcatgactggaatcagaccttttgtttaaaggctttgaatccaattctcccagtttttaaaagtgtggaagttaaactgtaagattccacaaagaaaggtttccagaatataacatatttgccagaaactgcctttcaaagcaagtgggaaatatccttactagttcggaaaagttcagatatttaaaagaagtaaaattttgcacaccaattaaaattgaagtgcctttgtgtaactagaagtgaaatcagcacataagaactttttttgtaatttgtaatctaatttattcaagttgaagagacttgcacattatttaaaaagtataaaatgaagtcacagtcatcaaaaatacagtacagtgtgttttgaccatacagtaattagggtgattttctcaggagacttagtcacatagcatgcaacatttaaaatgtgtcttcctcagccaagagcaacaaagtgagaccagccaagagtcagtcatatgaccaccggcaaagttgccaatgcagtttttccatttcatgtgccctgtggaagggcaaaagtggaaaagcagacccaatcgcaatgggcaaaagtggaaaagcagactcaattggaatgctagtttttttcacattgtgtaagttaaaggtacaacagctgctatatgctaaattatcactagttatgggactttagttacagtacttgaatttccccccaatccaacttcttaaaatgtgttgaaataccaactagcaataagttaatttctccagtgtaattgaatagtctaacttggtatcttactccttaactgattttgactaaaattataatatttacaggaaaaaaaaaagttcagagttaaaagaataccatgaaagggcaaatgattttatggacaaactttgaactgcatcttcactgttcattaccttactgtatttgctaaggaagctaagatctcatttaatttttgtgtgctttgctttggttcaaaactaacatcacattctcagaacttggtcaggccttaatcaaataaaatgctattgagcttccacttggtctttccactctgctaagtgcaaagacagttctggagaaatcagtcgtggctcatgtcctcaaggagttggtcaaaagacaaggcttggcgaatatgtacgtgccatgtcaatgaactgctacaatggaataaacttataataatgcctaacatttattgactcctcataataaggccataaactttgcatgaattaactcatagaaacgttatgacgttgtatcacaagcaatcctaatttgcagatgaggacactgaggcttagggaagttatctaacttgcctaaggttaaagcaatatactgcttttatggttgcatctttagtaatctctggggttgctgggactccagtgcgagaaagagcccgaaattcgcaaacttggatgatggggaagaaaaggtgtgctaaactcaggtcacagaggtccagtcttaatcttgttcctctgcaagccttgttgctcacacctcttgaccgacagttcgaggcaagtgctcacagcaaacttactctatgtaagccaaggccagatgtggggagaaggggctgagaaatgttagaaacgtgaacgcagtccaggcgggagaagagaagggggcctcgaggggtgcccctatgcagcccacacacacgccaggcactaacttggaaaagcaacaagcttggcgggagatcctcccgcggccggagggccctgaaccctaggccaagactcatccacaacctagggggaggcrgccaccagcgccccatcgaagctaaagggctgacagaagggctgtagcggcaagtgtgcgccaacacagctgcacacgcccagacacctgaggcgctgagaggaacttccccgcgatccgccccggctgcrcagagcctcttctccccgccggggccccgcccagcctcacttcttttaaaagcagcagccagcagcgcgccggtggcgtgcggctcgaaaggccgggaggacgtcatcgacgcgctgtcgagcctccagcccgcccgggtttccttcgcagtcgcgcaccgacgctcaaacgcgcgctccaacccgcagcctcctcctgcctcaccgcccgaagatggcggctctcaaactcctctcctccgggcttcggctctgcgcctctgcccgcggatctggggcaacctggtacaaggtaaagtgcgggggaagaggaaggccatgggcaggaagaacgtggaccaaaccctgagtggtgcccgcgttttcttctctgcccctacccgctctctccagcctgggatctggcatccgtggcgcggtgccctggtcacggacacgcggcgacgcgttcctggcctcgccggcccctcggatgaccgcctttgcttggttctgcagtcgcttccctgatggagcgagacgcgataaagaagcgcgcggagaggctgagaaggggcgggaggactcctggcagcgctcccgagccctttggcgctcgtcggcttccctcctggcacccgcccttggatagggactctgagggtctgaacggggggaggagggcgccagtatatggaggtttaggagtgaggcaacagcgggtaggtttgcgcccccgatgttggatctctgggcagaggaacctctagaggcccagaacctgaggctgggttagccatggctctgctcgagttcaccggggctggatgccgggtgcggcgggtgtggaatgccgctcccatcctctcctccctatttggctctgctgccccgtagactggagcgctcgccagggcgtcttgccggccaagctgggaaaccatccgaggtgtgtccctggcccgcgcctgggctgcaggggaggacaaacctttctctcgaggcccctcgtatccgggttaggggctttcggttttcagagccctttgaaatcctttttgtgccccactgccgactctccaccgagtggtatccggaggcattcccaccgtggactgacttgtggttttgccttatgcactgtcctcgcttgtaagcccacccctgtctggagccctaggagcgaattacaggaccagagcgccaggtccaggagggtggctttatccccgccgtctcaatcgcgggagcctcttccttggtattcagtaataggtctgagcttgacagcgtgccatgcacacggtgcttactcctgaagcgtgcctgcctggccccattgctctttcctgcatccaatccctgaccgctgagaacacagaggagccactgagctccttcggtaggtgctagggaatggttcagaactggaccattttactcttaaatgcctcttaggaagcatttttataactgcagatagacttggatatataaagcattattaaaagggaacttgaccttcagtgagattgcagcggtgctgaagctaatacaaaccagagcacagcgatacccttgggccgaggtcaggaacgttccttcttttgacagttactgatttgcccaactgtaatttactcacttcaagtcttttccatcttgagtatatcattaaaccatttccgaagctcagcaaacctcatcttagagggacgagatgcaaataaggggttctgctatatctcattaaaagttcatacagagttcaaacttagccctgtcaggcttgattatcataggtctaactcctgccttccactattcccctagcttgtggctcttagtgcccttattgtttttttttttttgagacggagtctcgctctgtcgcccaggctggagtgcagtggcgggatctcggctcactgcaagctccgcctcccgggttcacgccattctcctgcctcagcctcccaagtagctgggactacaggcgcccgccactacgcccggctaattttttgtatttttagtagagacggggtttcaccgttttagctgggatggtctcgatctcctgacctcgtgatccgcccgcctcggcctcccaaagtgctgggattacagcccttattgtttagcactttaaatcctcacctgctgcttctgttgaactgtaccacttatctacttgtttaacttttcagatgtgtatattgtctcctcaaccagatgacagttccccgatggcagagaccatatttatgccttacacttagtctccctcaacaaacacactactctgcatagatcagatattctacacatgtttaaagtacggatgagagaaccctccaggcaaacagaaaccttgagtttttccactaaacataactaacagctaaaacgagatagttattttcttaaatgtttaacatttttataatgggcaggcccagtgtctcgcagacctgagagtgcatcagcattacctggaggttttctaaaacagattgctgtacccacccccagaatttctaatttaataggtcctgggtggggccctaaactttgcattgataagttccaggtgatgttgatgctgctggtctggggactgactgcccctttcagagttatctggcatggacttaggtgaaaatagactattgggaggtatcttcttttcttcattattactgaggggcagtggggagcatttaatactattttcactatagaaaattattagtgggaaaaagkttataagagtaccactaacactttacccaccattcatccttgaccctgtcttttcccaaatctctttccaacctctgactctcctgagctgcagtccttctggtgcaactggtgaacttcacttggatgtcagttggtgcttaaagctctttctgatccaaagcaaactagccataaagtggctttcccattccttgttttgttcttctatcactgtgcttaacagcaccagtatccatccagtatrtaagctggaaatcctggaaccatcttctcttctccttgctgcacttccaattgatcaccaagtgtcatatgtgtgcctctttctgaaatgttcctcagtgctgtccctggcattctttctcagcaactgtttcttccttatagctccccaattaaatactatgattgtgtttaaaattttgtaattatttaatgactactatctttgctagtttgtaagtttcattatagcaggggctatgtctgggttttattttyaatattttaactttgtagccccagtattttgtatagttggtacaaatgagtgaaggaaagaaataatgagtttccataccactttcttaattcaggcttcctttgagttgtgacatctgtttcaaaagctttgctgtcccttcgtcatggaatgatcaagtcacaaatcaacactaaagaacttactcatgtaaccaaatactacttgttccccaaaaacctatggaaataaaaaaattaaaaagaaaagaaaaaagaaactctgcagtgtggtctgtaaggctttttacaaactgcctcagtctgcttctccagcctcatcttcatgaacctctctccatgagacctgatcccgcatgtctgtaaccacacagccttttcatatcgctgaactcttactcatgtggctcccttgtttggaatcactgtcctgacaagtatttaacacctggcaaactttsgttttctagtccaccaggtagaatgaattactccttcatctgtgctccttcggagcactgagtatccctccagcattggagaagaacatgtatgttccctcaataacaatgcacaccactgctgtagagaattgcctagtgttgtaactctctgtgagctccttgagatttattcttgtcacatgtgcataattggcagtgtttagttcaaggtgaaaattctacctttggtagacaccggtcctcttctggacagctaaagtattttcacacacatcactacctcttgggagtgatgccgtgctctgcaggtctgtgagtgtatccactcacatattactgccttttctttataacgtgtatctctttacttctctccatataacttctccccacttttgtttctcaaactgtgatacttggacaatatcagctgttccttgtcatttatttaactgtaaggtgacaaaataaatatcacctcatgtgaaagtaatcttaaagctaaggcctatgtctttttgaaaaccttcaacaaagaycacctgggttaatttgctacagtatgaattgtgtttaaaaacattctttgtaaaatcagtggagtgtgtgtatagggtagagtgaggtggttaaaaattaaaactaaactccaataaatgacaagttggtcttactgccctggtagagaatgaagaaaagtttgcattttccaaaggaagctaacaacccctgagtatcttctatagtccaggcacagggcttctgtatataacatcagaatatgttatatacatacataacctcagggaaactgtggataagcggtgggggggggggggtctactgtacatataaaaacaccatgtatgccataaatatatacatttgttacctgcataaatatatacatttatatacaattaaaattaaaactaaactccaataaatgacaaattgatcttactgccctagtggagaatgaagaaaagtttgcattttccaaaggaagctagtatcccctggatatcttctatagtcctgcaacagggcttctgtatataacatcatttgatccttactacattcctagaaaacaattatcatctttttgtaaacttaaaataccttctccccccatgaaaaagagatgcagtggttaagtaattttcctagattcatacaactgtggcagaattggaatttgaagcaagggtattttttgatcccaagagcatgatctattatggcacactatctcctaaactagatgttgggtttcttaggatacaatctgttgtagtataagttgacctgttagtaaatagatatcaaatgtcaacaaatattgttaactgaatatatgaataatgaaaaaaacaagtacctgcaggttcttcattgtcttgagcccttctcagattacctggaaaacatcttcactttatgcttttaacttttgattatctgggtaaacatgtcttccctaaaatacttttgaagtatatttttttgcagagagtgtggcaagctctttggtaatttctaactgtagtgaaaactatcagatgaaacaaaaaaatagaattcttgacaagcctgtagttatatgcttttatttgtgggcaggggagaggtagtgagggttaatgggtaccaaaaattagaaagaatgaataagaccttctgtttgatagcacaatagggtgactatagtcaatagcaacttaattgtacatttaaaaatagcttcaagtgtattcggattgtaactcaaaggataaatgcttgagggaatggataccttaatgtaaaaagcctctataggtatataggggaaatgagttttcttccaacttcctctctatgtgggatttgtgtttctcagcatattgaaatagttagggtgatcttactgcacagactgttgagctgtggatgaactctttaattttcttccccttccagctataagggcctgactcttcacttttgggtggaggtaatgacagcagagttatacaggaagaaatagaacactcacaaagatttattttatatcaaaaaatgagaagtggagtatgagaggtttcaaaaaacatggagagaagcatattgtagtagaaaggccctgaggtagaaggccaaataaaaccttggatctggtcttgctttaatacagttttgggtaaagtacaagatccttctaagcttcaaaaatttgacctgtgaaatgaattggttggattagatatatgcactttttaagtgtgtctaggagatatcctcaactttatcttacgatccttctgttggcctgtttattcaggctatcacacttgtaatttctaatatattaaaaaatatatgtttaaaacagaagcagatgaatagaaaagagggaaaactctttgtggctcaagccctttctgtctctgcctagacttatttctcagggtttgagcagtgtgctggcatatttttaggggaagaaaagaatgatggatatttatgctgtcaccttgaccacttcaggttgtgtctgtctgggagactgttaggcagtggatgtgagctcataactggcatgttaaggtagcagtatatcaggattcagatgttattctttctttttagcctggctgtatagtgagaataaaggagaggtgatattgagtatgaatgattgctacagaatctgctttcttgttttcttttgtgcatagtgtggatgaagtaggggaaagggaaaagtttacaactgattgctcatgaatattcactaggtgactcatttgggaccaaatagtacacagtggtaaggctagacttaccttccttgtagataatggtttgttccttttatgtagcctccataaaccttaagccccataggaggatgagttgttttgtaaggtgtttttgtccctctaggaggcattctttgacatttaagattgaacctggggcccaactctgtaggtatgtgttttgttcatattggctttaatttcttagagagcagtgctcatgtcttaatacttaactgtgttggaataaatagtacaggacttgacacatggtgggtttacagtaaatacttgttgattaatggaagattgggttaccagaaactgatgcttgatgacaccattgctatgaatttgaattccagtatatggacttttctttctactttcattcttttgggtggccacaaatgatggagttagaactttcccttatgtaatagaagacatctgttacaaggggacttcagtgataatctgtggataaaatatccatcctacttttaagtatgagtcacttaaagcgccaggcttttgaagagggggatagtatcacagacagaaaggtgaaatggtggttatggaggctgggggtgaggggttggtgagatgttggtcaaaggatacataattttatttaggaggaataaattcaagagatctgcggaacaccatggcgactatggttaataatatattttatactagaaaattgcttagagatttttaagtgtttttaccataaaaaagtgtgtgcatttataaatagcttgatttagctgttcaacaatgtatatagtatcctcccttatccaaggggaatatgttccaaaaccccagtggatgcctgacctgtgggtagtaccaaaccctatataagttgtttttcctacatatgtgtatcattcattttaatttacaaattagactatgagacattagtcacaataactaataatagaacagttataacaatatactgtaataaaagttataagaatgcattctgtctctcaaatcttattgtaccgtactttcctggggtgacagacctcagaaagggaaactgtggataaggggggtctactatccatataaaaacaccatgtatgccataaatatatacatgtattacctgtataaatatatacattatatacagttattacctggcaattaaaaacgtgtatatataaaggagataatgaaattatcatttgtctatcaattgaataaattgctacacacacaaagtaaagctgtatctccaaatgattatcaattttttttttttaatatttcagggatgtgtttgttccttttccaccagtgctcatcgccataccaagttttatacagatccagtagaagctgtaaaagacatccctgatggtgccacggttttggttggtggtgagtactaacactgttttcatgttatggtaatgtccttatgtttttaaatgaagcaggcaaatcacaatgacaaagatgtataaaaatgataattattttattatgcattatttattgtacatattataatatcatctattttattagtgtctccttcctaaaagtttagcaaggtttagcacttaatattttactttctctgtgtgcgtgcatgtgtgtgtgtatgtgtatttgtgtgtttctgttttgaaaaactgaagcttcaaagtagtcaggttttattaatagctttgaaaaaaatccctagatcccaattttttaacttaaaatgtttgcattaatctcataagcttacaccttcagagaccccgtagacatgtattgacctcccccactgccaattctattgctgcttcttgtttggactctcgagggagtttcactttgtcacccaggctggagtgcagtggtgcgatctcagtttactgcaacctctgcctctcgggttcaagccattctcctgccttagcctcccgagtagctgggattacaggcacccaccatcactcctggctaatttttgtatttttagtagagatggggtttcaccaygttggccagtctggtttcaaactcctgacctctagtcatctgcccaccttggcctcccaaagcgctgggattacaggcgtgagccacccacacccaacttgctgcctgcttctgataaataatgtcaaggattatttttagcattgatctccactcattcaagtaagtcattgaatgttcattttaaacccaatacaatttgagtaatcatggaaaatataaagaaatgacagttttgggcttaggcttccaactatgcaaaatctactcagacatattaacattcttgaaaaagttgtagaaaaactgatttacaaagcaggaaaacaatagatatatagttaagtgcaaactgaggaatgagtagccatataaactggttgcacttggcttatacttgtggttcaaagactgggcagtgatatgtgatataatggtgcaaaacatttggatacagctatatgaccatttacttagctgctgagatatatctgtgtattttgcttagtagatctaataatgtgctttgttttatttcccttttaaaaagaataacacacacttctctgaaagaacattgttaccccctttacaaattgtttattttttgggcttaatataggttttgggctatgtggaattccagagaatcttatagatgctttactgaaaactggagtaaaaggactaactgcagtcagcaacaatgcagggtaagtgtgcattttaaaaacaattggctggagagaaatgccaattcttaatatttaaacagagtttatcaatgaaatgaagttttctcctattcacatgagcaatatgtccaagcatcaaaatctagtgtttaacaaggtcaagaggggtggttacatttatccaaatgtttttggtaccatccttcataagtaaagcagacttgcttcatctagtataaagatataaattaagactttatatcttaatgtgatgtgcttttatttttctaaacttaaaatgtattgaagttagaatatatatcttcaaattaagtcttgcattttaaaatttaaatgtattgttttatgttatttattagatcatttataaagcaaggtgggcatcaatttgaaatctgtttaaagccctttcttttagcaatgccatcattctagatcataaataaagggataccattaatcacaaaaacatggctggtcttggaaggtggatatgcagccagcacttaagataataggattgcatattatagtggtcagaaataagccatcattttaataatagcatgcacattaaggtacatttagctatgttaggaaaagccatatttttatttttacaaaatggtaagtcatcagctctcaacaattaaagactttaaggattttacatttttaatcacccaattggcattttagccaattataaaagcagtttagaataaatagtgtaggttatttgggaartaaaactgatgctacttttttgtgcccatttttccttttctgagtctgtttccttctgggagactgtccctcctctttcctgtctatccacatctctcaggattagacttaagttgtatatcctcaaagtatccttatccaattatagaaacttttctagtctttattgatcttgcccctttttgagttcctttagagacttttagcctttctttgtgtgctgaattttacttatctttgatatatatgtatattacattaccaatctcctttatttacagtagttatgtattccctactgtcctgagcctgtaagtctgagtctcagagttactggtgttggaggggaatgggattgtagaaatcatctgtcccttgtttaactgacttttcagatcgtctgaaaatagagaagtaactgtttaagacaactcgataactcttaaacatatcttatgccctttaatttgacttgattatacatacttttgattatcagcactttcagttttccagatagctttatgcttataagggatactacagatcaatataaaattcttgatgcagaatagatgctgttatgacaaaggctgagaaatctgattatacatatgtacctacacctataattacttgtgtgtgtgtgtgtgtatatatatatatatatattacatatatatatatatatatatattactatactagtcaggtataatagttttttgagagcccaatggtcagtctatcactctaaaatgtctggttgtgtaccaatgactttgaacctcaagataaaggcagtgacccctctgctgtgcccttgttctttgttgaggaagctgcagctctgaaggagttaataatcagatgtaggccatgagctgattatggacattccctaggatttagttattttgtctgggaagggctaaccaattcctgggatgtatacttgaacttctgtgctcagctcatgaaagatttcatttgtctcatgtaactacagaagtcctcccttattcgaggggcctgtgttctgaaatcatggctaatactcaacccaattgctgtcaatgggaatgtatttctgtttgtcttccacccacaaatttaatgtcttttccatcttaactaagctcttattatgctctgtggctataacttttgcagtttgagatatgacagcaaaactagcagatatttttctctttctttgaaatttaatggataaaagattcattcttacttagatctttcacttaaaggaagcactttatgacctctttctggcatatccaagttgcctgcaccactactcttgtgttttggggccattattaagtaagataaggactacttgaacacaagcacagcaaagactgcagcaatctatctgatcaccatcatggctactaagtgaagaacaggagagtagtatatacagtgtagatgtgctggacaaagggaggattcacaccccgggcaggatggagtaggatgatgatagctcatctcgttactcagaatggtgcaaaacttaaaacttatgaattttatatgtctggaattttccatttaatatttgtggactgcagttgactgggtaattgaaaccacatagaaaatgaaactgcagattgggtgggggatggggaaattactgtatgtcataaattagccttatatttaaatgaagcattttgtttttggtactcttgatatattaaatataattatctaatccagatttaagtatgtctaaaatgaaaagtaaacaaaagaaatacaacttggtaagtgatcccaactttatttttgtttatcttattttgacaagaattgccaattaatgagatttcagaaaatcagcaaattaaatttcagattcagagcatggaaatatttccagaacattgtctctgatgcggtatctttttgctttataataatgtgtctcattaatgaattcttggccttagactttttctagtcaccaaaatgtttgaaacccaggtttgttatgatgcaggaaaaagatcacatctctctttagtatgctaaaaaatgttggctactaaaggaaagcacccatctttttgaaggtcttatcagcattgtctttagtattaaagagctataagatggtttaatatacatgtctctattagaaatgatatgttccccatttgcaaaagatcacatctatttttctttatcttgtaagcctttataggtaagggacttgtcttactaattttttatcatcaatgtctgataataggtaagatatacacttgccaaatttgggttgtaaagtatgtggcaagaaacactctcattgtaagctgacagcattttcaagacctgaagaactggtcaggtagtgcacctggggctagcgtcttatgcactgcttgattgctatgccaggatactagtctaaaaacaaagcaaagcccatataaacaatgattctcagagctaacaaatgaataaagagatgtgatctccaaatagagccaacttaaaatgggtaatgggttgaaaagccaaagagatccagaagacagtagttagaaaaattcccaagtcaatcagtgtccaactatattctggctttactatgggcctgtaggagtttcagatattttaaactacagaaagtaaaatggatcatatctaccttcatgaattattttattacaactttattagtctgggctgtagatgatatcaaacgtaattgaattttctgagtggttgaggagtttaccaaagggagccttttcagtggaatggtcagggatgagggaaaaatgagtaataaagaacactggaatttgtattggaggggtgctgttaccagccccaggtctgaaggagtgaaggcagggagctgttactaggacctggaagaaagctttatggagggggttatccaataggctgtaacttctcagggagagagccagaggaatataaatcccaacattttcccctcacccacatcctcttgatggtgcctcccattgggtgaacccggtcagagtggctgaacccaatcagaagccagagggcaaggggacccctcaatttagtctacagggcagccatctgaggtccagatgttggagggatggtgaggccaggagaggaagagaagtgagccaaaaggagaatgggtggagtgaggttggggacatcaaagggcaactgatcacatgggaccttgcaggccactccggagacctttaattttactctgaatgaaagtaccatcacaagggtgtgagcaagagcagtgatatgttctgacttacattttatatggcttgctttggctgccatgttgtgtgggaggggaagcagggagggtttgcagtaccctggcaagatagtgcagagtaccaaggagagagtgagaaatggccagattttgaataggctttgaagggggaatcaggatttcctgatagattcaatgtggagtttgtgagagaagtcaaagatcgctgcgttagttttgggctgaggatctgtaaggtgagcctgccatgaggtgagatgggaaggctgcagtggagttgaatttgggggaatagaattgtggggacctagccaggtactaggagtaggttaaaaactcagaaggcattgtgtgcattgagagtaatgggaagacagcccytgaacaacggaatccttaggcctctggtgacctctagtggacaaatgtattcttaacttgccgggcattctagctcaaaagtacactcttgaaaatgcttatgttacttaggcattagttttcttttgaaccaagtgagagtaagtcatgcagctatttcttttctacccatggtggatgggaaatcttatcagattcagcatttgaaggctaggggtgcaaaacacgttgagtaggaggttgacagttacctgttacctagacactttgaagtgttcattgtgtcaggagtgccgggggtaggaaagaggtttggaaatgaaattctgagaattgggaaggaatcagctgagctggartggtcacttgtcggtgtgaggagtatgagagtggagagtggaatgaagttgggagaacaggtggcatcaggagaaatgtcagtggtttgtcacatacttaacacctttccagatcaagtaagtaggcgtcactagtgcttgttaatttcccccaaccaactttctttatattccatcaccaaagccagaattctggagtgggtctgcagcttcatcaggatgggcaacaagtcttatgaattatttcccccaaagaccctcttgatttctcccttctccattcccattcccactgctcagactctcactgttggttgtttggactacttcgagcctcttcattgatatcccggcctttcatctttcaagctttccagctaatcatactgttatatttccgcttaaaactttttacagggacttcctgtctttcaggatgaaatcccacaaggctgatcacaactggtcctgccttctcccctcccacatgctgttgccctcagtccatactccaggaacactgaacatgtagtttcctgagtgcatctttgcaaagctgtctatctgtctgtttttctctacacctccaccccacacactgttctcgagatgttttcttttttcctatgtctgtgtaagtgccacctcctgtaagattttttctgctatctttctcctccccaaaagttgggttctccattttcagaattatcacaatttgtgcctaattcccttagcatgtctctccctctgttgtaattataggttacgtgtttattttctcagtttcaaagctgcccaggaccaggtcttattcatgattgtagctccagagcctgacacagggatagaataagcactcagtaagggagttttagatgaattaacaaacctgtggtagaataagcactcagtaacggagtttcagatgaatgaactgtgtagatgacacaagctctgtagggaaggaaccatcagagcactaaaggaattaggagggagagattgtaaataaaaacttctgtttctaggaagcactctggtccttatcactacatttctgtctcttaaaaggctttcttgaagcatagtatggagtaatatagaaaagtgaacatctcataaatacagtttgatggagttttacaagctgcacacccatgtcatcaatgcccagatagataaatggaacatgaccagtaccccaggaagccctcttcctgctccttccagtcgctgttctcttctcccactaccaatattaatcgttagccttacttttgattctcatagatttgttttgtctgattttgaacatcatattaaaggaatatttcagagtataatcttgtgtctggctttagctcaacattattctgtgagattcaaccattgttactgatggttatagatgagtcattctcactgctataccccacttcattatgtagtatgccacaattatctattttgctgatgagcatttgggaggctccaattttggccataatgaacagtgctgctatgaattttcttgcacatgtcttgtgatgaacctaagtatgcatttctgttggttatagacccagaatggaattgctgacccatagcatatggatatattgaacattagtaggtactaacagtttttccaaggtggtcatttcagtttaaattccccttggcacatatgagagttctgattgtttcacatctttgtcgagacttggtattttyttcttttttagccatcccttcatgtttgtggtggtgtctcatcatactttttgccattaaaagtgttttgctacgaaaaatacttccccattaaaacaatttcaccattaaaaaatatttcgccattaaaagatatttcgccattaaaaatatttcaccattaaaaaaaaattttgtcattaaaaaatttcaccattaaaaaaagcttaaggtcaagtattcttatcttagaaatgttttatttctctagttggttaaaatatttctgactcttgaatggaagatgatcttcagtctttaaggtgactgaaatggaaaaataattcattcagttatctatcttgttacattgactttgctttaaattctaggcatattttgctttgaaaaataatagaaataaagaaaggcataaacctggagaccttcacccaatgaaaaaataaagtcaacactgtgtataccatttctaagaataaattgagcgccagctttaaaataataaagatattaaactatagtatatataatttaacagatacaggattattgtttccacttaacactcttcactggcttgtgattaattttttttttgcttgtttttgttaagaatgtgtaaatcttcttgagcaaaagatttatgatatagggaaaatgttcatagctatttataatttgggtccacatttcaatgagcatgttaatctctcttttaaataccagaatgcccctctctcctttttagaagtgaaagagcttctccatccaaatcttcattttgggtcagtatattgtcactgcatttatgtgttccttcaaagcataggacaagaaccaattcatctctttgcttatcttctaactcagaatcactctgcagccgtgaaaataacaaaaggtgcggggtaaaactgtagggttgacatgggtgtgaatattggctgtatgtcccttactgcccaagaccttgccctgtgcatgccccgctcccacaaaaaaataacttaaacttcttgacttttagtttcctcaactgtaaaataaaaggatagctaccttgcaaaagttttggggttatgggagactaagaatgtggatcaaatgcctataagaaaggatttatttttctttaaattaacaaagttttatctctttaaaaagatgtaatagtgttctgtcagatgctctttggtaagctcccttcattttccttctagggttgacaattttggtttggggcttttgcttcggtccaagcagataaaacgcatggtctcttcatatgtgggagaaaatgcagaatttgaacgacagtacttatctggtgaattagaagwggagctgacaccacaggtgagamaatttgcttttcttttataatactaacttactttaaaaattccttttttctccgtggaaatttctttgtgcaaaagaggtaaggcagaaggaatagtactttgccaaaccagggaattttgtttctaactcacacctgttgattgctggaggattaatattttcttctactgtgtactgaaaaaggagatatttctaaaagatatccaggctgcaagataagattttaagtttggcactgtaatgtgtattgtgccagaagcatacaaaaggatttgctggaatgtttgagaatcatcctaaaaagttaatttataggaatttatttttatttttttttttgaggcagagtcttactgtgtcacccagggtggagtgcggcggtgtgatctcggctcactgcaaactccacctcccgagttcaagcaattctcctgcctcggcctcctgagaagctgagatttgagattacaggcatgtgccaccacgcccagctacttttgttttctgtatttttagtagagacgggatttcaccatgttggccaggctggtctcgaactcctgacctcaaatgagccgcctgccttggcctcacaggtgtaagccaccatgcctctccaatttctatgaattttagaactagaaatttatgggtgatctggtcttgctgagacacttcagagtgaagcccttgaaaggtgcatgtgactatatctgagtaagtgctgggatcagaacctagattcccagggaactgatgttactacaaagcaagcagttactataattaatctagcaacttttcactcattttctatgtcatctcttaactaattggagttattcataaagaaaggaaaactttctgaaatctttaagtaaaatgagggtctacagtttgctcttctttcattttgacatgctctgctctcagctcttgaactgagccactccgctttattttagtcaacagaaaatattgctactgactttgccaagttggtaataacataatttagtagatttttaaaaattagtaatgaaatcatggtgtgtttgtctagaaagcacacatgggaactattctgaggctcgtgttgcagtcacacctggtcactctatagcaccgttacctgtacataccatagcattgcactgggcttggtatttactcaattttctcagttttttgaaaaaacaaaaacaaaaaaaacaaagatgtcttagtctgctcaggctgctataacaaaatatcacagactggtggcttaaacaacagaagtttctcacagttctgaaggcttggaagtcctccttggcttgcagatggccgacttctcacggttcttgcatggcggagagcatgcatgctcactctctgggtgtctcttcttgtaggaacactaatcataccagatcagggcccaacctttttgacttccttcaaccttgatgacctccttataggccctatctcaatacagtcacactggtgactaggaattcaacatatgaattttggggagaacacagttcggtccatagcagtatttttcacatggtaggttaagatacagtattctttgggttgtggaactattgaaaattaaccttttgattacccttggtatcttttatgttactccttatttcgtcagaaagtacgtacatcattaatatatcatttttttttttacagtttttcctcaggctaagagaggtcagtgtctccttccccaacttagtggcccgttagtaaacactggctctggcagcttattttgcagcctgaaggctagggggaggagtatcgatggtggggatcaggagttctttggtgggtgagggtaaggagctggtggcacctacagaaggcctatctgcagaaatagtccactttcaggcccttacctggtatgatagaaggagagtattcagggagggtatatataaaacatattttaaggcaaggggtagtgttatggtaattttgatgatttaattttttgtaaatgttactaacttcacaacacaaggtagagtcatctctttccrttggctagataatcagttatctggaagattttcagttataccccaagtctctgtttccccagaatattccacctacttgaatgactcaatgtctcaagtcccaactgttagtttcttttttgagttgaatacttagagtcctgttaaagtagaaaatactttttaaggttgggacaatatgaacacatcatcattaataccatgaaccaattcttttttttcttaaagaggcagatctcattatgttgcccaggctggactcaaactcctggcctcaagtgatccttyacctcccaaagcactgggatttacaggcatgagccatggtgtccagccccaatttttaactactgactagccagtcagttttctagtaagactgttgtaacaagtctatcacagtaggcgtcaaggttaggaagggtgtcaaggttcagggccagagttgattccttagggaaaacctgggtagaaaaacagttgagagtgagagagccagggaaactagtcttgaaatcactggtacctaggaagaagagtcacccatcggaaagatgatgatcaaaagaagatacaaagtaactttgcttgcagctgtttctactctgaaacaatttgatgtactcttggcttttaaaaaccaatttaccagtatgctgtatttttcactttgttttttttcttagacgatttgtagataaaaatatttatgaaaatggtttaaaataagctctaaaatttaaacactttacattattaacttgaataaaatttaggccataccaacatagatcatgaaataaaacaaaatttaactgcattacttaatatatataactaaagtttcataattcagattttaaaattgacttagaatatcaaaaatagacacatttaaatgtgtcaagagatcattgagaggtatggaagctcaatgcatgactatacaaataagcggttacattttgaatgtggatttagaatggttctagaggggcagtaacttcttaaaattgatcttctagcatacaatattagtgaagtatgctaatgtacaatgctagctactttttagaattataagcctctagatagtaggaaccacgtctaaatgtttgtgtccacatagagaagtgtgcttagtgaacttatggggtgttggttgctcacttgcagggcacacttgcagagaggatccgtgcaggcggggctggagttcctgcattttacaccccaacaggktatgggaccctggtacaagaaggaggatcgcccatcaaatacaacaaagatggcagtgttgccattgccagtaagccaagagaggtaagaaacactcttaaccagattataccaggatccctctttccacgtgggattttgggtggatcattgggcaaataagtataaaatcacctctatgtgagaaaaagcactcattcattttcataaataggtgaaatttctagctaaatctgggcatccactagcatttaaaatcacgtagagaaactacaataaaaagaaggaaaaaatggtgtaatccacatatggtgtactagtcaaggttagttacttgaactgattttatggtaggctttaacaaattgagaaacagttatacttgctgattatgcttatatggaaaataaagtagttgtggtatgcatgctagcaaactctttatgctcaggcccttcctaaagtgactgtaggaagaaaaaacaaggaaataatatgtttgtctgaaaccttgaaaggaactgttatgatagaatagagagttcatatgrtcactatttattttgtatcttggacacatttgagcttttgatggaataacctacttctatttaaartgctgagtaggatggggtacatctatcctaggcatattatagaagagtagaatttcagataaaggtatttgagatgctcaggttggagaaaatttcaaaaattacactggccagtatttcattacggtattttttagtatctttccattttcctgtccaaatggccgaagaaagttaacacaggttgcagaaatgctgtagtcatctctggggaagtgaacgtagtaaatcaggggatctcttatcacttttctgcatatggggatgctggctgtgcccctcccattcctaggaacgatcagagggaagattggaggtcactgaatatgtcctttgatgttcactgttgatctccagctgcatcttccatctggagacatctttctgttgagagtgatctatgtggattcaaagcttttattaatgtgttttttagattctggatattagccctttgtcygaagagtaggttgcgaaaattttctcccattttgtaggttgcctgttcactctgatggtagtttcttttgccgtgcagaagctctttagtttaattagaccccatttgtcaattttggcttttgttgccattgcttttggtgttttatacatgaagtccttgcccatgcctatgtcctgaatggtaatgcctaggttttcttctagggtttttatggttttaggtctaacgtttaagtctttaatccatcttgaattgatttttgtataggtgtaaggaaggatccagtttcagctttgcgtacatagtggtctagaccagtgtttctccagcaccatttagttataatagggaaatccatttcgcaccaatttgccttgtgtgtgcggcagatgttgccgaagatcagatagttgtagatatgcggygttatttctgagggctctgttctgttccattgatctatatctctgttttggtaccagtaccatgctgttttggttactgtagccttgtagtatagtttgaagtcaggtagtgtgatgcctccggctttgttcttttggcttaggattgacttggcgatgcgggctcttttttggttccatatgaactttaaagtagtttttttccaattctgtgaagaaagtcattggtagcttgatggggatggcattgaatctgtaaattaccttgggcagtatggccattttcacgatattgattcttcctacccatgagcatggaatattcttccatttgtttgtatcctcttttatttccttgagcagtggtttgtagttctccttgaagaggtccttcacatcccttgtaaaagttggattcctaggtattttattctctttgaagcaattgtkaatgggagttcactcatgatttggctctctgtttgtctgttattggtgtataagaatgcttgtgatttttgtacattgattttgtatcctgagactttgctgaagttgcttatcagcttaaggagattttgggctgagacagtggggttttctagatatacaatcatgtcgtctgcaaacagggacaatttgacttcctcttttcctaattgaatacccttgatttccttctcctgcctaattgccctggccagaacttccaacactatgttgaataggagyggtgagagagggcatccctgtcttgtgccagttttcaaagggaatgcttccagtttttgcccattcagtatgatattggctgtgggtttgtcatagatagctcttattatcttgagatatgtcccatcaatacctaatttattgagagtttttagcatgaagkgttgttgaattttgtcamggycttttctgcatctattgagataatcaygtggtttttgtctttggttctgtttatatgctggattacatttattgatttgtgtatattgaaccagccttgcatcccagggatgaagcccacttgatcatggtggataagctttttgatgtgctgctggattcggtttgccagtattttattgaggatttttgcatcaatgttcatcaaggatattggtctaaaattctcttttttggttgagtctctgcctggctttggtatcaggatgatgctggcctcataaaatgagttagggaggattccctctttttctattgattggaatagtttaagaaggaatggtaccagttcctccttgtacctctggtaggattcagctgtgaatccatctggtcctggactgtttttggttggtaagctattgattattgccacaatttcagatcctgttattggtctattcagagattcaacttcttcctggtttagtcttgggagagtgtatgtgtcaaggaatttatccatttcttctagattttctagtttatttgcgtagaggtgtttgtagtattctctgatggtagtttgtatttctgtgggatcggtgrtgatatcccctttatcattttttattgcgtctatttgattcttctctctttttttctttattagtcttgctagcggtctatcagttttgttgatcctttcaaaaacaaatttacaagaaaaaaacaaccccatcaaaaagtgggcgaaggacatgaacagacacttctcaaaagaagacatttatgcagccaaaaaacatgaaaaaatgctcaccatcactggccatcagagaaatgcaaatcaaaaccacaatgagataccatctcacaccagttagaatggcaatcattaaaaagtcaggaaacaacaagtgctggagaggatgtggagaaataggaatacttttacactgttggtgggactataaactagttcaacccttgtggaagtcagtgtggcgattcctcagggatctagaactagaaataccatttgacccagccatcccattactgggtatctacccaaaggactataaatcatgctgctttaaagacacatgcacacgtatgtttattgcagcattattcacaatagcaaagacttggaaccaacccaratgtccaacaatgatagactggattaagaaaatgtggcacatatacaccatggaatactatgcagccataaaaaatgatgagttcatgtcctttgtagggacatggatgaaattggaaatcatcattctcagtaaactatcgcaagaacaaaaaaccaaacactgcatattctcactcataggtgggaattgaacaatgagaacacatggacacaggaaggggaacatcacactctggggactgttgtggggtggggggaggggggagggatagcattgggagatatccctaatgctagatgatgagttagtgggtgcagcacaccagcatggcacatgtatacatatgtaactaacctgcacattgtgcacatgtaccctaaaacttaaagtataataataataaataaataaatacatacatacatacataaataaataaagagaagacttctggattggaaggcagaaaatgagtgcaattagggagggaatgcagggggatttaaactgaatattaatgttctatttcttaagctggtgttataaaaatgtataagtactgcatatatttttaaaatgctacataagcatattttgtacatttttatatgataaattttacattaaaatattttaagataaaaaatgtgttttttatgtttgatctttttcctttactgtctaaataagtttaaaaggcttcttgacaaagtaaaagacaggagcctaattgttaaaatgaactgtagtagtatctcataaagttcccggaaaacttgsgataaatactttgatagcttgctagaagttgaaaaattaattcacctcgtgaaaatatgagactaaaatatttcttaggttcatttctgcctggaatcaggtgcctcaaactcgtagttttttaattttgtctgaattccctaggaatatgacagataatttatttcttaattcttagtactttttttttttacttaaagcaggaaaaagtgagttcatttctaaattagtgttatttattgaggtcctactctttgccaaaccctggtctaagcactgtggtaaaatgatctagatcaagtcctcctgctagtggaggaactgacaatgaatgaataaatgcataatgtctatagtggaagtactgtgaagacaaatcaagtagattaacagcaaagagaattaattatcactggccaggcagctgatattccagactggtggccagggagagcttctttggggaggtgacacttggtagagacctgaataaggtaggagaacgaggcaagtggagataagagggtttgtgctctgttcagaaggaagagtaagtacaaggtgctgaggcagctacaggcttgccstgtttggggaacaggagggtggtgaggctggaacagcacatgaggcagagagtgataaggatggagattgaagagaggcaggagtcaaattcatgcaaagtttgaattttacggaacgcagtgggaagcctatggagttttgaataagggtgagagtgatgtaatttgagttgtcttttgtaactatcactgtggctgctggggtggtggttcttttttttttttttttgctaggaagccaagagcagaagcagcgagagagggtttaggaggctgttgtgttaatttaggagggaatggaaggtggctagaccaaggtggtaacagtggagtttgagagaagtggttgaaattggtgttatgttcatggtagagccaacaggatttactggtagataggtaaggggtgtaagaggagtcaagcatactgtgtaagatgaatgaagcacaggccttatcaaagagctctgtttggaacatggtgcattggagacgttcattagactccaagaggaggtgcttagtgaacgtcatatcaggggagagtctagagccaggatagagactttggaggcatcagcatatagtatttaaatctgtatactagatgagtgtctaggggctgagtgcagagcacctygttgacatttagaaattgggaagagaaggagcagcaaagagaaatgggaaagagtgattagtaagtaaagaagaaacccaggggcatctggcaatttgaaagagaagggaaattttaaaaagaagggaatgatcaactgagtgtgaagaggttggtaatacagggcctggaattgaatcattggatttgcaaaaacagaggtcattgacaactttaagrattattcctttttggaatagaggggatgaaaatctcattagattcaagaaagaaccaaaaagtgaggaagtggtgactacgaaatgtagaattctttcaagtgagtataatagctagtttgacaaaaccaactccttccccatttttaaatttcagtaaaactaacactcagcaacagctggtatgtagacacatcagaaaattatgtaactagaatataaaagaagcctatttattgactttgccttgcatttgcatatatttaccccagttttctagatctgtatgtaaaacactcaactatcattgttggtatttacagtgatttttgaaatacataagccgttccaaaataactttgtatattgatatgtggctcagaaatatctttcatataatttatcttagttcctatagtaagatcctcattcatcagttattccctaagtgcattaatcttttttttagcaggcaacttggttaatgtctttaaagtagcctttatttaagaaaggttttgtttcaaaccatagttgaaataaatgtaccaaaattttctattttctatagcagctttttgtaaaacgcacttagtctgtttttccactagggggtgcrgtagggatgagaatggagttctacattcacatggctccattttgtgcagtgatggagtgtggcaatggatgcttgttttaattcccggaaataaaccgtcaagaataaaagaacatgatggcaagacagttttgctttatgttcttccctccaaaattggtagtataattaaaaggcaataaacataaataaaaatcaatagcattccctagatcagtaatgtcagaagagtagataggagcaaatgtaacattcacagtagcaagagaaaccactaagtacctataaataaacctaagaaaaaaaataaagcttttatggagaaaataataaaactattgaaggaggtcgaagaaaacctcagtaaatggagacatatactatgctcatgggtgggaagatagggcttgttggttttctccaaatttactgattctgtgaatcccatttaaaatctcaacaggtgatataggttattgaggatagctgaatgatagatttttgtaactattttatgtaggaaaacaatacatagaccattttatgcaaactgttttttcaggggagagggaaagaaggactatttttcacattcaatatacaacctgtacatacaaatagtaaaatgaaaatagtctatccctcaggccatagaactttcagttcctcaaatgcacaaattttcttttgtcactggacctttgcttgtctgtttccttagctccccttagaccactttgactaagtcctgcttgcctaacactgcttatctttgaagtctstgggatgcttttccctctgagaaattttccctcagtaggcttgtatccttattatctacctctatcagagtgcctctatcacaatcaagacctatgcaaatacctgatgatgccttctccctcttctgcaggtgagggagttcaatggtcagcactttattttggaggaagcaattacaggggattttgctttggtgaaagcctggaaggcggaccgagcaggaaacgtgattttcaggtattgtgatagttttaaaaacactcgtgcrtatcagcaactctaaaaatggacatcagagtgaatttggaatttaaaaatgtattttcgtaatggcccaaaatcatacatgcccatgtgtattgcacatatataggtgtgtgcagggctgctggtatgtccacttgtgggagtctgtttagactggtcgatatctatgttgcactgcttgttaaatatttggatctatatgcccttttatataggcacatgcagttgtttttctccttgtgtattttagttgccaagaccagttacatgcttagaaaatgtgacatcatacaattttatttaattgatattgtaatttacatgtattgtcttaaaatgtcaaagctaatttgatactctggaaagatactgctaataatcattggggtcagtccttcagtccttttggtgtcttctaggaaatgcttacaaaggttctatctgaaaaattgattaacctttataatactgaattttcaatcctctcagccacagactttatagattttaaaatcttttggttattctaagcatactaagtatttatatcttggatttatagatttatatagttgttttttgaggaatatgaaacctttgagtgtacacttaagagttttccaaactgatcttgaagactttacctatcagattacagaaatcattgtttttgcttatttatcatttgctgctttcgattaacaatttttaaatctttagcaaatgcagctttggtgcaattacagttaagttctcagtgatactctcatatcactttttatttctgaaggacttatgtgatattaatgctctttgatttctttaatttagccagttttttaaagtacaactaattttggcaataacaggagtaattttacatcatctttaccttatttgacacgtttgtgtaatatttacacgtttagttgctttttaaaaaagattaacaaaattgtatactaccaaacagaaaggaattattgaaaatattcccatgtttattctgcgctgcagtgcctggctctggtatttgaaggctgcacaagggctattctgggcactgactttatgctggtggttaatgagttcgggtgtgaaatgaaagcttgcatcaccaatggtcaagtgaccttaggattaacttcatatttagtgggacagctggaacagaagtctgtctaggttattcaagtgggggacttgggactcctttgcctctgaccattctgcccttggagcttttgatgcctggatgtctggtgggatctaacccagcaacttgtgaaagttcacgagggctcctttctcaaggatgctcctattcctgtactcattcttcaatctgagcaaaagaaatattggtggctcaaaagagctagtaaaacatagctgtgacttacttccttttaccaaagaaattctgccatcaacgtatattcccagagacaaaaaatatgttttaatttttaccattaggggaactgtattgaggaacatcagagtgcaaaaccatcggcaaaattggcacctgctagaaatttttacacctcggggtctgatgtgggtgttatacttccaaaaacttcatcagaaaatgattctccagaatgatctttatagttgactcacaaattatcaatgaatgtttcatttagtttcagcaataggcttctcttcaatagagaatgtaattactgtaccttctcatgtgaagcatttgctacttttcctttcttaatattttaatgaaagcaagtggttgaatgaaatatttaactaatagggacaaagcatacttgttaaaagattaagggaaattaacttcaaataagatagatttattaatattcctttttttgttgtagctatatgttgaatgtgaaaaatagttcctctttccctcaatcctgttcaaaacaaaactatatacattgaataaagtagttatggtttttaaaatttatgagatatttatgaaactttattaatggaaaatatgatacactctttttggaaagattcttagattcttagttcatagaaattctaatctataaaaccttaaaggtgacagagatgcttatttttcgtcttttcccccccactttcttatctcctccacccctgtaggaaaagtgcaaggaatttcaacttrccaatgtgcaaagctgcagaaaccacagtggtagaggtaagaggttatttttgaattcttggtgttaattatttaacttgatgttaagtattaattcaagaaaaagtaccacagttcatttgttttatggataacaatgacagcttttttttttgttttggaaatggatccattctatctaaatatataatagttaaaattttgctgtaacttcagctttctggttagatagggtctcactagaatgctctctttgggaatcaagcaatgggaccagcttataaaagtcttttgatccttaaatgaaatagatctccttgaatgaaatcccaagatgaatttatgtatgtggaatccctggaaaacagtaaatgtgtcagaagaagttcatgatcttactgtgatagattttgtgatttctttaagggaagagcattgcacatataactactttgatgtggttcaattcagagcaaattcaggcactgactgtcctttgggtatctcagtgtttggaaggggcttggataattctgcagcctttccaggcttaaggacccagggcagaaacaggggcttataccaaaaccrtgccattttggttgtaacatattgaacctcaaagaagacttcaaatggttcttaacttgaggctttgaggatcaacttggaacccaattttcgtgggagtttgaggtagtttttccttgggagggctttataggacccctattgggatctggaattgaaaatacataggttcctgattgatttttctcatgatggcaggtgttgtatgtggtatcttttgattcatttttacaaggccaagataatgtttcatgaagtcagtacagtgtattttgaaacaatcaaatgttagagttttgttcctttcttggaaaatgaagtgtgctatttttaaattgctgaagtatatgttactttcaaccgaggcatggtggtttcttttgcaatggctttacattttctgaatttaaaatggatagtgtggcttacactttctgtgtaacctgtctttaatttattcatccatcttaatgacctgtccgtggcacacaactatagcattactgaaaaaaggcctacagcatagcttaaaataatcaatagttttacaccctgttgacttcctgtatttctgtaaaactgtcagaaaccagtatttctttccagagtacagaggggcgttatgcattatcctgggtgaagttctctttaaaatttttcctgttataatctggttcttttcagttcatctcatttcttacaagagcagaaaataaccttgtgttgaagaatcattgcaggtattaggaaagagaggctctcttttggcctaaggagagaaaatcctttaactaagcctgcaaatgtaataaaggctkccctcctgtgtcccggaacagacatctctgatggatcacagaatgctttcctggtaggccgagacacacattagggtctctttcaatacagtaatgtgcgcaaccactcctaattcactacactctccagtatggtagccactagccacatgtgacttataaaattaaaattatggcacagtggctcaggcctaatttatcgcagcactttggaaggctgaggcaggtggatcgcttgagcctagatgttcaagggcaacatggtgaaaccctgtgtctacaaaaaattagccagacgtggtggcatgtgcctaagtcccagctacccaggagctgaggtctgaggatcgcctgagtccaggaggtcaaggctgcagtgagctgtgactgtgtcactgtggctccagcctgggccacacagtgagaccctgtctcaaaaaaaaaaaaaaaaattgactgagaaattgaatttacctttatactagtcccatatcaagcaaagctacatgtggctagtgattactgtattgattagcacaagtaaacattatcattgcaggaagttttattggacaaagctggattagaaggatcaagaataatctgttatactagtacaggaacataagcaaaacagctctttggactataggattattgtaagcctacccctgacacctgttcatagtagaaacatatagtatacatagtagaaacatgaccatagattgaattgtaagaactgtgctctcaaaagtggaaaataatttggaattggggttagtgcctagattgggcattttctgatgtgaaactctgttttggctttgtgatttgtattttgagtccagtgagtaccctggacctccagccccctgttctgtgctataccctatgcactccgttacctgcgctggcctccaggttgctatgacttttcaagccctatcttgctttcttttatgggagtcatagtgggatggatgattataagctggtctctgaagtgcaacatttaagaggaatcttcagggatcattaagttaactgcatattcttctgcatgcaaaatgccaataatgttagctactattcaggcatttatgatgtattagtcactaccgtattccttatgtgcattattttaaattctcacaatagtcctatgagataggaataataattatctttattttagagatgatgactttaaggcatagagaggttaagttatatacccaatgtcacacagcttaggtggaaccaggagagacccacagagaaactgattccaggctgtctactcttttccattatgtaatgaaatgcttccatgttatctatcaatggatgctttaaactcttggaagatattgaatctccagaagtagtccatttcattgctaactattagatacaagcaaataaggagtttttttttttttttgcccagcttatttttctatcccagaccttccttgacaattatttcaattgtagtcttttttttttttgttctagtaccatctaccttagagatgtctttgagaaaggcatcatcctgtgttcagtggccccgtgcattcattcagtctttctcttggactcttttcattcgattgtctagcctctttgacctttaagctttttacatatttctctaaatgtggtgactgaatgtctgttctagtactatagtatcttaagcagtgggaggcataacagtgtgactacaccctatataacatagtcaacggcgtctttttttttttttcttaaataaagaactcttagctcatctcctttcttttgaattgtggaatctggattagagcttgtctcctaaagctctgtgccagcatcttcccactccacaatgctgcatcttctcaacctttcttctccctggtgatttgagttttgacttgagttttaaagaggatagaactataaatatttaaagtactaagattcccttaggcatcttaaatttgttttggatttagaagcagggtggcaaaggaacatacmtcttgcttttttgtttataatttttaaattatataatttacagcaaatgttttacatcaagaagtaaatgagtatgtttattgtgaatttaaaagaaaatcaaattgtccttgatgttacttatttctagactctgcaaaagggaaacattagtcctttttggcaaagttttgttttcagatgtgttctagaccaagggccccaaccctcaggccatggacctgtactggcccatggtctgttaggaactgggccgcacagtgggagatgagtggtgggtgagtgagcrttactgcctgagctctgcctcctgttagatcagccctggcattatattctcataggagtgggaaccctgttatgaactctgcatgtgagggatctaggttgctcgctccttatgagaatctaactaacgcctgatgatctgaggtggaacagtttcatcccaaaaccacgtccctgcccaacccccatctgtggaaaaagtgtcttccacaaaactgatccctagtaccagccaaaaaagctggggaccacttttctagataaacttatgagttgtgtaaaaccatagaggtgatcacttatgtctgtttttaacaaaaccaatatgaacattacattcatatttcttaaaatgtgcagccatttgcatgcttccccacaaagttgtgacacagttgatgctggctgtatcttcctacccctcttatggacctaggtagctacttgggaaaaatagtgcacatgggcgcatattgccacacatgctagagagatgtttctcttttcagtccagacagtgttatttctggacctccctctctttgagtgagggtgaagtcttccctgataaactttacaagttcaagtgcaaaaccagccagggaatgactcttgggtgttgccttccatgtgtatgacaaggagtagcaaggactcttgagtcttccaaagggaactaatttggctgtttctcaggaggaatcctgttattgtgttaagctctcaactccctatgagcccctctgctagtcttctgtgtgcataacctaccatctaagtttctctggaaatggcctatttctgtttttttttgaaggagcctgtaatagaaaacctatggggagggatgagagtgcttcactcaggagactgttgatgctttgtctcctgcaagcagcctggcatgcacgtgctgtcagaaaaggtcgtctgactcagccactgaagctgctgaggctgcctgtgactgaaataacctcactgctgtggatttctttgtgctgtcaggcttgtgccatggctagtttacgagacagcaaaggtttacccaaggccctttcaactattttagttaacttcagctttcagtcaaaacaagtacatttatcatgacataaatataattacttttattgtatttatattgtggtatgtttgcctgtaaaagaattgcttagatgatacgatatttggtgcacacaaatatttattgtagcctgtgtggtttatgaatcacaatataaattgaatatcggtgaacccatctaatataagaattagaggttaatggacatatagaaaattattttcaaaagtgatattctaagacttatttataagagccaggcttcagggagctgtatcttctgtgttctatactggtgcctggcatgtgccattgttttaaaatttttaaatttttgtggatacatagtaggtgtatatatttatgattattgggctgttcagattcttaatttctttctggttcaatcttgataggttatatatgtctaggaatttattcatttcttctagattttccaatttattggcatatagttgctcctagtagccactaacgactctttgaatttcttatgagttttaatgtcccctttttcatctctgattttatttgggtcttcatccctacccccacccccaccgttgttagtctggctaaaggtttgtcaattttgtttatcttctcaaaataccaactttttgtttcattgttcttttgtattttcttcatttcaaatttatttctgctctgatctatatttcttttactagttttgggtttggtttgctcttttctagttctttaagttacatcattaggttatttctttttcttttttgatgtaggcacttatagctgtaaattttcctcttagtaatttttatctgatgaaatgttctgtagatctctattaggttcattctgtagtgcagattaagtcctatgtctctgacttttcttcctgagaaatctgtcagtgctgaaaatggggtgtggaagtctccagctgttgtattttaatctgtctctctttagctctaataatatttgctctatgtatccggctgccccagtgttgggtgtgtatatatttataatcattgtatcctcttgctgaattgacccctttatcattatatgataagcttctttgtctcttcttacagtttttctcttgaaatctattttgtctgatgtaagtatagctactcctgttctgttttgtttttttttttttttttgkgggtttccattggcatgggatatatttttccatccctttatttttggtctctgtgtagctttataggtgaaccatgtctcttgtagacaacagaccactgggtcttaacttttttcatccattcagctactgtgtcttattggagagtttagtccatttacagtcaatgttattattgataagtagggacttattcgtgccattttgttttttgttttctggttgttttgtggtcttctttcttctttccttccttcctgtcttccttctagtgaaggtgatttttctttggggtgctttgatttcttgctttttattttttatgaatctgtagttttttttgtatttgatgttagcatgaggcttgaaaagactgtcttataactcgttattttaaactgatgaaaacttaacactaattgcataaacaaataagcaaaaagaaaactaatacaaactctatgcttttttttttttgagacggaattttgctcttgttgcccaggctggagtacagtggcatgatctcgtaagtagctgggattaaaggtgcgcaccaccacgcccaactaattttttgtatttttagtagagacagggtttcatcacgttggccaagttggtctcgaactcctgacctcaggtgatctacccacctcggcctcccaaaagtgcagggattacaggcatgagccactgcatccagccaaaactctacacttttacttcacccctatgctttttaactttttgtttctcttaatttcttattgtgctatgtcttaaagttattgtagttattctaattggttctttagtctttatgcttaagagtgtttacacaccacagttgcaatgttaataatatcctgtgtttctatgtgtgcttattattaccagtgagttttgtatcttcagatgatttcttgtttgctcattaacattcttttttttttttttttcagatcaaagaactccctctatcacttcttgtaggacaggtctggtgttgatgaaatccctctgattttggttgtcttggaagttctttatttctcctccatgcttgaaagatattttgccatatatactattctagggcaaaagtttctttccttcagtcctttaaatatgtcatgctactctytcctggcttgtaatgtttccactgaaaagtctgttgccagacatgttggagctctgttgtctgttgtttcttttctcttactgcttttggaattctttatcattgattttttgggaatttgattaactcgcaaaaggtagctttggaggtagtcttccttgggttaaatttgcttggtgttctataaccttcttgtacttgaatgtttatctttctctaggtttgggacattttgttatccctttgaataaacttttctactcctatctctttctctacctcttctttaaagccagtaactcttagtattggccctttcgaggctattttctagatattgtaggtgtgcttcattgttctttatttttcttttgtctcctctgactgtattttcaataagcctgtcttcaagcttagtgattttcttctgcttgatcagttctgctatttaagagactgatgcattcagcagtatgtcagttgcatttttcaaatgtagaatttctgcttgattcttttaaattatttcagtctgttaaatttatctgatagaattctgaattccttctttgttatcttggatttcttcgtgtttcctcaaaacagctgttttgaattctgtctgaaaggtcacatatctctgtttccccaagattggtccccggtgccttattttgtttggtgaggtcatgcttccctagattgtctcaaggcctgtagatgtttgttggtgtctgggcattaaagggttaggtatttattgtagtctttgtggtcttgtcttgttagtgcctttccttgggaacgctttctaggtattcaaagggacttgggctccaaccataattgctgtggtttttgtaaacttgtaggaggtattgtcttgatggtcttagataatatccagaagaattttctgggttaccaggtagagactgctgttcttttcccttactttcctccaaacaagtggaatctctctctctctctctctctctctctctctgtgctgaaccgcctggaactgggggtgtggtgatacaaagtcacattccctatggccaccaccactgggactgtggtgggtcaggcctaaagccagcacagcactgggttttgcccaggcctgctgttaactactacctgactaccacctattttaactcaaggccctagggctctacaataaacaggtggcgaagccagccaggtctgcattcttaccttcagtgctgtgagttccccaaatgctgtctgatttttggttcttgtgatggtgcttttctgtttacagatcgttgttaaaatttggtgctcctgaggtgtggacaaatggcttcaattccaccatcttgctccaccacctctccatctctttttaggaggttaatcagaggaaaagatcatgggtatgtctgccatcctgccaagcagacatgtagtgtttctgattggtgagtgaggaaaggtaaagattgcagtgtaactgataatacaaattttcattttaaatgtctatttttgaggataatgaacatatataatagtaagcagaggagtataatgtaccttcctgagcccaacaccttagctccaatgactatcaacccatggtcactcctgccccattcacatccccatctctttgccttctccctcctctaattgatttgaagcaagtaccagatattacagtgcaaagatagtttaaggaaagttcactgatactcaaattctagtgtactaggtatttttataggttctggaaatacagcagtgaacaaagcaaaactcactgccctcatggagtttacattctgatggtctatcttgataataggatgaataataagtaaaatatgtagtatatttgatattgctgtgttaagggaggaaaaacaaagcatgaaaagggacctgatatttcagggaaagaaactgaaacttagggtggtacagtgaaaggcctcggtgagatgacttctgagtaaaggcctcaagaaagagaggaagctagatttgcagctaactgatggtggagccttttagggccaaatgagtagtgcgtgcagaggcctgaggcaagagcttccctggtggtttggagaacagggatgacaaacttttttcattgcatggtcatagggtgtggagtcttacgagaattaactttcttgagaataatggcaatatgtttttcaaagactgtgacttttgacattggagcctcctggtatttgtgactctggccctgtttggagagctttgtgttaataattcctcatacattatcttagaagtgatcaagctggttgttttactttacaatagaaggtgggaatgcagtagattttaaccaggtgacttaagcactaaagtggatcctatgaacatttaattttcattattaagcaggccaattaatgtatcagtgttttagagatttggggcatcatgcttcttgctttagagaaatgaaaatgcctaaagagtaagcataattccttctctcttaaatttttcytattctttagactgctaatgcctaatgatacagttttaaaagcagtggaactcataatttttcaagaggcaataaaaagaatgttgggataggaagaaaaatgaagcttctgtccagataagacaaagacttctcaccatgttgaaaaacttcattagatcccatttcaagaacacacacatccatacgcaggctcattcctgtgtgaaattcattcacacacaaacatctctgacatatggaggcatatttataagaacttggctgaaatgtcaaatttggcattcactatgtgaacttactatgctacatgctctttgctgcactttagaatttacctggttaaagctctctatttcagttagctacgtagaatgaggttagcaaaaaactgttcctaatcttcttgaatctactcacatcagccagttgagttgaacacttgacacaagttcttttaagagaaagaaaaaggtgtctgtttgatacaatatggaaaaaagaaataccttccttccaccaaccctttctgaagaatccttagtccttcggcagaatactatcaccttcctaagtgctaacttttgggatggatgtagttagtgatggatatcattcacacagtttgattttttagacatggtaaattatataaaatcttcaacttacatttattttccttattctttttcagttataatattttacttgtgcttttggactttttaaaattgattactaaatcattcttaaagagatctgtaaattctgtgccacatatttagccaggtatagagtgctttgaaaatgtaatgtcctaacataagcatactgaatgaactgactgatcatacttgtttcaagagtattgaagtatttaaagacaattcattcgtttccttgaattttcatgaaatgctagattggtttgaaaattttggatgctaatgaagatgtactcaatgaagacatattgtagttgagtagtttggcaaaataacctaatagaattactgttacgttaatatttgctatttctaccaaggaagtaataaatataaaaatatggacttggtgaatgcctagtattaacttactgcattattttacatacacttgtatattaacaaatataattcttagcttaatgaccatttacacccagaagaatagcagaatagaaatagtttattggtgataaaaatatattaaacaaagtgttaatcttgacattttatttcttgttgcttggtaacaatgctgcagtaatgcgagagagttccattatctcaggtacaatggacttcattgcattgtggggtaaaaataccaattacagcaagtcatttgtatgccattatcctcacaaaattttggagctattttttatagtttatatagagatcctaaaagaaagtcattttaataatatatccccctttcttgatggattggtgaattttatcctagctatttttggctttttgtctttataatttttcaggcctcaaatttgtgtttttattaacctgtattatgtaaatccaggcttttaaatgttataaatatgcacattataagtgatacttcatagtccttattgaacatcttttatccttgaccacttaaagaagagagaaatatctgggtggaatttttttgcctcgtgaaaaatagggcatattcctcatccttctctaatatagaacttcctaattcaggacatcaggagagcctgttgaactagtgtggcttgtattaaagagaggctgattcatgttgtatagaacatttttttttctctgtaatattggttcacagttattacttacaaggattgacaaaatacagcccacggcctgtttttatacagtctgagagctaagaatatttttaaattttgaaaagaccattttttaaaaaagtatgtaacagtgtgtaccctgcaaagcctaaaatattatttaatccttcacagaaaaaagtgtgcagacccttcatttacagcataacttctatttctgtagtctgaatatattaaattactcagtatttcttaaaggatcaacatagaactgaaataactgatttgaagacaatgaatagaaaattaattagaataatgtgaatttgtatagatgtcgagaaatgactgcaattttgtgggactggttttggggcttctatgaagggaagatcttgtgcaaaaaatttgtgtatccagctgtagttgctgccatcttttaaaagcatgatgcctctgtcaatagatctgacattaatatgatataattacatattgatggactcattttattagaagcacttgcctttttcttggttatttgacttatacttgacggccagtttctcatgtatagaaatgtgtagcctggccatgtgcagtggctcatgcctgtaatcccagcaatttgggaggcctaggagggtggatcacctgaggtcaggagttcgagaccagttggccagcctggccaacatggtgaaaccccatctctactaaaaatgcaaaaaaaaaaaaattagccaggcatggtggcaagcgcctgtaatcccagctactcgggaggctgaggcaggagaattgcttgaacctgggaggcggaggttgcagtgagaggagattttgccagtgcactccagcctaggcaacaagagcaaaactccatctcaaaaacaaaacaaaacaaaaaaaaattgcacagccagatgaatgtcagtaaccaggatgatgggtggaatcttctccagcctgactagtgtccagcatgtggctgtagctcctgctggctggcagagtttccaagagctacagaaatagtccagggttgaagtcatgctgtgttcttggggtttgggagggccctatgtctctgatttttcatctgtatcatcagcaccttaggaggcggaagaacagtgttggagagactttgaggatggtgaggctgattactctttttttcccccaccagttttctaaactgccttgtagctctctcttttctttttggtcagaaacacttttgtaagacttatttatttcttatttgttggtaaggtaaagcctcaaatcaggaagtttacccagggtagcaatgtgctttcttgtcttgcaccgatcctcttaagcagcagaaaaggattgaaacagccaaggttagtgatgaatggcaagtcaattattttagctagattcatttaactcccctttcttataaacagtgttcagaacttcacacttgagcaccatttccgcagtatcttgtgtttgatattactttgcataatgctttgggcttttcaaatcactttcacatacagtatctcatcggatcctctaatcaccaggtgaagttggaggagaagcagctttattacaatattgtaaatgagaaaactgacatagataaatttcctggactcgatgactgggcagttgaatggcatgtaaaggacacttggaagacttggattaagtcctgagtctctctatgactttctggttgctctgacaatatcgaggctttatttctggatatgtataartaggaattataaaaatctgaatgtaggtaggtatataggcatttgtaggagcttggattttaagtgcatttggaaaggtcataattttagcttgcgtattgtttgtagaacagactttagaggcataaaggggcagaccaatgaggagactgatgtgatctgggtgagagcttgaatggtggcttggacttgagtggtggagaggaggatagcattaagagatacggtatgttggaagaggaatctatccaacatgcccaggccttagatgtggagagcttggatagaggaaaggtagagattcactcctacacttggcttgagcaatgatacatcacttactgagacggggaaacctgggatgatcctgttggagtgaatcaagagctcgcttaggattgattggcttcttaggcattcaaatggtggtgacgcaggtgcagatggatatattattgtagtgcttagaggggaggtcggaaaggtagttatacaattgggaataattcacaaatacttgagttagggttatggaatggaaaagatcacttagggaaagaagctctgggactaatcctgaggaggcttatcttttttcttttcattttttttttgaacagaatatgagattaagatttgtttctcactacttttgcaaccttagacaaatgactttagaatctcgtcttccttacagcctctgttgtttgcttatttcatgggtttattttgagcatcagtgggatagagcattccagtgtgttttctaaagcttaaaaatgctacatgctcaccttaatccctcccgctgctttgattaataaaccttagatgactgttctcattgacccagtgatgatgactattgaactacattgtaaatggcagctggcaaggcacatcctctgtaacctttccctgtcttccaaagttctttatctgagaaaataaaaattccataatgcctccgattcctaaaatcttagtgcatgatcaaaaaactaaattttgttttaaaaatattgttagcttaaatccttcagaaaactaaccaatatttgaagtccataaaatcaacttaaacrtgctgataccttacatcaagcaaaaactgtgatgactcttgaggggaatattatggacaccttcacgagagcaaggttcttataaatctgtcacttcatagcttgagttgtacaccctcaaattgatgacctctctctgcctttgtatttgaaatayggagcattagttaatgacccattttatctctttttatactttggctcaaaagattcacatattttggtttgggatgaagaytaaagttatttcctgcttaaaacttgcttgtgctgaataaccactktgacttttttattctttaagaaagaaaagtttacttagctcatgattttagtgggtacaaagtccaagactgggtagctgtgtctggtgagggcctcatgctgcttccactcatggcctaaattggaggaggagtgggtgtgcacaaagagatcatgtgatgagagaggaggcaagagccatwtgacttcttttgaatgaaagtcacatctgttgttcttttggggacataaataaagagggcctcagatactgatgctttctgttcacctgtgggcatacaactccctgaacacagagggacttaaggtccaaaatgtaagttatgtggaaggaagtgttttcttttcttccttatgatagctttgccttattgaatttttatagaattatgaaaatatctttttgtttttggatggaatattttaaaacagttaacagttcctaagactaggaaccaagagttacttaactgttagaatgtaatggtcttctactctgtggtttattccatgaagaaatcaagtccactcatgtctaagactagagtttaccttctctggttcagctttttcaagtttaatgataatacacagtgtttctgccactgagtaacaaagtccacattcagattcttcaaccactcatgtccaaaagtataggtcaccttctctcttattcagcctttgaagtttaatgataatatacagtgtttctgccactgagaacatatttgggttcttcgaagagaattctaaatacaaatcctacctgaggaaagttaaactggaatgtgaagaaccctgctaccttttctgtgccttctgtgaaaaggatctgggtgattcatttaaagaatctattttagtttccttaatagttgcagaaaaggatacaagttttgccatgtattgtgaaaaagttctgttcagttttgaatttcactttaaattttggaaaagctttgccgacacagacaaaactcagaagaaaatttcatcgttattaccaaactcaggcgaatacaggttaactataaaaagctatgagattaagaatgagtttgaaagttttggtgtaatttaactttctctgaggaatttacaaaactcattcatcttgaattgtcttcttagaattggaattagacctttagaaataaaagtagtattaagtagaatctgaaagacatttttataactcagcttctgctataaaaagtattttagctgctgttttatttatagttttttgttcagtgctcttggcatctgaatatgtttgcactcaaaatgttttcacttatttttcctctttggtttatgtttttaatgtacaaggtaatattttatatgtaaattgaggactaggttttataaggagataggaaaatggaatggaaaactttcttaatgaaattcattcccaggaaataggggcagtgaaatggtccaagtagactctatacagctaagatgtgctttacacagagtgtggtagatgctatacttgaaatattttcaataatggtaatataagttgaaggagatatatagcctaataattatgaaaacaacaatagcaacaacttctgtttataccatgcacttacatgtaaagcactttatagtaacccagtgaggtaggttttattgtgtatattttatagaagaacaaatgaggataaggaaagactttaagataacaaaattggtagggggaagagttaagatctaaacatttctttgtgcctctaaagcttatgttctgaagcaaaaacaaatgacggttggtatattttgaggtgcattttacattatgctttgcaatgttaacatttttatctaatttacagtctccttacttgcaggctcatagacctttagctgactgaatttttcagttaacttagtgtagccccaggataatgttaatactttcataaatgcaaaattaagaattgttcagtaatgttaaccttttagaaaatatgaaataggataatctcctaaaagctgtaaaatgagaaccttcacatttaggaagacagaatgtttttttccccccaattgaaaatgaggtagatagtattatatagttgtttgaattcaagatagaaactttaggattctatatagtaactactggtaatgattatttaaaaaatagccacttccaatttcaggcctaacgtgccaggaggttggaagttgccacacccattctcacaataagaaaaaagatgaataaactgaaaaatcaacaattattcttagatccgtcagaggattaaagtcacagggcaaaccactgccacccaaattggagagagacaggctaatacggagaatcacaactgactggagcagaagcctagtagcagaaatctccatgggaaccagtcctggggtagaaaagctcaaactgtaattgatgaattgttggaggctcatgtggacaagtttgagagttagactccagagtggtctggtcttgggaggggcttcatatttctgtgagttttatgtctaggatccctaccagagttttggtgaagaccaaaggaaaatttccttgtgcttctggcaaggggaggggggaaaagtggacattttgaaatatacccagagcgttctctttttaacaaggcctgccttcaagtgaaatgaatgatagtaatgttataagagacaagtgctggggataccatgttttaagatatttgcactacctgtgaagtgatatagtgttatttgaaagagtacttggattaattgtaaatgtatattgcaaactcaagtgtaacaaaaaaagcagaaaaagaattgtatgaaaaagattaattaaaactacagaatgcagaaaagagtggagagcaaaaagaataaagaacaaggacaatgatgagaatagtagcaaatatggtagatattaatccgactaaataatttgaacattactggtccgaacaattaagactcacagtggattaaaaacaagactcagctgtatgttgtctataagaaatmcactttaatatacagacacaaattacaagtaaagagatgaatgtaaaaaattattctaacattaatcaaaagaaagctggagcaattaggctgggcacggtggctcagacctgtaatcccagcactttgggaggctaaggcaggtggattggagttcaagagcagcctgatgaacatggtgaaacgccgtctctactaaaaatacaaaaattagccgggcatggtggcacacgcctgtaattctggctacttgggaggctgagtcaggggaatcgcttgaacccgggagttggaggttgcagtgagctgagatcattgaactccagcctgggcaaaagagtgaaatggtctcaaaacacaacaaagcaaaaaaagttggagcagttgtattaatttcagacaaagtagacttcagagcaaggaaaattattagggataaagagggctagtccataatgataaagaggtcagttctccacaaaaacagaaaaattcttagtgtttatggtgtggcagttcttatttctggtctcctcccacccccaaaccactaccgcagaactagcctcatgagcttcagaagtaccagtactggctgcctcctgtcactcccagtaggggtctgaatcccagctctgagaaacccctggccccatcaccagttccatttacttctctttgttcctcctgcagttactagatccgtgtcacctgcgtgcttttttgcctttttggttctcaatttcttatttaaattctattaaaataactgacaaaactaactcaagaaggagtaaagaactaaatgtaagtgtaaaatagaaaactcatcggaaataagaaaaaagtggccatgcttttttagataaaaacatgatccctgagagaaaaacacttgataggttggacttcgttaaaattaaaaactactactctgtggaagacactgtacagggaaaaaaatgacaaactctggtttgggagaagatatttgaaacatgtatcttataaaagactggtgtcaaacatatgcaaaaacaattaaaactcaacaacaagaaaatcaccctatcacaaaataggtaaaatctgaacaggcaccttaccagagaagatacacaaatggcaaataagcatatgagaagatgctcaacatcatatcattagggaattgcaaacctaaatgaaatgccattacacacctattagaatggctaaaagtcagaacactaacaaccaaatgctgacgaggatgtaaaatcacaggcactcaatcattgctggtgagaatgcaaaatgctacagcttctttcgcagtttggtgttttcttatacaaataaacaaactcttaccaaataatccagcaattacactccttggaattaaatcactatgttggttggaatgcttcctgaaagattaataaattgcctatttttgtttccatgtagaatatgtgatagacttgttcatgctctgattctgagccattgttgaattttatatttcatttctcatatttttcctaaacatctaagaaccactttattggcactgtgtactgactttcataaagaggcaatgttttcttcaggaagtgactgcatgtgtgtccctgtgtagataaaaacaatactttggttaaatgtgggagacaggtaattggctttgaagtccatttcagctgcatattgagtgaagtttctagcttaccaaaactacaaattgctactttcagagttgcttggggatgtagtcaacaacatggctattaggtatacaaatgttaaggatttgctacataagacactgtgattgttttagatcatcttacaatctagttgaggtaggactaacctgaaaataagttgtgcatagagcagtgagtgcccaatttagtgataaagatagtaattgctgtgggatcttgatggtggtggtttgctgcgagtgtatggcactaaccccacccaatccctctccacttcttggccttgtttatgcagataaacaagaaaagtaaggtcaattgtgaaggaaggagaagacttaaggcattttacgcttgccatcttgattgacaggtctagggacatttgggtcaggatgggccataatgggatggggagacactttctgcatggaacaaagagacttgagagaaaacatggaagtgtcttggcttgattttctttaattactgtccatacctaatgtttctttttataaaatagggaccattttagttataatatatatttcattacataaaacattaagcatgtttttgcagttcactaatccctaacgaaagatattttaagttatagtaaaacatatcaacaattctattgttggactttcatgttttccatctttcactattaatgctttagtgattattatttttgtgcatgtctgattatttgaccacatttctagaagtagattttctttatatgagtatcaacattttaaggttttggaaagtattgcgaaatcattctctagaaagataatttcaattataacccctcagtgatatataaaagtatcatttggaactactctcaacaacatggatgttatactttaaacacttgataacttgctaggtgaaaaatgccaccctatagttttaactcaatatctttgacaagagacattgaatatttttcatatatttattgactctatttcttttgtgattttgtgtcttattttaatgggaatgtcactattattttattcccaggtgttcttaaacctcccacttagttgaggagttgtgtgagggaagaaaaggtacagggtatggttaaaatgtgtgctctggagccaggcactctagattagaacccagcttcctggagaatcctcctggctgcttgacccaggataagaacttgattgcctgtagttagtagactagaaaaagaagaacattttgaacccagagcagtaaccagttacggaagtaaatgtgggtaagattcccagagagaaggtaaccatggccagcagctatacccacagagccccttcataaaataaggtgtgagtcaagtgctgttgattcattgttttgagatagctctctaaaacttacagtcatgatttctcacaaaataattaacaattttgttgcaaatgaggacatagattgtgtttaaaaaaaaaaaaaaaagaaggtggctcacgcctgttatctcagcactttgggaggctgaggcaggcagatcacctgaggtaaggagttcgagaccagcctggcaaatgtggcgaaaccctgtctctactaaaaatacaaaaattagttggtgtggtggcgcatgcctgtaatcccagctactcaggaggctgaggcaggagaatcgcttgaacccgggaggcggaggttgcagtgagctgagatcctgcygctgcactccagcctgggtaacgagtgaaactccatccccctgcccccccaatcccccccaaaaaaggaagagccagagggcattactagcatattaatggttttagaatgttcatgatactccctcctgaaagattattaaataaggtacactgtcactgatacaaactgaggggatgttctcctaaaaaaaaattatcttaatacaaagaatgacatggattccttttcctaattttgctctcttttggtttaacaacttttgacctacttatcgatttatttcatgtttgtgttaagaatataacttatgattttaaagtcactctgattaagaataatagtggttttccttactccttccagagaccttgtcaaaaaatggtattttttccaacttcaaatatagatctagtctacaaatactgaagtgataattagggcttatgcaagattgcttcatttgaaaaattagttgctttttttctttttctttttttttttttaaacgagtcacttttcaaatctttctggttcaaggacaaagctaaaagaaggcatcttaaagtcatggcttatataaatgatttaagtaagaaatgtgggaaaaagtgataaatatgattcattgaccccttttgttaatttttgtcttataaacacgtttttccatgtattagtgtagtatgagcatgcagcatatggcagcctcctaatattagaacatatgcaaatatctggccttttactaggccccttgaaaatccaggtacacaaccaaaaattaataaaagcgagaaaaggtaattgccaatatgttaaatttttttcttgtgagaagccacaatwatcagaagagactgtcccagcatcattagctaaagtgaactctcttgtgaattttttgaagtgtgaaggacgccatatttccttttttgttcagttagctattaccatttctgatagcttttccaaaattaggttcctcattccacagaataaaaattttgaacttctgatgcaatgcttttatttcctgtgtaccctaggtcctttgacaagtaacacatcctcacattctctcatgagatcacatccttccctaccctttgcccttgacattcctactgcctagaatgttctccctctttttgtggctaattttctgcctggttagtggaatgttccctctattattgcacttattttcatgttttattgtgatactctggttacctgtcttctccatgaaactgtgagcactttgtaggaccttgtcttactcatctctgtagtcccagcatgtaacacaatgcttgggacataatagctgctcattaaatgatatttgagtcactgagtcagcaggttcaaaacatacacaacactttgcaggcttagaaatgttctatggattttacttgattgacattatcctgccatggtctaagaaagcaaaaatgccttatgttcagtggttcttcctgatggctttatatttgaggccattgtcagtcctgcattgagagacttgataatgtgccaccagctgttctgtaactgccttccttattactgtgcctagtttcctctgacttctctgggatcattttatctcaaggtgtgccttttaatactgcctggtatagtgtgtctcattcagtaagcttttattactctgcaaaagcagaataagccatatggtagttacctagttatacaaagggttataaagtaatgaattggcaaataaactggccttgtaaattcaacagcctgtttggtcaggaaaggatggatatagcaagtacacaagtacagaggggtattgaagatatgctgcgtggcatggaactaaaatcatgttttgcatttaacagatatgtccagtaagatgacattaatctagagtgttcaatatccagaataattagaaagatactacacaataatgtgcaaactttatggtcttgtaatagaatgtctaggaactagtatagacttaacggtcatgcaagtgctgggaagaatattaggcttcatttacagttcaactttttcattttaaaggtgaaatgactttaggtgattcatgtaagaacatagtattagatgatgttagggctgaaaccacaaatcgatgtcttctgacttcaaatccagtactttctttatatcatactgtctttttttttaactatagraargctcagtgaaatacatggcattagaatcatatggactaaaatgtcccttactaaatattgacatcaataaattgctgttctttatcaaccattcctactcttcttttaatcatcatacttaagttttcaaatatggtgttgagttttgggaatgagtttatatgccaggaagatattttggatttgggacctcgatcagctttactcatggtagatttcagtcattgtccgaatgatggctattgtcaactataaataatgagattcagaagatatgattaagtatakagtttgagtacagtctgagggtagccacggaggagacactctaaacaaatggggttagcattccaacattgaaaagttaagttttcactcatagaggaacagaaattccagcagtactacaacatttttcatatgagaccagatcatatgttgtagtgatatgactcaaggaagattagtttattacttcataaggagagatagtgatcttaagggggtcttatctctagtgctgtttggtctttctaattatttagtaggaaaaaaaggcagaagttgcagcggcatgccaagtgaccccggctgcatagccacactcctctcaagggtcagaatgatttaaaattccacaagctttaagtttgaattatttaacttaacaccagaattaagacttgccttgctttcccatgatgactagatgctgaaattcagtgagttagaaaagcctggaaccaagtgttgccagcagtaaaactgattgtgcatctccctacttgtactaagagccatttgatcatcatgctaaagtcatagttgaaatgtgataaacatgtttgaatttctttaggacttaaagatctagttttgaaaactgaaccacagagaggaagaaatattttgttttaaagtttatttttccattttatatctacctcatataaatcagggaaaacaaacatggcatcttaattttcttaatgaaatatgtaggattctactctgcttactgctctagagaaatgaaaacgtggagaacatttaaaagatgaaatgaataaagtaaagctcttctaatgcacgtgctaaacaattttaaatttagggactgttgagtcatcctcatgctgaattcaaatcaaatctgttagatttagcagccattaactgtgttctggaaatgctagggtttaacccaatcccattttgcattttatgtgttaagtattgtgttcctgcactatgaagtgcttcagggatgattaacagcctcaaatagtcttagagtaacatttggaaatagtcttagagtaacattttaaattttagttggcattaccaataggcagcctttctgtagctgtaaaaacccaacacgaactttttctcttcctgtttctctatgactctcttcactgaaaaaygttccttgtttaattctattaattatattatgtctccctgttttccttggggtatatgataatggtgtaatttttaaaaactattatagataagactggtgctttgaatgaacatgttagatgtattttaattcctttgggtagatgtattcattttaattatttctctggatttgccacagtcctaataaaatttcttttttaaaagagatatgacaaatgaaatatagatatttagaatattgcctgaatgttattaagtcacacataaagagaagattggcatttctgggcaaacaaaaaatgttagcagctgggcatagtggtgcatgcctgtaatcccagctgctcaggaggctgaggctggagaatctcttgagcccaggaatttgagacaagcctgggcaacataatgagatctcatctcaaaaagtaaaataaaataaaaataaagtgttagtctaatcaatgctggtattttgctattttagcttggtttgagtcagtggaaatgaaaatacttgtcttagactgcttttattttttatttttttaaaacaattcttccacattacaaaaacaattgggatggtatatgaagtaacagttctacttttttcagatcattatgggtcagatgttgtataatataaagatttaatatataagctattaattttgctgctagtcaattttaacaaattgagttatttcagataaagcttttcctctagagttcagagtgttttatccatttttcacatcctgcgttttacaatgagacattgtagagaggaaggactgtttttgttttgtaatgagatacattaggttgaaggtgctatcaccaactttgaggctggacagcaaacagagaaaggaagactctttttatttatttatttatttttattattatactttaagttttagggtacatgtgcacaatgtgcaggttagttacatatgtatacatgtgacatgctggtgcactgcacccactaactcgtcatctagcattaggtatatctcccaatgctatccctcccccctccccgcaccccacaacagtccccagagtgtgatgttccccttcctgtgtccatgtgttctcattgttcaattcccacctatgagtgagaatatgcrgtgtttggttttttgttcttgcgatagtttattgagaatgatgatttccaatttcatccatgtccctacaaaggacatgaactcatccttttttatggctgcatagtattccatggtgtatatgtgctacattttcttaatccagtctatcattattggacatttgggttggttctaagtctttgctattgtgaatagagccgcaataaacatacatgtgcacgtgtctatagcagcatggtgtttggaatatttctgtcatgtttaatagtctttgtgctggtggttagctaaacctttctatttgcatttcaaaaaactattaggccaggtattttatgatatgaactttgatccctgctgaagttcattcagttgacactgacccattttatttccctaaccagtagagatcattttctgtcttcattgaattagctattctttctggccttggatcagtttccaatttgataaatgtgctgtttagtttttacctgttttttttttcccaaagatgatttaaaatagcttataagacataaatatacatgatagcatcaattaggaacagagctataagaatgaaaaggaatggtagaactgtacagtgaccctaggattggactaaaaattgatactataatgacaaacatgagtgaggcctgggatgccaaataaaaatcaaagtatttatatagttaatagtacatataaaagaaagctaatgatcagatgaaatacaactattcttgctactacaaccagacagttttatgtcaggcactatgttttaatggtaagaaataactcacttgattgcaagaaagaaaaactgactctttatgactgtggcataaaggtaattggtttgttctaggggcataccattcttggggcatttaaaagagtggttcaactccctgaatatggtttttgtcacctcttttagtaaatacttggaggcatgagcgtcagactgtcttctctgttagagaaagggatgcacccaaacccttgccccttaactataatgctgacttccttatcttcatttaaagccttgtaaatatgttgactgaacagcgtaggacaaagacatcaaaccattagagcaggggtctaggctggagctaggggatgggagtggacagatgtctgtggaataattccatggaatctttcaaaggattttatacctaaagaaacctttgtgtatgtgaattgacccatgagattcttaaagtagtacatttgccctcaaaagataaaaaccacagcactgaagacttccccctaaggctttatcaagccaccatatacttatggttcttcaagtatttgtctacctatctgtacaccagagcatacaccttttctgttttcttccttgccaaatctagtaggtgcttagtttgtatttgttgattttaagtgaatgagctcaagtcacattttcctgctatgtctataagactcttatgtgaagggcttggtcagaggctctgtgaaactacacactgtgcttttttcctggcccacttatgttctagcctgatcacaaattaatgaagatcatatgacatgatttaattgggtggaagacttagactgctgtccaattcttttctctctttatggccatctagaccatgtatataataatccattttagaatactgttgtagattgagccccccttttggaaaggagtatatttgcctctcagttgacacttctaccatttttcgcttgactgtaattctgtgatcgtatcttcaggctctttaagggtcctgggatatagatgttgtgggtctacagcctagtattagtacagagaatctgggtagctcttcttggaattgaatttcttcataatcatactagttctactttctttctccctggtgaagtcaggaaaaaaaataaaattgaactgctctgttttttcctgtcttctgcccaagcagtagtgattatcattttcaagttctccagcagtggcagcaaaaacaaaatcaccccaggagccaccctttccttatcttgagcattttgaggagtcctcatctcattctgattttgtatcttttgatagacctcttaaggtctcttgacttccatttgtcctaggtcatacgtgtctcttttgtgggagccctgataaaatacgaagaaacacaaagctatccatgttgttacattcatttctttatatgcaattctcttcctcatcaatataaccctttttcatattgtcagaatggaagttttgcaatcctcatctttcataagcccatttgtgattttgagtttctgacctcttgatcctgcttctcttttctctgaacttactgaatttttttcttcaaagaccaggatatatttctgtgtacgtttaagattcacttcctggtctatttccaattccaattttacgttgtcatttttttcctcaaaatttctgtcatttctactttaccaagcaatttattcttattcgttagaggtcctgaatcttggtttctctcagtgtttttattctgcaagatagaaatgaccagaaggcaatacagagttatcagcagactgtgatgaatagaagatgttcaaataattggcatctcttatttgagccaatttttgtcacttctgttacaaatataacatctatatctttgggcattatatgaccataagtgtgatattctttctccttttaaactcactttaaatattcctcaccacacttcatgcctaggtctgtggcatcccaggtgttatgcatattttcttggcagaacatgcttttttgttaggtttattttcattggacattgtggaatgtctgttggcatgagctcccatctactcggtttcaatgactatgcaaccatatgtaccaccattttaaaggttgcaaattcattggtagcccctcaacttttcagtctttgtgcatttccttatagacatctaagaccatatgtatctgtctctggcccttttagctttcataccatttttttctgtgtttttgtactggtcctatcattccttagcatgaagcctaagaatatattcactttcttgctcctttggattttttctcttcatttgaatctttgagaaagatgccttacatgctgacctcctctttctctacattgcctcttgtttaaaaaattatttcttttttgatacatgatagacctgtatgttttcagggtacctgtgataatttgacatattcgtataacataaaggtaaaatcagggtaattgggatattcattaccatatttatctattctttatgctaagcacattcaaattattctcttctagsaactttgagaggtacaatagatttttaactatagttatcctatttatctattgaacgtgaggtcttactcacatttcctcttcattttactcattttacttcattttaacatccagagcacctctgcatttaacttgtaacttctcttattgcttattgtctcccccttttatttttctagacttccacagctgctttttttttttttccctctcttttggagttaatgtttctcatgattctagacattattgcttgttgtctgttttttttcytttctttttggcaaaagaagtttcctcctaaacttttttgaaacttaaaatgagtcaggaagaaagcctggaatgtgagtctccctcttcctccccctcaacagcccttactttgtatcgtacacagagttttgcaggtgtgtataatttttcgctaacaccatttagggttgggtccatttttgtgtctataacagattgaggttgtcactaaaataaaataaaaaatgaggacgttattgccttgcagctcctcttttctcttacctgagatataatgtttgccaagcaatcacaaacacattgtcaccaagggatgaattcttatccttctctaagctttaaaataagttttcagttataaagtaggaagagtgcagtgcagagaaagcaatcttttaaaacaaagttcagatcaataacaacatttcctagtgtctatttttctgttaatgactaaagacaagtaccaattagagaagcctcaaacgtctggatttctggttgtagcaagtggtggggcatgagaactattcatagtgccatggagaagtccgggttgttcttagctacctctcttccatcttgatcttgcctgaggatacttacatctgcccattgctttgccctgaggcttttcctttgtcctttattctttattacccatttctaacttcaggaggaaaactctgccatctttagtaagggatcttttatttttatgtttgtcctaaccagctcattttagtcatcattttctcatcaggttttccattaacgcttatgtttaaatcgcctgatctcactagactttttaatcctcccattgytccttccttattgttctcaagatcacacgaaactggcactgaagtcagtcccttcaatagctagcattaagatagttctgcctcttcatttttttttttaaactcttttcatagattgtctgaaaacatgttttcttcttttggtttgtacttcaaatattttctttcttagctattaactctgctaaccaactctgagaaagctttgatttttgtatagacgttttcaatactgttgagtgttgttattttgacaaatgctgcacatgcattttctacagtctgaaagccatttatattaggatgacaaaacatggaattgtttatgtttagctagattcttgcttatcggagttgttttaccaggacatattcattctgttagttctgagagttatgatataattgtccttggtaatgaagctttgtcttgatttggtgttttctgttgaaacattctttgatggaaccaaaagaaaatagtggcgggtttccatcagcattttcagtttaagtgagcaatacttttttttcttccttttttattatgttctttgcccctgctagagggtaaggcaggaagaccaaaggaagctgctgtcacaatcatagcaagagatttgagggcctgaccttttggagcaatattaggcatgaaaaataattcacattattattttcaaatgtgcaggcaagaagggtttgcttagtttagttcataatgtgactgcttttagggtttagaaacttcagtttttcttagactctctattttctttttaacatgccctctttggtacatgtcaaactaattgtgagatttatcacatgctccacttatgattttctagttttagaaacttagtgtttatcacatcttctgaaaaaataacattgtgggtttcagttttgattataaaagtaaaaggaaaacaaaaaccacttgtactattacccagagataacaattcttagcatttccgtgtgtttccttttattttctgtaggtatataaataattgtctatcccaaagtgcatttctataaatttttatttacttatacaaaatcttgcattttatgaaacatgaaattatgagawcattaaatattatgagtgcataatattgattaatcacatggctacaccatgtttatttgaccatttccctattgctgacattaaagttgttttcaattcattattataataaattttgtgattagtgttttcatgaataataaatcttcatgtctatcctcaggatactggattaatgtataaacacatttttaaagtcaagaacttctttgaaggctaaaactgaatatggaaagatgtgaatgagccctaatggctgaaagttccaaccagttgaagaggtagcagtagtgcttagctgctctgcattccccacctccacctcgaatagaaaatactggagcatacagagttttcaaggggaggacatagagtgcagtggcaaggggtcttcggccccactttccctgtctcctcactcatccccagatgcctctctacccagtagttcaacttggatgccgacatattttctgacctttccttggaatttttgtttgatttttctgtttatcaaagaagatagcttttatccaccatgtccttgcctttttcagctatttgtgagcattgcacaataagtaaaatgtcttctgtaagccctggtattcttgcactgtaggaggagcctagtgaaggcatatagtagtagaacagcataagaagggctacttaacctcacagatttccagatttcagtgattagtttaggaaacaaaaatcaatactactatccttgtataagtcagttcatggaagcaaacgtttgttttggacactgtatctgttaagctgagtactcacaacttaaaggtgtgtatgtttgtgtgcgtgcgtgtcaccagaaagctaattctttcaccacaacaatgttgagtttagtttttcttgatccttgttcttttgaactgttttatgttgatagaaaaattgtcttttaaattaattctaaaataacagactaatgtggaggcatttcatattgctatatgaccttattcttggtgaatgactttgattctaattaaattgagtatttctagttattaattaatatttcagttttgaagtttccatattggaattaattatctgtctttaagtaaattatttcagcaattgcagttgtatcacgatcctaggaagctaacaagaataatttacaactgttacaaatagcatttgtatctatatttaaaaagctcttcaattgaccaagcagatgttattacagatttttgtctttgatatgataaatttcccattaatttagaaaatctgtgtttaaggaatgtgctatcattgcatagttgarctgcaatttgtgaaagttcaagctgctgtactgacaaaccatttgacaaatttgtaactgagactcttttaagcaaagactaacttctggagcctaatggtctgtattttctgttcagacgcatacactttaatttcttctcttttgtgggtccaggaggtgtgatagacattacctatatgtatacatatacatacatagatatatgtccatattccgtcatatgtttgcagcctaagttgtatgtgaagttgtgtatactttttaaaaaattaaaaatgttcactttaagctttcactaactttgaaagaaatttctctttgtctaggttgaagaaattgtggatattggagcatttgctccagaagacatccatattcctcagatttatgtacatcgccttataaagggagaaaaatatgagaaaagaattgaggtaattgacttagctgctttgtcagtattcatggatccagttacagagatagtgcatccctggggccattcgagatgatggggaactagagctgagcagaaagtctggtcttggatcttagtaagagcttctcatgtgtctatcatcatggggatatgatggtctatgcctctgtgcaggctgacagtgccttgtcatcacaagatatgtatcaccatgccatgagattctctaggctgtgtctactaggcttctactgtcctaatttatgatctgtagtttttctggctgtcttagaggggagataagaataatcatgtctttggtggttttatccctgctgtagtcttatcttaatgtttgattgttcagaattgtctgtcttgaaggtgctttgcacttttctagagtgtagaatgtcattctaattagcttcaggctgtgggtagctggtgagtatgagattgtggcaaggagtgtaggtaccaggagcattgaaggtattctaaggccagtgtgttagtcccttttgcattgctgtaaaagaatacctgagactgggtaatttataaagaagtttgtttggctcacacttctgtgggctatacgtgaagcatggcaccagcatctgcttctggtcaggacctcaggaagcttttactcagagcagaaggaaaaggggaagcaggcatgtcacaaggcgagagagagagaaggtgccaggctcctttagacaaccagctcgtgtgtaaacgaacagagggagaactcctgcatttccaagggatggcactaagccaattcataagggatctgcatccatgatccaacacttcccactaggccgcatctccaacattggaaagtacatttcaacctgagatttggaggggacacatatctaaatcatcagccagtgagagtagacaatggccaccctaccagaattactgtcatgatttagaagtgtctagggatcagcaacagaatagacatacagtagggtgctagagatacccactaccttgtagatatcaaacaggaagacattttataatacaaaaccagtgtcaggggcccaggaagaaaggatgagacttttgcaaacacgagccagagtttgtgtcaaagagacttaatagaggaaatagtttcctggctggtttctgggtatttctatgattcctgtggtgcatttgtggtaaaaatagtctggactttgcaggtggaaacaggcaattggcagcagcaacacctggtaaacacattctgacagccctgaaaaacacattcccaaagtctgttcctctttcattcttctggccaatccctgagcaccagaggagaatttagttggaagaataacagaagkagcagacagtgtgatagtaacagattatttgcttcaaacagactgaacagcgtatcttcctctttaaacaaatctgaccactttcatttagttcctaaagaattatttctaccatcaaatatcacccatagtattttttaaatatctggtatattgcagatttgtctcataacaatgggagagagctcatctttttttccagtaaaatttatttcagcagtgataaaatacaaagcatacctcaaccacgaataatttatttctgtttaatttaaagcgtttatsaatccggaaagagggagatggggaagccaaatctgctaaacctggagatgacgtaagggaacgaatcatcaagagggccgctcttgagtttgaggatggcatgtatggtatcctttatccttctgagcccgggcaaagacatagcctttgcttttcccatattgatcaggctattagacctcttgcatagtgagtcatctstagtctatggtaacttttaaggtaattaatcaattttttttttttttttacaaaatgtggcatataatccaaaggtgtcaagatacatgacagatatctctttgccttcttgaaacaaaatggcaatcaataatttgcttagctattttctaatacccattagatttcagtacaacttgcatttaatgggagattattgggaaaagagattacccaagatgagtgttttcaaatctcagaattcctagtgataaccagtgctatttactttctgtctatcctgacatttgcatactcattgaaagatccaacttcttaacaacccttttattctcttgacaaagatcctgtgattaccctgttatatctaatattttatgagggtattcaacaaatgattcaaattctgctttagatactttgtcaaaaaaagaggtagagtagacataattaatgcaattaatatttggattttgaatgcatttaaataacaaatctgttcaccattttgctagttttcactacagtagacattgaattatataatacaaataacacatacaaatacagatcgcatatgataaaatgaatgtttgttgaatggtggatacagtgaagccatacttaaaagacctaggacagaaagaatgagagacatgacaaatgtctccattctgtgagcttccctggtccatgaatgtcagtcttccagactgtgatcttgactgggagaacttttcttttttccctttctttttacctctacctcatttttgttcatttttcagtttataccttgtgttatggtgcaaactcacataggggaaaagaatagcatgttgctgctcttccagttcttgtatcagcaaggtgtggtgtcaaccaagttgagttagtaggtaaaagttggtcactggacttctcaacccgtcttatcctgacttaccattgatatttaaacactgactataatactgattttaggtgttctttattcagttattgtattgcctgtgaaaaatatttgcaagtcagtttatgcaagtggtctttccatatctcctactttttttcaacccaaaatacatagacttttttcctccctggtgtttgactttaaaatattaaagaactgagagaatgctataatatgatgaaagagttgaggtaccagacttgtaatttgggttgctctgtcctaaaaacacctgctcataatggaattagtatcctaatgtgttctgtgcattattgagaaataaattacaaataacactatactagactgtgatagaacactagaggtaaacccagtagctataatcatagcttcatagatttactctatccacaagaagtgacctgggtcattgagttgtactgctggcttttgtagtttataatatggcaccatatataaacctcctctggccttgatttgtgaagatttcactgttagaatctcatcagagtgccatcattctttgtactagttctggtgaggtatttgttgtgcagtggtagtggacagtagtgggcagtagttccaggcagtgtgagtatctttgatctgatcagcctgcctatgttgataggcaggattgaacccacaccattgagtagtaatcatcatcactcctgttttgatcatttaaggaagacaattcaacaacctcatttaactctttgatgccttaacaacagctcctttatcgatgagctcaattgtatttgctgaaatttaatttcctccccacttttctttttatgtcacatagaaaattcagttaccaatgaatgttactatagagacccaaaggatctgatatacttttaggcagaaattttggtattgtcagaaaacttttttaaaatttaaaaayggtaactccatttatcaataaagacgatgaaaaacgatctttacttttggcaggagttttgaatagtgaaaatcattctttaaaagtcaagctgtgtttaataaatcagttataatacataaacccaaatttgcagagcacattaatgaaaatgtgcttacatttttgttaaaatgtgacaaatggctagcttctgaggccactactttgatattaatgttactgaaaaagctgactaattagagactttttttttgaaaaattacaaaataatgcrccatgggtgattggagaatatattcatttattacattcagagtaagccacctttaaataaagcttctgttcagatctgtatatgtagaagatttatggtataacttctctaccttttatatgctggaccttaacatcttttttttccagctaatttgggcataggaatccctctcctggccagcaattttatcagcccaaatataactgttcatcttcaaagtgaaaatggagttctgggtttggtaagatgaaaatttgttttctaaaatccagtcttaatgaagaatgagatayttcatgttgtgaaattttttattaaatttttttatttcaatagcttttagggtgcaagtgatttttggttacatggataaattgtataatgctgaaacctgagattttagtggatccgtcccacatagtgaaatctgagttgttgcataaagtgcccaascttatttttctttttatcatgataaaatatttaatttttcccttaaaatgtaagcaatgtagtattgtattttatgtagtagatggtacgttcctgactctggctttctgactgcgtctcccatgtggaacctgattcagagagacctcatgatttcctgtgtaaactatttctcatccttctgttgytggacaagataatgaaggttgtcaatagttctatgttaaataaaattaagtaagcctcagagtgagaaactgaagagtaaggtttctactttaggacagggacattgtttgagttgattgcctcaaaaagctgtagaagttctcatctcattctccttttgaagctctactgtccaaaaggttaaatttttttcttccttaagattaagcatccagatgagctcagttttcttagttaggccatattttttcattagtataataaaatcatatttttttacttcctgtagacatnnnnnnnnnnnnnnnnnnnnnnnnnnnnnnnnnnnnnnnnnnnnnnnnnnnnnnnnnnnnaatgtattcacaattcaaaataaataatgatcctgagcgtatagttgatactgattgaggcaataatcatgacattttcaaagacacaaaaatgatatatatttggataaaagcagattcatgtggaagttaaagacttgcatttttaaggtgccttagagattatctagagtgatcaaattcctggttttgaagaaaagggaaataaatttgtggattatccatggccagtgtttaaaggaaaatttacatagctctgaacattagttgccacttcagtttaaaggataaatttttggtccctctctagaaagtatgtaaaaatttcacagccaatatttcttcatttttggctccatcttatatagtatgccttttatttttttatagtttcctctcttttcatcgaatatatgtgatattcttaaactacttggcctatttaaatagagttacattataaaaatatatggaaaaatttaaaaactttactgagagtagctgtgcaaaaggaacataaggacataagtatatcaaaacttagatgtagtgaggagtaagattagaaacccaaattcaggcctacattttacaaatcagaaagctaaaactttgcctctccaggtccttctagccaaataatgtgatgtagtttgtattcattaatcctcacagaaaagtttttgaataacattggctgcatagtaggtactaaatttttcctctttgatttttatatttttaagagaatggggtgtcactatgttgrccagcctggttttgaactggcctcaagtgatcctcctgcttcagcctcccaaaatgctgagattacaggcatgagccactgccctggcctacattagttttaccgacctatatttctaatacattttcatagtagggactaaataattactttttgttttatggacttgtatttctaatagtatagcatttctttcaaactggtaatttttagaaaatatttttcatttgcccaatcacaactttagtatagaaaagactaacataagaaacagagccatggacacaaccgaattatttttcaaaagtttacctcaagtcttcggatgataaatttatagggtttttagggaagttatttatattatagttctaatatgtgattcagtgagaatcttcatttactaattgaatgtatgttgtatttgacagggtccatatccacgacaacatgaagctgaygcagatctcatcaatgcaggtaagctcacttatttctagcccttccctttgctattaattttgtgctacataataagagtttggactcaattctttgtcttttcctggagagcactccatggtattcattgttgaggaggagagataagcttttttgaggtctcccctcattcaggaatgaccaagataaaggaggaaatgcagatgaaggcacatttaatggaagagactttgatggatcaatnnnnnnnnnnnnnnnnnnnncccttataggaactgtggcctttggtagagaactcagtcaaatcacagcaacctggttgggtggagagtgtcctctgctgggttgcctgcctgtgcttcccactggcgaatctcaagtcaaagtaggtcagccttctcaggatagagaagggtgggagtgaatccatagcagcaaaaagaaaagatctggtacactggggtttttgttggtggtgatgcttcctattttctagttctcattggagcaggagaggtgcttaaggaggtactctgctggtaagtatgatctagtaatgtaataaatatagttttgttgaactggggactagagccttgtcttctcctttgttcttacaggcatatgctttaccttttattactagccttttctttgactgagatgtagcctcatatattaacagcctagaggaggaagaacaggtcaggtcttttggccatcttcactgcctatgcttgaggcaacactgccaccactttggagccatatgtcatccctggagtgcagctgcccataagaagctaatttttaggttctagcatgattttctgtatccttttattcattctgcccccgcaaaactattattctttattattcttactttgcattcaaaaatagtatgtgtaaatttcagaagacaggtaatatgagctgaacataaaggccagctgccaagtaaaattgatgtttgatacttagaatttttggagtgaaacagcttctggttgaatagttgaattagataacacgactcaactctgaaaggcctactgtgataaagcaatgacatttaaccaaggctgtaatttaattgtactgtaccctttagcaatagctcattgatctgtgaaaatatttgctgcttggtttaattaatttatgatgttagtgagttatttgcaaaatgaataactgcatgttccaaatttcaggcttcagtttataaaacccactttctttggaaaagttgttaactttttcaatgtggttggacagtaggtgtttctgattccatagagcttagaagtagctcagtccaaatgaagccaccaattttatatttccaccaattttatatttcaacttcaacacttgaagtgccacatttacaaactactttacaaagcaagaattcattgcttatgggaagccaagctccaagtcagtttaataatattataagtttttcaaagtcctttttgggatttttgatactttgacacttttgattttaaattaggaaatactttaagctggagagcctagaatataaattggtggtttcctcaattcccaaagttatctgcaagatcaacccattatttgtgttagtttgaaagcattttatggaaatctctttgaatacaaagagttatgtttctggatataattggtatgataaaaattcaaaataataatataactatttccaaggatctcttttaaaaaagtctcataaggttatgtaaaaatgaactaccagttgtatagttttacatggcttagagcatactttttcacatgtattataccattggaacctcaaatgaaaccttgttatacaaattgggaaactgaggtccagaaaattgaagtgatgggttcaagataacattgctagggactgagttyatacccagtctcctgcttgtgacccctggcctttttctctatacactgagttatatctgctgatgacctgacttgcacagaggtgcagacagcagtgctaggaatgttccagaggtcccatcaagatctgggctctaacctagagtaacccaatgcagttgtgaaatttctaagtctcatatttttgcttctgtattrtgcattttgcattcttcatttcttaatgttttcttattttaatatacagtattttaaatgacttaacttttgattaaagttgctttagaaagaataaccatgtttaatatccctggccccctgccatgtcctctctgcactagtcgttttcaatggggtggggtctgattttgcccccagagacatttggcaatgtctgaggacatttttgattgtcacacctgggggagtaacatctagtaggtagaggccagggatgctgataaacatcccacagcaaccaggacagtttccctatccgctggagttaaccagccccaatgctcaatagtgctaagcaggagaaactctgctctagaggtatatgtatcacatctgaagaatcacagggctgcagtctaaagtacagataacatggcattccagatctctgtagtgtttgcaaccaaccattatggctttctgtcttgctgtacccttcaaggatacttttgtgtacccattctggactgctgggtgttttctgattatggctcatactcttctttgcatgtctttgctcttggtgtgtctttcatgagattttattctgctccattccatttttatccccatctccttactgataactttctatcaacattcattatgcctatccttcaagttccagcccatttttcttctccaaatcctactgtagctcagaaatgcccttcccctaaacccacaacatatctagtgtctctctgagaagcatatcacattttgccttgtaattatttgttcatctgtcttgctgtatagtaagttccttttgcttagggcagtgtggtctaagtgtggtccccagacccacagcgtcagcatcactggaaatgttttagaaatgaaattctcagacctcaccacacttactgaattagaaactatgcatttcataaatcttccatgtgattctgatgaatgttaaagtttgcaaaccactagttcagatcacccaaatttggtttataacgctgtttaaggcatatagtaggcatttactattgtgtggatgacctgttaaatcgtgagccaaaggactcagtgaccatgaaattgataactctattgcccaaatatgaaaaattgagatatacataaagaaaaattggaggagacaaatcaatcaggaatagccaaataagaaagccctctttgtgttgattgcctttagttacgacttttcttgaccaaacttggacattctatgtgaaaatcatggattcaattttaggatacttatttttgtttagatattggatgtttaaaaatgctgaaaattaaccttgcttcaaaagaatgtaatttttaagatgcagtaatgtattagcagaggccttgataatgatttttcaagagagttgttttctaggctctttaataaaactatgcttcacaaataatatagggagatccaaagctcttcccattgatctcagtttcctataacatggtaaatatgccttctatgtattatcagccagtgcaggttgtcttttggaagtcagtgttatttagcctctaaaaaacaaagaactggaatttttaatgtttttcttcctttttgtcctacaaattcctcctccttgacttcccacaggactgatgaggatctgaatttgcaggttatagacattgtgtctagaataaggtttagttgtgttatgcctgtcttaaaacctagagctcacacaggctggccatacaaccccaccatataagccaattgcttggtcctgtggcatttgtccctagaggggcaatggcattrtctcttttataagtagctttggagagaggaataacaaaaatggcaataataaaaggtgacgtttataaagccctttctctgtgccaggcaagttagagtaaggactttgtatgcattatctaatttaatccactacgtcttacatgctgtttaaaagcccctgctaaccataccaggaagtattttcaaaacttttcaattttgtgtactttaaaagrtacaaaaatatttctatcatttggaataaaactccctcgagagatatatatttatatcaagatgaagtatttatatatttataaataagcttactctttctccatactcaagttttaatggagggggatattgatggaaaagttagctttcgggaaagacttgagaatctgaggatataactgtgttgcacagctagggatattcagactgcctgtggtccttttgtttctgggagctatttcctattccaattttggaataacagttttgcttctctttctttttgtctgccctattatactgaggccatgcatggggtgttctcaaaacaggtgacttatctttggcacagtrgtatgtgagcaccttcctggttgagaccagaagctattcccaggcccctgaagctcctgaatagagaggaaatagatcacaagatgggagcagcttagatatgagtcaggtgattttattagttctatggggagtagatgaccttgaaaatcttttccagctctgaacctcattatgagatgtaagtcttgggagatgtccttccaaggggacctcttggaagttaaccttagatacattggccagtattaccatgttattccctgattttatgaaaatcctgtggttttaatagaagnnnnnnnnnnnnnnnnnnnnnnnnnnnnnnnnnnnnnnnnnnnnnnnnnnnnnnnnnnnnnnnnnnnnnnnnnnnnnnnnnnnnnnnnnnnnnnnnnnnnnnnnnnnnnnnnnnnnnnnnnnnnnnnnnnnnnnnnnnnnnnnnnnnnnnnnnnnnnnnnnnnnnnnnnnnnnnnnnnnnnnnnnnnnnnntttttttctatatgtgttttctaattttatttttatttctccccagcttcactgagtatatacttaaccaataaaaattgtttatatttaagacgtgtaatgtgatgatttgatatacatatacattgtgaaatgattaccacaatcattaattatcacatccatcacctcagagttacctttttttgtagtgagaactcttaagatctacttttctagcaaatttcaattatacagtatagtattaactatagttaatactatatgctgtacattagcatctcagaagttattcttatcagtgaagttatttgttgattaaaaaaagaaactgcggtgcatctcctgtgtcattcccttcaaaattgcattccttcttatgttcatgttgattccacagtctctctgtctcagtgacttacagtagcattagattctgacaggtgttaccccagaacttccttcctcctcattcctaagtagtatttagcagaggattgtgaagggaatggggatggcgagaggctggagaggtatggacaatagaggggtgcatttcctgtagaacaggggtccctaacccctgggctgyggaccagtaccggtccatggcctgttaggaaccaggctgcacagcaggaggtgagcagcaggcgagcaaacgagcattaccatctaagcttggccttctctcaaatcatcagcagcattagattctgatagaagcccgactgaacccattgtaaactgtgcatatgagggatctaggttgcccgttccttatgataacctaatgcttgataagctgatgtggaacaacagttttatcctgaaaccatccccatcccccagtctgtggaaaaattgtcttccataaaaccggtctgaggtaccaaaaaggggactgctgctgtagagaatttccaaacaataagaaaactaaaagtggtctgcttttcattatcatcatgcaaaggcaagagcaatgtcagtgacaaaatgctttccaccacaaaaggttcctactgtgtccccccacctgctatgtcactgcattttggtaaagggagcttaagttcttttgggaatggagaagatgtggacctctgttcaccatgatactcttagaaatctaatagccttttctttcttttgtgtgtgtgtgtgtttaggcaaggaaacagttactattcttccaggagcctcttttttctccagcgatgaatcatttgcaatgattagagggtatgtaataacagagcccctcatgtttcagacagtatggaatgagctgagtcatcgtctgagtgtgttagcaaggctctgaaacacagccacatttcccagccagaaaactatcaggagtttgttcggctgcagggtgtgaaattattcacatcgaatgttgggcattgaatatccagcccactgttaggaaaagaacccccaaaatggaatccatgcctttgtgccaaccatactgaaataaacatttctaaggtgctttctgaggattctaacattttcttcaaactgtgttcactttctagctagtgtttgtgttcaagtagtcacattctgcctcactgaaggaaacagtcttcctgtgtacacctgttcatagtttgttattgaaacaatgtatactgtaacttttttttcaaaaagaatttttagtgattatttctctgtcagcatggagctgatctattaggaaatcagttgtgtggtgggggaagcaagtatattttggtggtatgaagttattctaattgctggcaagttcaagcaaaggggacaaaagcttatgaggttcactttattcttcctctttctttctcagtggacacgtcgatctgacaatgctaggagcgatgcaggtttccaaatatggtgacctggctaactggatgatacctgtaagtagacattttttattctgaattatgtttggatcagaataattatattttaaatactaagaaaaagggccatgagatcacgattctttaaaaatgaaatattttaatatatatttcttactagaatcaaattttaattaagtaagcactgagaagtattcagctttgccaatttactgtgcatttgggactaaaagtaggcaaggtcagagccgaaacctcttgcttagaagaaaccaagttagagaagacttaaaaaacagaaaaagrgctaattatactctgaaaataagaaatacaaatatttaccataactaaaattttaaactaggaagaacaattaacaagtttgttagcgttgttaattaactttgctaattgttaattctattaatcagtgattgaaatcatcttgattggtcatgtgaccccataaataatcattgtcctctgctatggaattcaaaacctgtgagagtttaatatccttgtgaaatgcacagttgtcatttaatatgaaatgcacagttgtcatttaatagtgacctaaatcaaggaagaaacctcttagaattagctttggaaagaggactgttatcactgacttaattcatgagtgtagttcattatagaccaggatgttgcttcccaagtacgtgcatggaaacaataatgggtatgtttatgattatgagctcattttggctggtagcccggttgctctttgtgtgtgtgtttaaggatttccatatgtttctctatagaacaagctaagaagaatcttgtcaaataactgaggctggtggtctatgataggacagttttcttgaaatctcttaaatttgttttctaataattttttgaggaaggtggattaatgtagttgataacaatgttagagatcatgttagtctagctcatttgatctagagatcatgttagtctagctcatttgatctaatgccacctgaaatgttatgtttaagttttaataattattcaagccctagttttcaaacttggtggtgtattagaatacctcagagttttaagaaattttgatgcctgggttccagcccaggtagtctctaatttaattaatctgggatgtagcctggacactgggtcattcaaagcaactcaggtggttctgatatgtgaccaggtttgagaaccagcatattaaagattgattacaactcacttcattttaaaatgtaagagaaaaacatcattgagccatcataataagaacccttagcaaattgtggattatattgttagtttagttgtaaaaatactgatctttcagaatcagccatagttacaagggttagcagcttttgattgcttcaaaaaaatcagggagggtctcctgagcatcgtacagtgagtcagatagaaagtttgtggaaatacttgtgtaggatattacaatgtatttctgttttcaaattttagaaaagggccatacggggtagtagagtgactataggaaagcaagccctgggttttagcactgactctaccagtaatcaaggtgtgatgttgaacatttcacttatgctctttgggttaaaatgccctcatctataaagtgagggtttgagaacagataattttaggggtctcatttggttctcttagcttagtaggtaagagcaaggccctgtagtgagatagttgtggattaaagtcttatttctgacgcttgctggcagtgtaacttgagctaatttcctatttttcctcatctgtaaaaatgggaatcatataacagtacctactttataggactatatgaaggaatacatgtgacaatgcatacaaagtacatagcacagagcttgacacttagtacctggtaaataggttattgttcttataagaagttgcgggccggacgcagtggctcacgcctgtaatcccagcactttgggaggccgaggcgggtggatcacgaggtcaggagattgagaccatcctggctaacatggtgaaacctcgtctctgctaaaaaatacaaaaaattagccgggcrtggtggcatgcgcttgagtcccagctactcgagaggctgaggcaggagaatggcgtgcacccgggaggcggagcttgcagtgagcagagatcgcgccactgcactccagcctgtgggcgaaagagcgagactccgtctcataaaaaaawaaataaataaataaaataaaaaagaagttgcggatacctggcaaagaagagaaaagcattgggtcctatgaacaaaagcaatagggttttaaatacatctatttctctagactaatgatttttgaaatcartttgctcagtggtcctgggtatgaagcagaaatgtgttaaatatcttcttcccttcggggaacatgggcatcttcatatcartataagatttgtttatattatgatttagcatgtagtaaggctggaagctctcatagtggtagtgtacactatgtagttatttgtaggaaagcttttccaatgcgtaccatatttttacatatcctgttaagattcctgtgaatgattaaaatacaaatgtttattactttatacttttctcaatataacttggagcccacgagttcccaaaggaatggacctagtgggatgaacaactctggagttctgtaggaacatcatggaagtctagttgagaaaaattaagcataagaagtgttcctgggtttggttccactgttttggtaatggaagttggtagtgttacttctgattagcattttttttgttgctttcataactgataatcatttcctaacttctttgtatgtgatgcaccatgtatattttcattgtttgagactcagggcagcttcagaatcaagtccatgaggtttagtttggttttaatttcagccctaccccttacaaattatgtgatctgaagcacatgttttggctaggattaagtgagaagaaaatgaaaagtgaacactgcaagcactctctaaatagtggctattaagtaatgctctattacttaaaattaaagaggaaatatttaccttaaaatacactggtaaaagcgagatgattttacaggagccagtacaacctgcttatcctaagtccctattcaagcaccaaaattaagccctttgaggacacattttttttcttttattggttatggataaagatacagcttaccttccttatgtaatttcagtaagcaatctatttttatttgtcccaaagatttgttgacttatgtaatttaaatatgtttttattgcaagatctggcagtcaagaagctgaaaaattcagctttattatattatttttcatttacttttatctttttcctgagtttaataatctttcaatggctgtgtaagccatgagttctcagcatcatgacattatcatcaatcattatagcatcagattacaataaacattaagccttcagggcaagcaaacggtgtggatgctatttgtcttaccgtttaatagcttcttagtatgcagtgttggtctcatgtacacagatttttaacaattctaccctgagcatccaaaggaggaaaacttgacaaaacagtagttggctccttcaagctcgctgctgattgtgatgatggtaaaaccccaggcaagcgaataaatgatggaaagatgtgcagtccgctgaatctatattcagagctgctctagtgctttctgaatgcctatttttggagaacagctggcattgattattgacttatgaagggaagcagatgtgtatggtcagctatgagagctggttattgaaagcacaaaatagcagcccactggacagggctgcagtacgtgagtggcacaagagccaagagccctcctctatgtggagaggattgaatgaggcattcttatggcaagaaagaatgggacacttttggtgtttttttatttttttccttttctccctcacatttttcacatctttgtgcatttgaaaagaataaatactaattaatgtcatactcctgtgtgctacatgtctgagcacataaaattgattgggttctctagacatgctacctgttttaaataagttaagtcactagtattcctggttataaaactacaagggggtttgtgttgaagattcagtctgtttagttgcatcaattgtaatccaaatgttagtccaaaatatagatatttaaatatattatgacataggtgaggaaataagcataaatctctagacattgttttaactttagtgtattgtccatttggtcctgaggctcaggaaaagaaaaacaggtggaaaatccatatgaggtcatatgaaacttttacaattagtaatgcctttgtcttattagtgtaatgtagtggaaagctcataaaactttggaattagacagacttgagcttaaatactggttctttacttattgatcatgtagtatatcactgttgtagtatattcattggtaaaatgacaatttttaactcatgcttgttctgaggattaaattcgctaattcattcaacatgtattgatctggcatatattaagggtcaggcactgttaaatataaacgacaacgtttttggggatgcagtagttaacaaaacagacaaaattctctgcatttatggagctgatattctaacaggggtcagcaaactgtgttgcatgtaccaaatctggcccactgcctatttttgtaaatttttcttggagcatagccatatccactcatttacgtattgtttatggctgctttaaatagttaggatagaaactgtgtggcttgcaaagcctaaaatatttaccgtttggccctttacagaaaagatttgccaacttctgccttagatcactgatttgaaaccttttttctctaatataagcaagtaacatcctacaaatttttatgttgtttcagtctcttcaaaatactttctaatcttccttgttattttttgtatgacccattgtttatttaaaggtgtgtcagtttccaaatatttggtaattttccacataactttttaaaaatttttcagtttaattcttttgaggtcagaaaacacactttatagtttcagtccttttaaatttgagacttgcttatggcccagaatgtaggctattttagtgactgttccatttgcacttgaatatatattctgctcttgttgggtacagtgttctgtaagtgccaattggatcaaatgggcagttagtattgttcaagtgttctgtgtcttgtcaattactgagagagcagtcttgagatcttcagctataattgtggatttgtctgtttttcctttcagttataccactttttcctttatctgttttagagctgttactacttgcatttatacacatttaagcttacattctcttaatgaattgatctgtcattttgtctcttcaataatattccttttattgaagtctactgtctgatgctgatatagtcactcttcaaagtatgtttctccattcttctgcctgtaacctatgaacacctttatttttaagtaggtttttgtaatcatatagttagattgttatcttataatctctaaatcataattggaggtttagaccatttacaattaatgtagtcatcaatatggttgggtttaaatctatcaggatatttttttttctgtttacttcatctgtcctttttgccctttgatttctttgggatcaattacgtattttttgagtattttatcttcactgttggattactttttagtggcttctctagggtctaccatatacatattttaatcacaatctacttcaagtaatatatcactttatatataatgtaagaattatacaatagtaaacttctgttttctgccttattgtgtgttctttagtgatagttaattctgcatgtgacataaaccttatacttcgctattatttttgctctaaacactcgactatctttttaagtaatctttaaaaatgaggaaaaatcttttatatttttccaacatattttctgtttgttgcactttttctgtgcagagatctagattgccatttgatgtttttttccttctgcttgaaggacatcctttgatgtttgttgtagcacaaattctatagatgtctctcaggttgatctttttcaatatttgcttttaagctgtgttaagattagttgagagtagcctttagttgcagtttaatttatagccccactactgagaaagttttcttcggaggactctgcctgatgctccatatattacaaaatctttcctcactgtttggtaggattgtgaattgttcctagacctgtgttagttttgggcttttttttttttttttttttttttgcctaatgcttgcttaatggttctttttcaggctttgactaatttcttctcatatatgcacatattcatactctgctaaagacttgagaccttcttcctctgcaaatctgagctctcactctgtataatgacctcctttctggtattttcagatctcaaattgtagttgcctcaggctctctgaagccaacaaaattgctgagtttgacttcctgtactgcagcttgcaaattctctccaggcagtaagctgggggaaattgtagacctatcttgttggcttcccttctttcagaaatggtagtcccgtactgtgtgtggtctaatgtccgaaagccactttttcatgtcagtttgatttttctaactgtttaatatcattaataacatgtttgaatttatgtcattgtgtatttactgatggttttcttagtacaaatccctagaaatagaatatctttgtcagtattttagggattttgatatatcacagagttactggccagaaaaattatcccagtttactctcacactgtttctactctattaccaacactggtatcagctttttaaaagctatattattttcttgcgttatttggcatttctttataaagctgctctctgggattgtttaaggggcagccgtaccttactcttcaggagggcatttaatcattttctctcttgttttggagaccttccttttggcttctagcaattatctctcttcaaattccagtgttgctctctttagttatattaaaaaacaacattgataatgagtattctgtgttagtgaatgtatcttaggagatccactgtaacaagcatgtatgtgaatgtgtgtgcatttcttctgtttacaatattttgaacaagctctaaatgtgggatagaataaaatacagctatttttatctcctgtggtactctttaacctattctgttagggaagcttttcctctgctgttaatgaatactcaggctgcatgacatttcagctcactctaggaaaataaacagctcttaagtgactttaattcataaactcagtcttcattcagacattagagggtccattccaaaacagtgaaaaatgctttaataatcattcaaaagcaatgcatctcctcatttttgatctcccagctacagtctgcctgcatttgaagaaggttatatagtatgcttttgctttttctctactcccctcctcttccagctcactgtttggcacccaccaggatcaaaattcaagagaaagggaaggcaaggaaatagggcaggaaagattttacatagcaggagactggtaatcctgtttgctggctccatgatctctggtccataaaaatatttaaagctgatcccttcctctctctgtgtgtgtggagtggggtgagcagttgtctttagagacccccttcttggttcctcctgcagcggctgctcctatgggtgatggctgratgcttccccagcagcttctgactttcctgcggtccacttaacatatagactcttaccggtggagtccctcttcctgggctatcctgttgacaaagcattaacctgttgaggttgttcctctctcacatggcccccatctgggaagcactcacatttcttctactgcctccagtgatagtgtagttacttccgcaaaacagcccctttaattttctcaggtaagagtcaggcagcactccctatctgcactccccatctttcaggctctgatttgtcaatggagtgagcagcaggcatacccttaccccttccttggttgctgagaaatgtaggggtagttagaatacttttcatgaaataaatccttcatacaaaacctttgctattcctatactgtattccttcagcctgctgagggtcccaagagccttgggatgtgcttttgactatttcctttgtaaattctacttctgagcatctatcctacatgctggtatcccctagctcttctatcagttaaaagtgagacagcaagatctcatctaacatctggttaccaaccacttttgctcatgagcctgcctttttttgttgccattaatcctccctatttatcatatttaattctgcacgtgatataaatcttataatactttgctattatttttgctctaaacagtcaactgtcttttaagtaatctttaaaaatgaggaaaaaaactcttcaatatttttccagcatatttgccaattcaagctcatattcagctaagccttggtgcatataagggtgttttccaactatggttctaatacctctaggcagttccccctagcctgttctgttttccacagaggactgtggaagaacccagccaaaccctgtttgtcctaacagggaataaaaatactgacccattgggatggacctttacttcctgtgctgtttggaaaatgcatttaatgccttcagaatttccaggagcaaaatattatttcctcttatacagtgatttaacaaatgggcatgcattttttttagaaaggcaactttttattagtgattcaccaatttaggatgttattagaaacataagctatttattatacttttcttgggtgctatatttggttattcaaaaatacttttatctatgactatctggaaaacatgttgaaaactaatgtttagtttccttatttacacccaatatttttcagactaaaggtatatttagagactgacatatttgacatattcattttgtcaggaaaatttctcttacttgaaagatcctgtcaatgattaaaaactgtgattaaggtttaaaagccacagctaaattctaaatctattttttacaaggagggaactaacaattattaagcacatgtcactggccaggttctgaatatttattgccattttatcctcacagaacactgagttaaatacaaatattcctgttattatagatgaagagattcaggccaagggagttaactattcaagttcacatctgtggcaagtgatgaaaagagaagtggaattacagtcttctttgctcttatgtgcttcacattctgccacaggtacttttggggatatttaactgcctttcagaatggaagcaaaacaacctgcaaaatacataaaaatctgtatagcattctgtaagccttatgaagaaatgattgtcggataaagcctgttgtggtttgaaggatatatgttgagtacatatgactcttattcatggtgggatttttttgtaggtggaccatttgcatgtttgttcttctgcatcccgttttctttaagctttcacccaaattctaaagtctccactgcccagtcacttataattagcctaaatgtcatatatgaagtactttatccattttatttacccattttgttttttataatctaccaatcaaagaattctttggaaaatttcaggccctctacaaagaatgtttataaaattatcttgcaatacttgttaaatgggaaacactgaagcacaattggagaaatatcagaattattgcaaagggaggaatactgaagataatttttaaaaagattaagatccgaaaggaacaaaagcaaattcattagcaagccatctcacccagcctaggccctcacacatgttaacctttgacagaagcaaaaggatatgagaatgtgaaagagtttctccatcttcaacagtcttacagagattttgccttttgattgctacctgagtcttttttaggaggaaagaaaatatttctctccttgctgtgcttcatatgatatattttgaacaactgcttacctctaagactttgactgttcactggaacttgggtatgttcaacacagagactgaaagaaaggtgagctagatacctgattccaaaccatgctgctacactgcctaccagacactcttgtaagaatttaatcaaatattctccatctcctctggtgttgaaaggcagacttctttgcatagagtgggattttggtcatctttgaatcagtcgatctctgtctctctcatgaacaatgaatgagtttgatatttgttataaatatccttttggctaatgatgcatttgtatgactgcagcaggctcttctcattaaacagctcacttaaaaggagaagaagaaacattaaaaatgatagatgaggcttcctagaaacccattattaataatatgataaatcatagtgttgctgatatgacttagcagggaatgaaaccaaagggctaatgattactgctggtgaccctgcagctaaaggctaatgaatcttgaagactaaattttattaaatgactgaatttcacattcccagttggcgaaatctttctctattcttttggtttagagatcatcttgatcaacacttttgagaaaatctttaaattaactctctataaaaatagaatagtaaatgcatacatccagcttagacagttatccacttatggtcagtcttgtttcatctgtactcaacttcccttttcctcagattattttgaagcaaatgctgcacatattctatccataaacatttcggcattatctgaaagattattttcaaatttctttataaaaggattcttttcataaactgcaattctgttatcccacctaacagtaaggaattaaggatataattctttaatatcattcagctataagcaccctaatgttaattgcagaaaacctgaatcaggagaaatgaagtgactcagctcaggctgcaaaactctaattagtagctaagccaatattaggacctatctcttctgtctgtagttttgtagggatgctctttccactacacaggggaaagtttacctttgaaaaacatcccaatacaaagaaccttccatgtttctttcaaatatgcttagaagtggctgtatccaaaaactatcatcaggatgaacagaaaacctacagaatgtgagaaaatatttgcaatctatccatctgaaaaatgactaatatccagagtctggaaggaacttaagcatatttacaaaaaaaaactaaccccattaaaaagtgggcaaaggacatgaacagatacttctcaaaagaagacatacatgggccaagaaataggaaaaaaagctcctggggcagtggctcatgcctgtaatcccagcactttggggggctaaggcaggcggattacttcaggtcaggagttcaagaccagcctggccaacacagtgaaacccgatctttacaaaaatacaaaaatttgctaggcatggtggcatgcacctgtaatctcagcttcttggaaggctgaggcaggagaatcacttgaacccaggaggtggaggttgcactgagctgaggtcacaccactgcactccagcctgggcagcagagcaagactccatttaaaaaaaaaaaaaagctcaacatcactgatcattagagaaatgcaaatcaaaaccagaatgagataccatctcactccagtcacaatgactattactaaaaattaaaaaaaaaaaaaaagatgctggcaagattgtggagaaaaaggaacacttttacactgttggtgggagtgtaaattaattcaaccattttggaagacagtgtggcaattcctcaaagacctagaggcagaaataccatttgactcagcaatcccattgctgggtatatacccatgggaacataaatcattctgttataaagaaacgtgtgtgttatgttcattactgcactgttcacaatagtaaagacatggaatcaacctaaatacccaccaattatagactgaataaagaaaatgtggcacatatataccatgctatactatgcagccatataaagaaacgagatcatgttctttgcagggacctggattgagtcagaagccattatcctcagcaaactaacgcaggaacagaaaaccaaacactgcatattctcacttgtaagtgggagctgaacgatgaaaacacatggacaccactgggggaacaacacatacagagggcctgttggggtatggggggagcgagagtatcaggaagaatagctgatggatgctgggcttaatacctaggtgatgggatgatctatgtggcaaaacaccatggcacacatttacctatgtaacaaacctgcatatcctgcacatgtaccctgctacttaaaataaaagttgaagggaaaaaaaaaaaagcagcagctgtgtccctgcggtcactttatctttctagacctcagcttcttatttgtaaaatgtgatccatggcatagcttttattcaacaaaattaagattttgttttctttttgtattaggtgttgtattaacaatgaagggtagagtggtaagcaaacccaatacagtcctttcctgtacagagaatgtttttatatctatgatgaggttaataagatatgggagacagtaagccggccttggtggctcacacctgtaatcccagcactttgggaggccgagatgggcagatcacgaggtcaggagatcaagaccatcctggctaacatggtgaaaccccgtctctactaaaaaaatacaaaatcagctgggcgtggtggtgggtgcctttagtcccagctacttgggaggctgaggcaggagaatggcgtgaccccaggaggcagagcttgcagtgagccaagatcgcgccactgccctgcagcctaggtgacagagcgagactccgtctcaaaaaaaaaaaaaaatgtgggagacagtactataaggtcagtgcagtacacgaaacatgaaatattttggtttgggaagaattaaatgagtttgcattagttaagtcatcctgtccaggaacatggtatagtttactctccaggtctcattttacctccattacatttgttacattattttatagttcttgtcaatattttgagctgaatagtcaatttcagtttccaaatgtctattgctaatataaaggaaaactgttgatttctatatttcttatacctattcattttactaaattttcttatcagctataataattttaaaaaaattcttagacactctacacaattctcttatctgaaaatattttgaatttaatcattaaaacaatgtaaatagtagtgattgaggaacttgattttgatgaattagagttttaacttaatattatgtttgctgtttgtgcttctagtaaatgtcctttatactgttctaacagtttgcctttactcctttgcttatagtttttaaactgaatggcagttgaatgtagtcagtatgtttccatctgtttaatcacagttcttcaccctgaatttatcaatgtcattatttaaattgatgttgaatcagttttttaatacaaatagtcaatttttaacaatttttaagttattctcgtgccttttcatctcaaattttctcacttcttgtggcaattttgttaatttgcattttccaaaaagcatccatttcttttggattttcaaattcattcacccaraacatgtcatattcttgtatacctttaatttcctcagactgttattatatcttctctttatcctaatgctgtagatgttcagacttactaattttctttacttttactcactttttaatgttacactagttctacatttgtaaattcaaatgtttactttatttgcagtccttattataaaatcatttaaggctctgtgtttttctgaatataattttaattgcatgtcataatctttgagaaagttcttattttcattaatttctgggtagcttgtaatttcagttttgatttcttttttggcccagtaatttttcataagtgttttttcttcaaattttaaaggcttggaggagttactctttacattgctttttggaatttattgggttttcttggtggccaggtaacttgatttttttttctaaactttacatgaaaataagataattttatgtaagattgagcttgttagttattgtattcggatcttttactttctttgtgtgttagttcttggagacagtgtggtttgtagaaagtgagtaagcatagaattttaaagacctgaattctagttttagctttgttactaacaaattgtgaccttatacagattactttctctctgttggtctaatacagtatggtccagaaaactcactgtgatgatggagacattctatatgtgcttgtacagtatgggagccattagccacatgtggcttttgagtacttgaaatgtggctagtataactggcaaactcaatttctaattttgtttaattcagatttatatagccacatgtggctagtctaacttatcagacagtgcatatatgatctctgaaatcaagttcttggattcaataaatccctaacagaacccaaagctaaaatttaacctctaagctgtggatttacacatttctaaagatgctactatgtaatggggaattttgaatacttagaaaaaaatcgatatttgagaggtggtaaaacttcaacatttttctacctggttcaggcttctaacacgtataagacctagaaataatctacatttaataatttagcctatagtgatcttaaaggctttgaaatgtggagagttattttaatgaggatttgcttctgaaagtcaatgctatggtgaaaatcacattccaatattgcttctgagtatattttacttccttgtcaaaagttgcaaaacacataaaatctaacatatgttcttctcccaaagggcgttggatcaaaaaagaaagacaaattataacttatctagaaactaataaaaactaagaactttgtgtcaaagcttgaggaatacaattaaatttatactcagaataaaaagagaaccttaagtgcttttattacttgcagaaatgatacattgaccgcttctagcttgtgtgcattccttacctgtctaatgcatgtggtggggcattgttgaagaacttgcagcactcgatcatactagcagctgagatgggtatcagcattggaacagatgatcatggttattgttaaggtccagatagagcagttggcttttatttgggggtcatatgacatgtgacatatatccttaaaccctagagtcatcttgataaattcacattatgaaagcaatatgggattgggactgagtgaacatgcgttttccatctccagacctcttctctctaaactgaatgccaggcaaaatcatcagtattttacatttaccgttctctctcccctcttaaccagtgtagtggaattattttaagtaaaacgcagagtttttaactttgtttccagtcaattcaacactacccatattactatttgatagctctagtagatcattggagtatttgtactaatacttgatttatagaaaatttttagataataagatattccatctgtaacttttttacattatccaaatttagctatgtaagtaccaatttctaaatatagttatgaatagaaaattagataatccatctttttacatttgtgcataattaaagtaaatagcttctgcatgaaggcctgacacagactcctcataagctttgactcaagtacatgttttagccattcactatctgtttggcatatttctggattatgattgtagcctaggacagatctaaataaccagaccctgaaaaattaatccacaaatattacaaaaatggctgtattaaaaggcaaaatttttcttttttactgccataacttcatgaaaacaaacttattaacacttagaaactttatctgctaacataattccatcctgaatgtaacttctgcttacaatcatgtagtttttaggaaacttaatttttataaatcatggctttcagtttggcaaaagatgaatggtttatttagaagcacattggaaagctttgtaactttagtcctgaaagatctgactgtatttttagaaattgtacataggacatctctaggcttgctgtgtgcttcttaacaaaattaattaacaccatccaacagattaggaacaataagaaagaaaaatagtgcaataagttcaacataatggacattttaaaataggaagcatcttttatggggattcgattacctctttctggaggctggggaaaagacttcagccagttttttttctgacttgttctgtgacttcaggtgatgtatttagcttttcttcattgaacggttttttttaagacagagtctcactttgtcgcccaggctggagtgcagtggcacgatctcggctcactgcaacctccacctctcgggttcaagcaattcttctgcctcagcctcctaagtagctggcattacaggcatatgccaccatgcccggctaatwwttgtatttttagtagggacggggtttgaccatgttggtcaggctggtctcgaactcctgacctcatgatccacccacctcaccctcccaaagtgctgggattacaggcataagccaccgcacccggccccttttttgtaaaggagagcttgttacacattctacaagcacattttaggtgatgaggactatctttatataattgagttgattaaaatatgttcagtatgaacaaagtagatcataacaagaaaaataagaatattaaaaaatagaaatggtacatcatttgtcatagaacagaggtccagtctgtatttccaattttctcacactggtaacaatatggtcaaagaacatcgttttataaagttctaatgatgtgtatgatttttttttccaaagctctatcagaatctaagatgtctagcagcaagataggcttatcaacataatgaattggatagtaaagttttttccattgggaataaaaacaaaaatcccacacatgccgttcttagatttatcttatttattcagagactaactcatgactttgttatgctagcatactctgttctggtaaatgttggattctgcaaagaaataaagttcagttactacaagaaagtaaatcattgttgaacaaagcacagattcatttgactttctcaaattcacttgttttctgagtcagattttgcaaagccgtttagcaacaggcttaaagagttactaggattgctccttactgagggaaatctgagaaccattttgttttcattttgatgaaaaacaaaaaaacacaggaacaggccacatactgagttttttaaataaattttttgttgtaaaaattaaaattagtttagattcacagaaaagctacagagatagtacagagtttccatattccccccacccagttttccaagatccagttcagggtactgcattgcttttagttgtcatagctccctagccttctctgatctgtgccagtttctcagtctttccttgtttttcgtaactttgtcagtcttgaagtattaactggatgtcatatagaatgtcccccaatctggatttgtctgatgtttttctcataattagatgtgggttatgggtttttagaaagaatatcatagaagtagagtgcccttcttatatcaggggttataggatacctacattgcatccctcatgatgataatctttatcacttggtgaaggtagtgcttaccaggtttgctcactatataaaattactagtttttcccttccctacttcgttctctgtggaagcaatttagtacctagtccaccctcaaagatctggagggggattaagctctacctcttggagggaaactgtgataaggaatatattttgtctttgatccccagttcctgacactgagcttctaaaatgtttggaatttcctgagcgatagggccataggagcattttgttattcataataagcccctttcaaccatacctgaatttacgctaatgtgactctcagtgggcccttaagtagcttcaatatggagctgtttgccagacagaccaagacatgattagagggttggaaagttcagccccacacacaatctctaggaaggagagagggtctggagattgagttcagtcaccaatggccaatgacttaatcatgcctatgtaatgaaatgtccataaaaacccctgaacgacaggattctaagtgcttctgggttgctgaacacatcagggctctgggagagtggcatacctgcatacagcatggaagctctgtgctcctgccstcaaaccttgccctatacatctcttccattgggccattccttagttgtatccttcataataaaccaataatagcaagtaaaatgccttcctgaatcctatgagctgttatagcaaattattgaagctgagcgggggttgtagaaacctcttgactttatagctggttcgtcagaggtactggtggcctggacttgctatcagggtttgaaatggggagcagttttgtaagactgaatccttaacttgtgggtcctgtgctaattccaggtagttagggtcagaagtgagttgaattgttgggcactcagctggttacagaattgggtggtgtaaggaaaaaccccacatatttgatgtcagaagtgttgagtataaacagttgaagaagtattatgtattttgcaattcttctggagagaagatttgtctcttctctcccatttatttaatcatatgtttatatcaatatgttctcaagtatgttttatattttggttgtaatacaataccatgtttatgttatttatttattcacttatttatttattttattttttgagacagagtttcactctgtcacccaggctggagtgcagtggcgtgatcttggctcactgcaacctccacctcctgggttcaaacgattctcctgcctcagcctccctagtagcctgggctacaggtgcatgccgccacgcccggctaattttttgtattttgagtagagatggggttttaccgtgttagccaggatgctctcgatctcctgacctcgtgatccacctgcctccacttcccagagtgctgggattacaggnnnnnnnnnnnnnnnnnnnnnnnnnnnnnnnnnnnnnnnnnnnnnnnnnnnnnnnnnnnnnnnnnnnnnnnnnnnnnnnnnnnnnnnnnnnnnnnnnnnnnnnnnnnnnnnnnnnnnnnnnnnnnnnnnnnnnnnnnnnnnnnnnnnnnnnnnnnnnnnnnnnnnnnnnnnnnnnnnnnnnnnnnnnnnnnnnnnnnnnnnnnnnnnnnnnnnnnnnnnnnnnnnnnnnnnnnnnnnnnnnnnnnnnnnnnnnnnnntctgggtgctaggtgtgcttgttgctactgggctatcattgcttctagcccttctcaatggacagagctatgtaatatatgcacacatactaactcatgctcatgcagttttaaataataaacaactttccattttagaccattttcctaaggatagaggaaaaaagtaactccttactgaataacggtctcaaggtggtatcaacagaatgtgttttcttccaaataccagacctagaaaatggcattcttaggattaaaaatagtgacattttagcaattacacctcaccaccaagtattttgccacacttgagttccagatgaatgtgactgaggtcatatctgtcatatagctatatagtaatgttgtaaaaggaataaagtcctctcacttactgtaactcctgcttctcatctgagaatgtactagctttaacatgtaccttaacttaggtccctataaaatgaaatggaagtaactagggtttttattcacagggattttaaaacactgttttttcacacatttaacattcatatctgatattatgaatggtcaacgttactgaaaccatcaagatcagaaatttaaaaggtctcctatgaaattcagggagttgaaacattggcctatcaagaaatgagttaaagtttgtatattcctatatatgctttttacctcttctgatctttctttgtatttcactttgaaaacaattttctattctattctcagtttttcatttttttttggtggaggggtgggggtgggcgggttgcgaagggataaggtctcactctgtagcccaggctggagtgcgttggttggtgcagtcatgactcagtgcagccttgacctcctgggctcaggtgatcctcccacttcagcctcccaagtagctcatactacaggtgcatgcaaccacacccagctaattaatttttttttcttttttcttttttttttttttcgtagagacagggttttaccatgttgcccaggctagtcttgaactcctgggcttcagtgatctgcctgccttggcctcccaaattgctgagattgcaggcttgagccaccatgcccagctgttctcaatagtttgatttctgcactaccaagttcttcaccaaagcttttgtttcactattactttgctctaaagacacatcactttttttcccccatcttatagattgcctggcactgttgacttaaaaagataaggtagaaattaatgctctttgaatctcctgttatatctttcaaaaatattaactttgtggcaaatcgcccaaagtcgttcttttaactggttttggtgttgaaaggagaaactgtgtttttcctgcctgtgatgataggaccctcccagagtgacattgtgcttcagcattctctgttgcctccagagatgggtcattctcacaaggaggatgtgcttttcccttttgggactcagacctgagactcattccatgcactgagtctgtgtggaatgatgttacctaggaggcccatggttctccttgtcctgagagtagggtgtgcattcttagcaaaccggtggttagacttgcctccacatatgaaaagcactgggttcctatttcacagagtaaggcttgcacaggagaacaaattaagactccaacacagagttatcaatttgctgtgaatgtcatagctattaattcccagtaggtacttaagcagtcattaaacggggtcatcaactgaatccagaggacatcttgagataaacagtagttattaatttaatgtagaatcaaaatactttgtattcttccacccagtcctataatacttgcttaatagggcacgtacatttattatacatagcatgatcttttgcaattgctcttaactgctttttttttaacctttaaaatttatcttctgtgttactttctgatcctttctattgtggaaaaaaacactggtaatgatttcaatttattaatgttctttcagtcactctctctctctttttttttttgttttttttaatctcatccacctgtcagtgatggcggtgtaattacattaagtctaattgtgctcttagagctttgcagacagtgggaggaggtgatggagcaagtatgtgctgcccatggttctagttctcattccctcccccttctccccaaccaacccacatcctctttgaggaatcagaaaataaactttctgagaacaagtatttcctgatgacaaaataaatagtaataattccatattccatgtgaacgagttgttgaggagattaatatattttagtacatgcagacacataaatgatgtttttccatttgtattttagtttcctattttgtaatgactattggagacctcctaaaagtataaacctttaaaaaattatgtgatagtaattgtgaccatttaaacctcaccattagaacataggttgaaccaaccatatgaaattcctgtatttgcaggtcatacatgctcctatgtgagcaatttcatatgattctaatgcatttctctcagcgattcagtggaaggaagaaaataacttatccctggatttttaaatatgtaatttattctgtttctgggtagtatacaggcccagaagctccagtgcttagctatattcaataaactcaaataacttagagtacctttttatttatcctgaaacacttggtcatgctctttccatcaatgccttctgtaagaggcctgataaaacaagctgaactcacttagccatattgtctgatgtttgttttcatctctgtagtattatgaatagactctatgaaaactgcaactgcagcttcagaacagagctaggagtacgtttttctcttgctgtccattttcaaaatctaacaaatagatcagagtgttagtctatgtgaccttatacaaagagcttaaccaatccaaagtgccttaataacaacaaaaaaaactttgtcacacattgattgtaccttgagaagagaaaatacattggtttcatagttctaactgttcacttaataaatacttattaatttcttatacagagatggagttaattaccttgtataattaatgacaattttgtatgcattggaattttttcttggagcaatgaggtttcataagtgaactatggagaccctcttgaatggtatttacattttacaaaatgagagaaattggtgtaattaatagctaggaacagaactcatttttcttatttgaagttaattgatttctttaagaatcaaacctattacatttgtgacattttctaacctgcataaagtggtttgtctggactatcttacaatagatgaatgaagactctgatcatggtaataaagtgagtttcacttacatttttgtttgttcaggttcatttgcaatagacaatgtgttagagaaacttgatgtggttttggtatagtttctggtatgaactagtatagatagtttctgtaaagtaattttttattttcaaatattctgcctggagtcagaaaatagcacatttatcaaatctaatgtatacaattatcataaaatcattttgaattgatacacatcagtggttctgttagttatatttattatagtggaatttataaaaatggattttaccctttgtgaatatttgaaagaaaacagaagtggtagttttaggattttagaatttgcattttttatttaatttggcctcagaaacattgagagggcattcaagacctataagctattaaaagcaggagttttgtatgcttagtgaaaagcacagaacacctaacaggtattaagtagatgcttaattaatgattaatagttggggtatccagtttcttaggacttttccttgggtgtcttataaatgatttttctccccacttgaaaaagcaaattcagtgtagttcagatatgtattaaataacatttatttaacattcagccctgaagaagatatttaaaaaatgtccttagtagggtcaattttgaaggacaccatattttcttctctatagctttgcaacttcctgaggtgaagttttaattttacattttattttagccacctctttttttcttcttgctatcattttctctgtaggtaatgtccctagctttgattactctcattagtacaccttaatatctttttgattctgtattttttagaaacaaacttgaagatggaattcagtttacttaaatacatagtgaaaacaagctatcatgtattagcaactgcactgggttgaaggtgaacagggaaggcaaagggctcatagtctaatgagcaagggctgggcgtggtggctcacgcctgtaatcccaacactttgggaggccaaggcaggcggatcacctgaggtcaggagttcgagaccagcctgaccaacatggtgaaaccccgtctctattaaaaataaaaaaattagtggggcatggtgggcgcgtgcctgtaaccccagctacttgggaggctcaggcacaagaatcacttgaatccaggaggcggagatcctgccactgtaccccaacctgggcaacacagcaagactctgtctcaaaaataataatagtaataataataagcaagatgatatcctacatctgtgataggtgattttttttttacttgagtcacggtttctctctgtcgaccaggttggagtccagtggctgctcagcatggccttgatttgctgggctcaagtgattttcctgcctcagcttctcgagtagctgggaccacaggcacacatcatcccatctagtgactttttttttttttttttttggtagagatagggtctttctatattgcccaggctggtcttaaactcccgggcttaagtgatcctcctaccccagcctctaaaatgtccagattacaggtgtgagctaccacacctggccctgtgacaggtggtcttgattaggtggtaaggcacaggcactgattaatcagaacagatgtgagaaatcagaacagatttgagaacagatgtgagcactggtagtcatagctgcatggggtcttggaggctccctattgtgtttttaattattaaattttggggggaagggtggttagagagaagggaggtgtctcataagggagagatcataactacttgtatggccttgtcactacctgccmctacaacatcagccctgatcttaaagctgataatgtggtaaattttaaaatgggaatatgcaagtatgctgtgagaggttcctaaaataatcatgtggatagcgtgggacagaggtctgtgaacacttcctgagagaagtcatcatgattgatacataaagaataagccggagctcacttcatagtatgaaggagaaacctcaaggcatgtgggagccatatgctatgtacaagcaactcactattcctggcatggaaatgggaactggggtgtgaggaaatgaagaggggagggtccaggttattacagaccttgaatgccaggctgaggtgcttggactttaccctgaagcgctgaagggttttatgcagaggagcaacgtattcagatgcgcattttagagaggcggtttttgtggctgcaagttggacagagagggacaaagctggacacatgttgaccagtaaggagactactataactctttagggagaaatcatgggaatcttagctaggatgagaaaaggtcaagctcaagaaatgttgggagaagtggagttcttagtagttgagcgactgattggatgtgggttatgagggagaggcaggagacaaggaggtttctgatttggatcttgaggtggatgattggccattaactgagccaggaaatttgcaggtgggtgagatttgcctttatgaagatacttaatttagtttggatcatattgagctgaggcatgtattaatataacagaagtttttatttctcattcacctagaaccaaatgagtatccctaattgtcaggcagctctcttctgtgcagtaattcagggattgagattccttccatcctacagctccaccattttcaacttgtagtttgcggaaggtagaagaatgtggaggattgttcttgcaaggttttatggtccagacctggaagtagtatacatcactttcactttccattgtccagaacttattccatgtgaccaattgtaacttcaaggaaggctggaaaatgtagcctaactatgagctcaggaataaaggaacaattttgggaatcagttaacaggatgtgccacagggtgacagggacacttttggatatcgaagtctgaaacttgcagcaaagaccttagctggaaatgtggttttaggactcatcagagacaggggcagttcatatgatgaaactagatggagtcactcttggagaacaagtaggcaagagctgaggacagagctgttaatttggccaacatataaagtgttctgggaaaaaggatgctaggtagaaaactgaaagcctcaatagcagtaggaggaaccaggaccatagaagcccctaagtggaggatttcaaggagtgaatggaagacactgtgatatgcagtagatagatataggaatgtagacagatatatagtagacactatatatatatatatatatatatatatatatatatatatatatatacacacacatatatattagatactagatagatatatagtagacaccacaaggtgtctactcaatcagatgattaactattagagacgtgactgagtagagttctcacttcaagggcacagtcaagcagaaacaagattttctctctccagggaattagcagagaggagccatggagagaggatggagaaactggagcaatggggctaattgatgacatagagcatccctgagagaacaggaacaagagagcttattaaaataaaaatttgagtttatcagaatactgctcttttgacatgcttttttgaaaagcccttataatgattgataactgatttttattgtaagtaattttgctaacctaacaatagagaatataattatatttctcgttccatattagttggtttacataatcaattcacctgtcctagaaaatgccattaatctttgaaaataactttttttggttttttaaaagaaagtgtaacacagaaaagagaaatattctcatgtaactgtgctataactgctatactaaggcaaattttaagtctcttatttttcctagagaaaggtgtttataacctgttactatatgtttaaattaatgttatctttctcagttttcctctctcctactctttagctaggagcatgcttagaggactatttcttttctagagcattttttaataatggggaagacagatataaagaggcttacatttggattgaggtgggtacttaatgttctggtatttaatattgagcagtaagagctagttttattaataaatcattctacaatgatctttccctttgacttccaatagattcacactttctactatggcatatagcattactttaaaatgcttttaaaattgtttctatatattataaattgtttctcacttaagaccagaatatttakaggtaacatctggaaatgagccattactgtttatgtactaatgataaaggtaayggcaagaatgattttcagtgtgttttgtactttattttaaacagcatttcacagaaccattcaaatgcattcatttttcctttttgtaaaatccttaaaatatcaccaaagatcatgtttacaacttgaattcctgttgttgttgttgtttttttttttttttggagtacaatgtaatattgatactttgatgtgttgactttttaatgttactgaatttataatagtttttctcttactttctttaaaattctagtattaggaaataggatcaaaataggtgaaattattgatttcagcttaaatctattttctagaaaaaagtggatcatcatattcatcttttatttctaattcctatcttggtgcctggtttataatagattctgagtaaatacttgtgaattgaggatacttgaatcagtatctttagaaaggttgtataactgttgtgatggagcatgcggcattgctagctcattttattgcagaatctttccatacttgctatcagggtcaatccttaacagcaaaaagatgagttggcyatgaaatgagcatccagcaatcatctctccattatgctagccagaacgcatttcagaactagagttgcatcctttaagaaatgtatgtttgctgatgagattttaaagaaagccatactttgtgtcatgctggcccaatgcttcaatcattcccagaagctcttcttcattataggcctattttccccaagtatcactttccctctgtgacttatttaaagatatatttttagctccttaatctccccattttatcagcttcttgttctgtatgttgaattaggatgttgaattttggggatgaagatgagggatgggggtggactctatattcccctgttcagctattcacttaacttgtagtgctctcatcttctcaaaattctttccatccattcattcactcactcattttattcactcagcaatcatgttttacctctgcaaaatgtcaagcagtgtgttggacatctggatagaaaggtgaattactctgcctaggacagcatctgacatagtcacctcactcagggagcagtagtaaaatgtccccttaagagctttgctcagatccccttctgttgtgcagctataacagttctaatttgacactgaattctcacccttccatataatttgggcaccactttaatatattagtcatactagcttctgtaacaaataaacccttcagtttgagtggcttagcaccctgtgcacttatttttttactcattttgaatggtgcaatgtagttccaaagaagtgggctgtgcaacagatggtcctttaaggaccaaggctgaaggaaactcagccatcttccaaagtcgctttggatgtcagcgtccagattgcagaacgtgaaaaaacatgaactgcatgaaagagatttttgtaggccagagctgaaaatcatagatgtcacctccattttttccattgtctggaactcaggcacatggccacccctaactggaatagagatctgggagatgcaagtggtggggacccaaaagaatgcctagctaagctggagtgaaggatgatgatgcatttcccgcttatgtcagggagtatgccttgtataaccctgttttattttcctcctggtataaatagaacgccttttcttctttttagtaatggactgtttcagaaatcctttgggaattgaaatggagggaaacattttattttctgtttccaatacagtgaacacactaaaagcagaaaaaccagatatttgaaggttttcctgtgacctgctagaaatgctattaaaagatactgctcttatctttcacagtattgctcttaccacctaatgggctacttgtgtgaatcccctcatttgggaatctccctgagctacttccttccctgcctgctttcccagccacagttagcagttgcatcctcagtgttatacctttgttggtttaattcattcatccactcactcatccaaatatttataatggagagaagaagagaaagagggaaggcagggaaagagaacagttgaaattcactgtgatagcattacatactgaatagtataaaggcttagggaaaagacacttatctgtactttgtgataagagagaggtgaaaatgttccttttagaggaaggaagtgtagtctgagtcttttagtattcatggatacttttccttccataggcaacaagcttttccaggagaaggaccttgttttgatctgactctagcaccctagtatacagcaacacttatactagacattcagtaagttgaattgattgaagataagtgaatacatttataaactctatttattacacgtttgcatacatcatctcatacagtgctcaccacagctctatggtaggacagatattcttattcctggtgtacagataatgaacacaaattcagagagatttrgtgttttgccattgactcatagttaacaggctagatctcaggtgttctgcatctratcttgtgcatttttcactcttggaaacaagcattaaatttaagaatcaaaatagtgctttaaaggttgtaacatgtgctttggaaatgagacatcaagccagctgaatctctttgagtgaaggctattcacttatattgagtcaagagtgtttttaacaaaaacagacatgcttggtctaccatgtttcatagtgtgttatattcttgccagcacactggtttgtaccctgcagggcctctatacatatttctaaactaattgacagtaatttaaaatgtataaatcagattcatctaaattgggcaggcttccttcttgttagaggctgtcataagtttttacctatgtaaccattttgtcacaggggacagaatttgcctgtggtatattctaattcagggacttttttttaattcaaagagttgttaactctctagcttggtttctggttttctttggctgctgccttttcattcttccagcgctcgccccctcagtctgccaaggacactatgtatagaaactgagactgcctggatgttcttaccatagcagattgacacattttatcatagggttgctttagtgtcttttgttgctctacaaatctcaaactttctcattagaatttgataggcattgattgcttccatctctgacttatttatattttgtacgatatcaatgttctctacagaaatattatgaccaacttaataaattggccccagtttattagggttgcagctaagaatgaaggcattgcttatagaagtttaaaagtatgcatttccacattatgttctgcttcaaacggtctgaaaccaggctcattttgtactctgcattctctcccctgccaccctcatcccttgtcccccagctgttgccagctgccatctatcttatttactgacagattccaaaccacaaaaatgtggtgactacttcttttcttcatactgctcatctaattcatgttcatgttctgtttcattgacctgtaaaatgtctccaaaatcatggaattcgagaccgtgttttaaagccatgttgtgtgcatttcttgatctccttatagctctaacattatcagaaaggagctaagagccctctaagactttactggcaaatcagcaagaggacttgggctaaaaaataaataaaattttaaggaggtttcagttcaaagacatttctcctcaatatacttgagtaagaatcattttatcatctctggaaacacttgctttttccagaactctgtaagcaggagacagaatagacggatggactttttcagagcatgtggtacatagaaggtggttggtaaaagtataatgaatgaagggatggccagatgatcaaaaatagaatgataatggtgaaatgatcctgaactctgtttctgtgttctgtttttgcttagcaagaatgttttttattttatttttctaagcgcaagataaatgccaagtgttagaaagacagagccacctttcatattagccattactagaaaaacaccattcatgcctcagcctactactacataatggaattttaatctgcaggaaatccaagagtactttagaaagtgcccttaattgaagactcagtagagttgattgtgtttaaaaagaagtggatgtcaggggtgtttggatttcaatctgatagtgtaataatagtaatgtcccagaattctggaaaggtttttaattttttttaatccactgattgtcttattgctaaaatgtcaagaaaatcatattagccacacttaataaaagtgatgtaatgtttatcctgaactttatccttcaaccacagaataatagagtgacagaatattaggttatagaacttcaagcactaagcaatgaaggacaatgagtttttaatgattctagtagcttatttttgcaagttaattttgttctgtcacatacaaaagaagtgaaagatacagagctatttattttttgttttgcaggggaagatggtgaaaggaatgggaggtgctatggatttagtgtccagtgcgaaaaccaaagtggtggtcaccatggagcattctgcaaaggtaacatgtactgtgctccccaaatactgcttttggaaatttgcaatacatcaaaacccagtgtaccaccaggtcacctaactgtggattttattttctctggctcattcaaggtgatagcatttacatttgagagagaaagatgacaaaaacagttacttattatttatttagctaaatggttaactttgagtgaaaccaaacatcagcatgttcttcaaatatttgtcctgcatacctattaaaagtaaaagctttatgcatacatattaaaagtaaaagctttaatatctccaaaggaagtgaaaagatgtctgtatggatgtattgattcaggttttaagatgattatagtggttgctatctgtgcgtgaaatgaaaagccacaacagaacatacatcttaacaacagttattttcaaatggaccatatggccctcaaagctgtgaggtgccgtatccagaagatgttacaaaataatggactaggtgatagctctgaaaggtattatacttttattttgataaatcattaaatattkgagtgcctgttacatgctaggcatgctaggatgtggcagtgaccaaaactggacaaaaattactgatctcatgaagcttacattcagtctttttcctcttccttcacattgcaataataatagctaccattttttagtgtttactgtgtgccaagaatacaccaagctctgtgtatatgtatgggcccatgaacttgatataagtgctcttagtatgtccagaaacagagctttagagaggttaagtaacttgcccgaagttctgttagaactagtagaactctgattagacctggtgtctctgattccaaagcccagttgtctcaccaaggaactatcagtgtaagtttcttccttgttcctgactcagtgtctttggacgaactgagcttaattgccttcctaacctgaacccattggcttctactgattttaaaagttgatattgaatgctttcttcatcttctttgccttctcttcatcctcctttattctttatcattcttagttttaaaatctacctcttctcactttgagacctgctaatctgagtggaaatgacagttcatttgccctctttttgtttagtgatgcagcattatgttaaagcacggaactagaagattcacatcccaccygcttcccctgggaaagtttggttacagagaaatgtatgccacaaaatgattttgttgtgaaaacagctataaatatgtgttatcataaattgagtaaacagtgggaggtgagcagtggtgcataaatatggaataatagaaatggtaccagcacaggtgacttctgagaatgccttgcaaagcatccaaaatacttcatttcagaggcaagaggatgccaagcatgcaaatcaaatccaaatcttttctggaaaataatgtctatttggaaaaaactctttcagactttctttttgttgtgaaccttaatattgacacacgaaggcactgaagttcaacttattttagtttatttttgtgtatttgttttcaaaacattaggcctatattttgcaaattcttttcttccacccaagtcctttctttctcctcagctggaatttctgatagaggaaaataaatgatgccaccaacttcagactagaaatatcttattaaagctttccacagaagaaagatcatattttttacttctttccttctctcagtggggaaattagcactgagttttaaaacagaattggaatgaggtatttttccgtagatagtttcatttcaacaaaccaataaaacaatgtacttatgattaaaataatagtaatgaattattcacagtaaacagttaacctttgaaaaataatcaacagtttctcttctcacacattttacttgtggctctcgaatatgtagctgctactattttgttcacctggactcatggttactggcccagctcaagggaagacagggaacctgctatttcttttttgcatcttttgctttggttaaaagttgagaagagctggaaaagaggtagggaagagagttttttcactcctggtaatctcttcagttaagaatctgttcttttagatatgccaggtaacttctgctgccttatgattaagtgaacagcctaggggagcaatctctagagttttgtaagacatgggagtaaagtttgcaaagaaggattaaaacctgagaaatatagtcttgtattcttgtgctgctgttttgctgttttttttgtttgtttgttttgttttgttttttctgtaagtggatagagctattaactggttttcgggtagggctatctatttccttatcgatagggttacagttaatttgcaggttgtttataaatatagcattgcttggctttgtaaaaatgtgttttttgttgttgttttaataagacaaaggaaactcttgcaaccagttactgcctttagttcagactccagcagcttctaaaacctgagacctggctacctacgggtgctgctctggagtaacacctgccctcagactacctctgcaacgtatgtcaggcacacgggtcagactggcattgtaacttgattttcatttgagcctagacatcagagttacaggcaaagttttgaagtaggcaaagttttttttggtgtccagccacctttcttcttaagcttctttttcatttctaggtatatcttatcttctgccctttaaaaatgtgaagaaaggaaaggagtaacaatctgagtccttaccaggtggaggtgctgtgcttggcactgcatatgcttaatctcattgatcctctgaagtaaggttgagatatgggtattaagaagcttatccaggaaagtgacagagctggaatttgattcagtgtggtgcagcctgtgttcatactgcaccatgccacatcctcacaaagctacctctgcaccagcgtcccacccacatctgccctttcaggaagcttcaggtttttttttttttttttcattttccctggacaaagctctctttgcttaggtgagacttacatcagcaatatgtttaaaagaaaataatccaaaaatctaattatatcttctaatacctatctccatttcttcctttttgcattagactcctccctgttttatctgggcacacagataaacccagtgactggctacatttcctagccttcctgtgcatagatacatccatgctaccaagtttgggtcagtgggatttgagtatttatgatgtatgtaatttctgaggtatgtctttaaagttaaagccaattgcattaaattttctatgccccctctgtctgataaaggccttgactgcagcagcagccttgggtacaaacctgtaaaccatgtgctgcgggttgcaragctgcctccaccacttgtatccatagatagattccccattccttcctttatgggttccctccagaactctttataatgccctctgctctgcagccttctaaggtgccatctgaatctttggtaccaactactatttttcactcagtggctccctccaccacttgtatccatagatagattccccattccttcctttatgggttccctccagaactctttataatgccctctgctctgcagccttctaaggtgccatctgaatctttggtaccaagtactatttttcactcagtggctccttaatcatttttccacactagaatcttctgatcagccatagaactatatttctaacttcctattacacaactccacctggttgttccacagccacctcatctgcaacaaattttgccaactaaatcatcattccccctaaatatgttctgcttatttggcccaactagagaagtgatgatctcccagttatcatttggcagggcatccatggtccctctctgcccctacccctacgtacaccaagcactataaatattgcatcaatgtgactcttgtagtctgctccccactatgtatttctactctgtttatccctgttaaggccttctttacatctgcatagatcactactgcagcattccaaaggtccctgactgctgactgcccctacgtcctggtaatcaagcacacgactgccagattgactagtctaaaactaaagctagatgaagttgttgctatttaaaatctgtaaacatagtcaacactgcttggttctacttagcccatctgcctttgcgattcgctccccagcagcctatctcatccttgcccgcagaacttaaggtctactaagatctacagaaaggcatcatggtgtttcccattcttaggtgtttgtacattcagtgcccactccctctttatctggcttattcctacctctgtaaaatcatagatgaatgagccaatgttttatgaatttgctggtttagttccttctgtcctctcgacattgtgaatgaccaaaggaatattctttgatgttttgtcttgaattttggtaaaattaccttctgagtatgttaatttacttgtttattcagacataaaatatttactgaggacttgatatgtacaaagtactatcataggctctgaggaaatgaaaaaagatatggtccttcaggcagcccagtcttatgggggcagagtcatggaaatcagtacttaagatgaaaggtgagcaaagcagagcctgcagaacctggcatctcattcccagttccattgttggggagcaacaaagaggcttcccatgggatgtatggagtatttgcaggagatctgagggatggggcagcttgacagggattaagtgttgcaggaaataaaagaatagacactggtgtgtgggaggatggtgcatgttaagagatttataattaggtccctctagtcaaagaacaaagcgagaaaggttgagtgggaaaaaatatactcacacttaaacacacacagtggccagagtgatttttttcgccaaaatgtaaatgggatcatgctacttctttgttggctcaaaaaccctcaatggcagctcaaaaaccctcaatgacttcccatctcacttagattcaagtccagagtccttactattgtctccaagacttccatggtttgtagactccccctgctttgccaccccaactgcctctctgaatctgttatctctcttgcccacttaacttcaccctcactcacttcctgaaagtttctagaacatcgtaagaatatcttgccttgggacctttgcatttgttattctttatgcctagaatactttttccyagctatccacatggctcactgcctcacttcactcagactcaaaataccagagaagctttctttgactaccttattatatacaacagaactcttccgtcttcagacgatcctttctcccccttcttcagcagaatgcaaactccatgaagacaggggctctgttataagcaccgagtagaatagagccttatgtacatcatggctcaatacatacttgttgaattaatttttcaagtaatccaccttgaacatatagaaagcacttctaacttttccaagttgttacatgcttctgtctccattttatcattataaccctctcatgagatggttcttgatattttctttctagaggcagaatttcatagaggttaagtaacccaataaaataaaaagtaaaaccaagcccagagtccatgcattctgcctctgggcttccttttccttttgttaagcttttctgctggcaagcaccattaccactaacaacatgaagaatctgttttsttctcaatatcatgtacgggaaacgtgttcctaagtataactttcagaccacaaaaacaaaggaattcagttactgttgtcatttaatggcaacaaacaaagcttggtttcttaattttggagacaaaatgagaactctattactaaaacaggtttagatttttgtattacaataggaggtctggattctgaagggataaaaagaataattgttatgaagttgagaataaacctggtgaatgaaagaataaaccttgtgttttttaatttggattaccttaagcttattagtgttaaaaagtatactcatatagcttcactcactctctcctggcttgtgctgcctttgtcatataaactgtagcgatctttatactcatctgcccatcagaacatatttataattgttgttttatgcaactgtgtttacagtcttgtaaaggaaatgttatatttatgtatgtacctttatgtgtaccaatatttgcttttaggtgaccttttatatttacctttcctgctgttctttatttcttcaccttgattcaaattatagtcaagtatcttttcatttcagcctttaatctgtgtctatagcacaggtctcatatagagctgaaagctatcttatcttgacttcactttttgtggagaagaattataaaaggtaaatggagtttattaatcctgcttattttggatgaaatgtgttatcaaaagccaacaaatatgaaggctttttaaggaaaaccctttcttgggagacatccttcagataattttcagcaacattgaaaagtagctcaaaatgaaagtattcttttcttaggagaattcataattaataagagtttcagctagcttaatttttttctcatttataaaagcgtataattctttcctagcttcaattagaatatacagtagccaggttctgtttggggaaaaaaaattcacctttaaaaactataaatccttacatggttttgcctttttatttctcctttatgatagaaatgcctgcaaaaacgttataaaatgggagaaaaaaagcagaacacagtccaacaactagtaaaactctttaaaatgtgttacagaatttaattaaccttatcactttaaattctttagctttgcatttatgtgcacaagtctccacattttctaaaataaaaaggaaaactaatgctaacagaggctttctaaggtaccacaacagttcatgaatgaaaagagaaagtaattcctgctgacttctgtgctctgccctctggaggttagagatcataggacgcaacctttagaaaaaataagtatgtctatgataatgatttttatgatacagtgtacaagaaatgtatatgatacagtgtataaggggccttctattctaagatctcaaaaccctgaagaccgtttttcaggcaaatggcttgctgtatctactgtttcatttggctagtcttccccttgagaatatacctgtaaccacaaacttttattacctccatatattacctccacatatcatttgtaatagcaaatgttctctgcttctaagttagctgagtctctctactgaagtcctgagtggattgttggaaaccctatagtgtaggcgctgtataaaggtcaatcatatcccatgaggacaaatgcagtgtgagtaatctcattctttccttttattctgtgtaccttgattttctttatttagcaaatccagttcttttctttttttaaaaaaattaaattttttaatttttgtgggcacataataggtgaatatatttatggggtacatgagatgttttgatataggcatatggtgtgaaataatcacactgtggagaatggggtatccatcttctcaagcatgtatcttttgtgttacaaataatccagctacatcagttatagtgatgtgacagtcatgtattttgtaatacagcatttcccattattgtatttgtgtgtgtatgtggtatgcttgatttaagcattgagattaagtgggagaaggaaagagcaagggtgttgataatcaggcttcatccatgatattttggcaagcccaaagatagacctgccattggcttccttgttctaccagacaaagtatttaatattctcttgccaagaatattaaattaaaagaagcccttgtagtccttcttttcagcaaattatggcaagtgcctttaagctttagaagggagcaggtggaagaggtaaaataactataattcactgtttctctcttaactttcacatttgtatgttttgggctacagtcctaaagtgtctttgctgcttccttttatcrcacctttatctgtcttcccaaagtcttataagccccgtcatgtgcttctgctagctgtgctgcttctagtgagctcagagatactaggaatgtacgagtacctatcttagaactagaaaggcagcccctagtggtccatagacattagtcacatggcattttatagctcccctctggagttccttgaatcagaaatgcagcctttattgatcactgtagtttgcctaatgttctactcatggctgtacatatgaagaaaaatagtcttagcttagtgagctcagcatctartggaggtggtggcaagaggtcaacatgtgaagggaggaggaagcacaggagcacctaggagggccacacactggggacacccatgggaacatgactgcagcaccagatgaggatgctggatgaaggttttcctagggaagatggtgtctgagccaactcctgaataggaagggtgttgccgtttgaatctggggtgatgaggtatgtggtggtatgtgttccagctaacaggcagcatgaacaaaagctgaaaggcttggtctttttaggagcaggcaaatcccagaacttgccttctctgtagttgatcattagggctttgccaaagaaagtactgagagaaaaaatacgtgcacacgtgtgtgtctgtgtgtgtgtgtgtgtgtgtgtgtctatgtgtgtgtgtgtgtctatgtgtgtgtgtgtgtgtgkattgcagccacatttaacaagcacttaacagaaaagatgagcatgaaatgaggttttgtataaagcacagtcttaaagatttcaggtgaatgtattgacatgaaatgcaagaaatcattctgttgtgataaagagcttatttggatttgggattaagttcattgcaataacatgaaacttattgttatgatagcaaagggatttattactatttaactagagttgtttaatactgcagaacttaggcccaggattttattcagacatctaaagaattaaagagatcaccaagaagcaagcaatagaaagtactagagtgtttagtcacttgaaaatggtgaattaccctatgtattgctcaagtcctgtaagcgctgaaggagaaagagaaagattagggaagctgatgcaggaaagaaggtagatgttcaccaaaggttgtgatgaagttaataagtaagggcatattgaaatcaggagcctcaggactagtcagttttttttgtttgtttttgtttgtttgtttgagaccagttctctttgttgcccaagctggagtgcaatggcatgagcatagcttactacaacctcctgggctcaagcagtcctcctaccttggcctcctgagtagctggaactacaggcacgcacagacacaactggctaacttttaaaatttttgtagaaatagggtcttgctatgttgcctggggtgttctagaactgctggcctcaagtgatcctcccacctcagcttcccaaagtgctgggattacaggtgtgacccatgccaccatgcacaaagcatttttaatgctatgctttgtatctatttctctgccttttctgacaacccttcatgaggaaggaaagaaatgcaatatataagcatgaatgagatccgcgtaaccctgtatatttgcacctagattcaacccaccctagtttattgcagtttcagaacatttcatttgattcctacaatgatcaggtaaggaggataaagcaaaggataagagagaactatggcacaaagaatttaagggaccacaaaaattgtatggcagaactaagactacaaacctggtctttggactcctagtagagtgctctttgctcccacaccatactgcattcctttactaggatttatttttaaatgctaaaacctcagcacttgttcctcctttgtgagtcactaatatatgcagctgccatagcatactgtagggctcagcccagcatatttagaatagagtgctaacatgggagctagtcatattttggtttcatagctaaccttttattgaatattgaaattgtgacattttaaaatctttctgcatctcattttctttttccttgatctgtgttatgtcctggcactataaatgtgaatggaatcatctagctccattgttctaacaggaatacatttggtgccagtttcttaggagagccatatggtttgcccccaaatttgtgttgtgttttcactagttttatgtgtctcaggaattgtatttaggccattttctacataatcctctgtcagacttcatataggaacttaatttcctcgcaggttttagaaatattaattatggattgtattaaaaacagtaccagctaacattcattaagcactaagtgctggacccttgcatttcatgtagaacttatctaatctttcaaggtagggtggatggagaagcatgggcatgtggctcttacagagacagtggggggcatggccaggttttacacacaggtcctttggctctagcccatgcacttaaccactatgctatagtgtgtatgcagagaatggtctagaaaaaggtctccattggtagggcacagccaattctgtcagttgaaatccttgattcctcctaaaatgaagttgattgttcattaaaatccaagtggctgctctcatgccagatgtagatcttgctcaaataatgagaactaagtaagagctccttgcagaaaatgttcttcagtggctggcagatagttcagtttgtttgaagtcaggcccagaattcattgtgacatgccttgatttatattaaatgtaaggagacctgacaactgtagaagttcgaatatttgtcattaatttcagctgtttaattaatttagcttctgtgtcgtgcagaatttgaaattttaaaagaaaaataattagaagtgaagtgaaaatgaagctttatttctgcaactataaattttcatatacagtaagatctggaaacatatgaattgttttmaaaggtgttatgtcaacttacttcatatgtatttagcaccagttttgtctgaactaaagtaatagtttttttaaaaatctatccaagattcccaatttacctctgtttctcttcccattcattcttacatgcctttattcaaaaactactgaatgtcttttattccctgaactggcttaagtacattaaagccccttaattactagtgcattgctgagttggcaggctatcacaaggaatgaaatcttaatggagtccacctatctgaaattcatagcctctgcccatatacttagcctgacaccagttttgggagagatataaactagatagtaggtgtgcatttaagcaggtaaaacattgagatggctaaggacgatagtggcgtcacatgtggtacattagatccaaaagaaagcaataaaagcattttgtcatttttggagaagatctagaatatgttagagtagctatcagccccaagggagacagtaatttaggctcctggtgcttgactcttaaaaagtagcttaatcatgaacagaagaaaatgatctgaagatcagatcctcagagccaatgtttcaactgtgttcctcagacatgcctcagaggccagttctacattgcaggtgggaggaggggctggaggagggagtcaatgaatgaaaacattttttccacttttagtttttcttaagtcttcctctgccacaataggaaatgaatagatactgtttaaaattgattaatcaagaagtagcatggtaaacatagtattttaaaagtggatataagaagaaaatgtgtagaaacctagaagaaaatgctaaaaaaaaaaaaaaaaaaaaaaaacccaaaaaacacactagaatggattccagttaagagcaagtctaagagtggggaagggaggcaaggcactgctgttttccatgtacatattacttttttaacagataaagtattttttaagaagaggacttacgcatttgtgttctgtatgtgctttgcatcctgcgcagatatctgctcacatttttaaaggagaccattccttggaagggaaaaataatcaggatattagtgacatttcacttcaaatgatacaagggctgaggcttgagaagtcaaatttctggcaggatgtttcccaattaaatcatttctgcctttggccattcatctggcattctctaaattattgcaggtacagaagctgcctccaaaaaaagagtaaaaaatgtaactgtgcaaaaattctgaaagagtctttacttaggagacaatttctctgatagtttctgtttatcctatagttatgccaattctaaataaaaattgctccctaactactctttttgatgttttctttttaaaacagggaaatgcacataaaatcatggagaaatgtacattaccattgactggaaagcaatgtgtcaaccgcattattactgaaaaggtaaaaagtgctttttctactattaccatgttttaagtaagcatttttagaaagttttgttaccttctaagagtgtattacaccagtagtcataggattaatttagtctgtgggcagaacgaataggaaagctcatcaatttaatgtttctaaatgtagaattctttatgtgcaactctttggaaacatgcaaacaaaactgaatcactgtccttggtaactttgacagtgtgctataatcagagaaaagttttattgatctttatattttgactattacagtgtcaggctggatggtgatatatgcaaagttatgaatatattatttctaccttttctaaatcacaagtagaaatttttggattttaagaaattcagtgtaagttgggtttttaattgtttcagtgcaaatcgtagtataggccccacagtaagccaagaaatgtattctgtttcttgcatgctttctgctctcttttatagagtagggtttcaaaacacacagtgactctctagattcttcttactagatggaacatattggtcagtagtacaactgaaagctgctcagaccagagaagcatcaccagcagctgtctgtcatcacccttctgactcagatttgaacctagtatgtcggaatgacttactgcttttaagtcagctgggagggtgtgttttcttgattcagtaccttgaagaagccacaaaacagaattatgtatatcaggttcttttagtgctgttccatttgccaagaacaatagcattagtgtcttggcattaatctgactcgctaacctcactgaggtgtgacagtgagcaccctaaagcaggctttgaagtgggctaggaggcttattattcccagaagccacttttaagggaggttctgtcctaaatgatgccttccccaggactacttatgtggaatgccatgaaggtaacatataaagaacaagataaaggggcagaatattttatcccaccatctattctgaatctttaccatttcttgaatccccctaaaactatgaacagggattgttgaaaagaatccattactttaaagataaaagcaaagcaatcttttaccctgttggttgtttgtttatttttaaataaagtggtagtccttctaaagataattccagaaacattcttcctgtgggtcctctcctccttccatcagccctctcctcatctccacatgtgccctgcccttgttcttaccagttcagttcttctacctgtcatagctcccacttgatcctcagcctccccaaatactacctgtcctttaaacctaatgcattttccctcttcatgatgaagaggttttgcaccatcatagcacacaacaatttattctcatagtggtccactgttcattttggcactcataatctaatgtattcttatgctataacttacattgatatttaactttactatcattttaaaaacttttgaaccagagtgttcccaacagtgtgctacagaaaggaggaaggcagagtctctgtcctaaaggacaacatggaagaagggtgagacaccaaacatccagcctttccagcagtcagagtaattgacatgataaaggccatatggagacacacgccagatgctaatctagggacatagagaaaagctgcccagcagtgtgggcagaggtgtcagggaaagatttttggtgttattaaatacaagcttttaacatatcttgtgaagcatttcacagtatgtaccttttctcctttagcctatttctctctgctttaactttctccctacttgagccatgctaaaatgctgtgaactacattccattcttccctggaccatgttcttttgagactttgcacatcctccttctctgtctggaacattcttcccaccccatccatctagctaatcttccctaatctagctaatctagcaagtcttccctatccctccccaaattttctgggtgcttctctgaatctttgtacttatcctaacttagcacaaaccactatactgaaataaactctaatctctgcctgtctggctcaccattgtttatctaacacttggcacagtgccaacccatactcagtgaatacttatgcttttcttgctgaaaaactggattgaatggtgagcctcgaaagagcagtaggaatttcataagttagaaagccaacaaggaccttctggaaaaaaggaagaaaacatgtagtcacagaggtatgaagaaaacatggcttgtcctataacctgcaagtggaactggttggagcaagggcatggctggattctgaaggctgaggtggaaaaggcagtgaggggtcaaataatggagggatgtagatgtcttgctaagaactgtgggtcttataaggaaggcagtaaggaacccttcagtgattttgttttaaggctggggacacaataaattagatttgcattagaaaaaacactgtaagcttttatgtaaagcggggagaaaagagataaggcagaagccagttaagaggattcatagacctaggcaaaaaatctcaaaattctaaaccataggacagatagagagatttgaaagagatttaggagatggactcgacctaacttgatgaattgcacattgttggtaagacagaggtgattcctaagttttctgactagagagaatagttgacctgtgtatcctttaggaagcccaggactgcaggaggagaaggggaaggataatacaagacatgaataggttcagtttggacagcctcagtgtgatattcttgggaatacccagtcagatattgcaataaacaattggagatttggatctagagctcaaaagagaagtcagtattggaataaacttgcgggtgtcattaacatatggggataattggagccttaattatagatgtatagcaagaatgagtaaagagaagagcatctacgtctggaacttttggtacgttaargaaaggaaggttgtgtgtttatcgctatgctctgtgcatagtaggtgctcaataaatacttgttgaatgagtaatgagaatgcagtgccattaagagcaatgaaggtctccagccctcactaacagtggactagaatgccattatcagatccagagaaaattccattcagttgccctttgaaagagaatttggaggatgctatgaccctgatttcctagttttgacctgctggaatgaggtaatgaaagatgcgttccttggttctgtttatatgctggattacatttattgatttgcatatgttgaaccaggcttgcatcccagggatgaagcccacttgatcatggtggataagctttttgatgtgctgctggattcggtttgccagtattttattgaggattttttgcatcgatgttcatcagggatgttggtctaaaattctctttttttgttgtgtctctgccaggctttggtgtcaggataatgctggcctcataaaatgagttagggaggattccttctttttctattgattcgagtagttttggaaggaatggtaccagctcctctttgtacctctggtagaattcggctgtgaatccatctggtcctggacgttttttggttggtaagccattaattattgcctcaatttcagagcctgttattggtctattcagagattcaacttcttcctggtttagtcttgggagggtgtatgtgtcgaggaatttatccatttcttctagactttctagtttatttgcgtagaggtgtttatagtattctctgatggtagtttgtatttctgtgggatcggtggtgatatcccctttatcattttttattgcgtctatttgattcttctctctttccttctttattagtcttgctagcggtctatcaattttgttgatcttttcaaaaaaccagctcctggattcactgattttttgaagggttttttgtgtctatttccttcagttctgctctgatcttagttatttcttgccttctgctagcttttgaatgtgtttgctcttgcttctctagttcttttaatcgtgatgttaggatgtcaattttagatckttcctgctttctcttgtgggcatttagtgctataaatttccctctacacactgctttgaatgtgtcccagagattctggtatgttgtgtctttgttctcattggtttcaaagaacatctttatttctgccttcatttcgttatgtacccagtagtcattcaggagcaggttgttcagtttccatgtagttgagtggttttgagtgagtttcttaatcctgagttctagtttgattgcactgtggtctgagagacagtttgttataatttgttttttttttacatttgctgaggagtgctttacttccaactatgtgatcagttttggaataggtgtggtgtggtgctgaaaataatgtatattctgttgatttggggtggagagttctgtagtatctattaggtccgcttggtgcagagttgagttcagttcctggatagcgttgttacctttctgtctcgttgatgtgtctaatgttgacagtggaatgtcccattattattgtgtggcagtctaagtctctttgtaggtctctaaggactgggtgctcctgtattgggtgcatatatatttaggatagttagctcttcttgttgaattgatccctttaccattatgtaatggccttctttgtctcttttgatctttgttggcttaaagtctgttttatcagagactaggattgcaacccctgcctttttttgtcagaaccaatgacaaaaaccgcatgattatctcaatagatgcagaaaaggcctttgacaaaattcgacaacacttcatgctaaaaactctcaataaattaggtattgatgggacgtatctcaaaataataagagctatctatgacaaacccacagccaatatcatactgaatgggcaaaaactagaagcatcccctttgaaaactggcacaagacagggatgctttctctcaccactcctattcaacatagtgttggaagttctggccagggcaatcaggcaggagaaggaaacaaagggtattcaattaggaaaagaggaagtcaaattgtccctgtttgcagatgacatgattgtatatctagaaaaccctatcatctcagcccaaaatctccttaagctgataagcaacttcagcaaagtctcaggatacaaaatgaatgtgcagaaatcacaagcattcttatacaccaataacaaacagagagccaaatcatgagtgaactcccattcacaattgcttcaaagagaataaaatacctaggaatccaacttacaagggacstgaaggacctcttcaaaccactgctcaatgaaatagaagaggatacaaacaaatggaagaacattccatgctcatgggtaggaagaatcagtatcgtgaaaatggccatactgcccaaggtaatttatagattcaatgctatccccatcaagctaccaatgactttcttcacagcattggaacaaactactttaaagttcatatggaaccaaaaaagagctcgcatttccaagtcaatactaagctaaaagaacaaagctggaggcatcaggctacctgacttcaaactatactacaaggctacagtaaccaaaacagcatggtactggtaccaaaacagagatatagaccaatggaacagaacagagccctcagaaataatgccacatatgtacaactatctgatctttgacaaacctgacaaaaacaagcaatggggaaaggattccctatttaataaatggtgctgggaaaactggctagccatatgtagaaagctgaaactggatcccttccttgcaccttatacaaaaattaattcaagatggattaaagagttaaatgttagacctaaaaccataaaaaccctagaagaaaacctaggcawyaccattcaggacataggcatgggcgaggacttcatgtgtaaaacaccaaaagcaatggcaacaaaagccaaaattgacaaatgggatctaattaaactaaagagtttctgcacagcaaaagaaactaccatcagagtgaacaggcaacctacagaatgggagaaaatttttacaatctacccatctgacaaagggctaatatccagaatctacaaagaacccaaacaaatttacaagaaaaaatcaaacaaccccatcaaaaagtgggtaaaggatatgaacagacacttctcaaaagaagacatttatgcagccaacagacacatgaaaaaatgctcatcatcactggccatcagagaaatgcaaatcaaagccacaatgagataccatctcacaccagttagaatggcaatcattaaaaagtcaggaaacaacaggtgctggagaggatgtggagaaataagaacacttttacactgttggtgggaccgtaaactagttcagccattgtggaagacagtgtggtgattcctcaaggatctagaattagaaataccatttgacccagccatcccattactgtgtatatacccaaaggattataaatcatgctgctataaagacacatgcacatgtatgtttattgtggcactattcacaatagcaaagacttggaaccaacccaaatgcccatcaatgatagactggattaagaaaatgcggcacatatacaccatggaatactatgcagccataaaaaaggatgagttcatgtcctttgtagggatatggatgaagctggacaccatcattctgatcaaactgtcacaaggacagaaaaccaaacactgcatgttctcataggtgagaattgaacaatgagaacacttggacacagggtggggaacatcacacactggggcctgttgtggggtggggggcaggggaagggatagcattaggagatatacctaatgttaaatgaagagttaatgggtgcagcacaccaacatggcacatgcatacatatgtaacaaacctgcacgttgtgcacgtgtaccctaaaacttaaagtgtaataaaaaaataaagtaaaataaaagaaagatgcattcctcaccagcacctgggctgtgattcactgttacccataatgtaagcttttgtcacggtgataaagtaattaacatttatctcttagacaaagtactttcagtattctggatagttgaacaatttattgtgacttttaggttttagtctccatttttgtcaattttttgtttgcaccttatatcactaaatggaaagtttcctaaatatttcaaaagtaagtttccttttttaaattatagatacttggttttctaatatatctaattaagatttgataaatgtgttaataaggtttttttaaaagcaatgtcaatttgccatagatttactctccctgattactgaagccttaaatttttgataccacagttatcttctctctaaatcatttccatgcctgttcttaataacttaatccagatgctctttttttcttatttgttcttttataaattgacagttgttcagaatgcaagaaaaagcaaatcatatgaatagtgctccagatacattttctgcaaagaaagtgttcattttaaaaaaatttaattgtcattttggaatgaagcaagctaatgagtatacaaacattcctaaattatccatttatttttttcctcttgaaacacacatttctgccaaaaaacttttttggaacataaaatgtacaagcaaaaggaaagtttactgaaatattttgtcttacatttcaaccctcttttccagtaatgtcaaccaggttatctgtgaattcttcagacaaaccaataatgcagttatcactggtcccagcgatgtgtgtttctggggaaaaatattaatcagctggagtcaataatcattccagggctttgatctggcatcacatataagtgagatgttaagctactaaggagtgaaaagtgaaaaaactgcttgtatgctgcccccactgtctcagggatggtgctcagagtatgttttcttatatttgtcctgtatcacaatcttgggaagtacatttttattatatatgtctacagatgcaaagacaggttcactaaaggttgcataacagttgtgcagcagagtggaattctcactgagctcaaaggccagggttcttttctctacgtgttgctgtgtcttgatattaccctcctagttaggagtgtattcaaaaatgacaattcaaggtttgacttccaagccaattgaaaaattggttaagcggtggctcactcctgtaatccttgcatcccaaaggaggccgaggcaggcaggtggatcacctgaggtcaggaatttgagaccagcctgaccaacatggtaaaacctcatctctactaaaaatacaaaaaattagctggatgtggtggggcatgcctgtaatcccagctactcaggaggctgaggcaagagaatcacttgaaccctggaggcagaggttgcagtgagcagagatcgggccattgcactccagcctgggtgacagagtgagactctgtctcaaaaaaaaaaaaaaagattctaggcctgcaaataatagttgaatttaggttaactgtagaggagaggaaagctctgggatgcataacattttagtctgagaaagaggaaactaaccatgagaactgaaagagggtacagtgcttaatatgctggagggtaactatagcatggagctaaagccataggagaagcagttttagctcttaaggtttgagcttcccttcagtaaacaatctgccttgaaataagtgagcctcctgccactgcaagtatctaagcagaacctcattgactatctgagaagaatgttttgaagaattcttgggtggaaggttatattaagtgacctcgtaggtcacttccacttgagttatatttctaagtgtgaaagcatgtgttctaaatcagatacaacaggtggggtctatctgctgaggtcaagccataccaattggcactaccaacacctgatgttacagaccagaatgatggaatgtttcaggtaagattggctttctggtgcttgccctaaatataagcatcttcatttgatttgcatagcaaagggagattcccatgctctctttttgagactatatgttttacaggacttaaggagaatattttaaacagttacttgcatgtctttcaggaccagggtagctatcctcttataattactcctagacacttcagagcaccttcttctgtttcctgtaattctttacccaatrtcatttataaacttttttcctgtcattcatgtgctttcaccttccaaatattccctttctctctccctctttcttcattcctttctttgttcaaatcattattaatcactaattgacctttgaccaaaagtgttagacttaacaaaagggaggtagtttttaaaaaactggttgcagtagtaacaaatgccatccatggtcaatgctcatttattttctggcatcaacactgttccacaactaattgctgattagggagttggcatttatcctcaccaaaatatcatagttacagttgacattttttcactgctgatttttcttttgtcctgggtcttgtstttccttttttttttttttttgagacagagtctggctctgtcgtccaggctggagtgcagtggcgtgatctcggctcactgcaagctccgcctctcgggttcacgccattctcctgcctcagcctcccaagtagctgggactacaggtgcctgccaccatgcccagctaatttttttttttttgtatttttagtagagacggggtttcaccgtgttagccaggatggtctcgatctcctgaccttgtgatccacccacctaagcctaccaaaatgctgggattataggcctgagccaccacacccgacctygtcgaacttgcgaggttatttctgttttgtgccatataataattattttgatggaaattgtcattgtcctttttcttcccactctgacaggctgtgtttgatgtggacaagaagaaagggttgactctgattgagctctgggaaggcctgacagtggatgacgtacagaagagtactgggtgtgattttgcagtaagtatttctgtgaacaaatccagacacttgtcttatattataggcttgattaatgggtgtttgcaggacatgaaccattaatttgtgatcatttttggagttgacctttacagtgaacaggagtagaaggaagggtgcctctagatgagagcaggtgggaacagagctgtgctctgactcactggccaaggtttggcttaggactcagaagcaggaaggggacacaccaccaggagctgctagaaacaaggttgagcttgagctctaagctactttatgttttgaaggcccttgtaatcccctgttctttggttatatggcagctgtgcttgaacttgattaactgaaaaatgttagccacatatggagaaatgatacttccttatttttaaacccatctatgacttatgactttctctaaattctatgccatatttcatccgttgaaaatattaaaatgttgggcctctgacatcaccaggttagtcatcacaaaacagacatgccctgtatttgaagataagtacataaaacagacttacaaagcagataaatacgtcaggggagtatccgtttaagaaacctccaaatccctttttaaaacagaatattactgagaatataaataattgctctttaatataagtgcttattcataaatcaatcacctagctaatggcattgaaagcatggctcagtctatttgaagttaaccaaaagtaaaactaaaatgtctctgaagaaatgaaggaaagtgtattagtccattctcacagagctaacaaagacagcataagattgggtagtttatagagaaaaagaggtttgatggactcaggtccacatggctggggaggcctcacaatcatggcagaaggtgaaggagaagcaaaggcacgtcttatgtggcagcaagcaagagagtgtgtgcagggaaactgccctttataaaaccatcagatcaaagacttactcactatcacaagaacagcatgtgaaaaacccacccccatgattcagttacctcccaccaggtccctcccgtgacacaaggggattatgggagctccaaatcaagatgagatttgggtggggacacagccaaaccatatcagaaagggatattattctcatacctatttaagaaccaatctaattaaaatgaaatatatttataatgagaagaaaatatgttaatgttacagctacacatcttggagaaactaatttaacaaaagttatttgataagtcatacatatattgtatgtatgtctttcttgtgtactacatgctttgcttgtacctatcagtgcataacacattttttttttaagacggagtcttgttctgttgcccaggctggagtgcagtggcgcgatcttggctcattgcaagctccgcctcccaggttcacaccattctcctgcctcagcctccccagcagctgggactacaggcacatgccgccacgcccggctaattttttgtatttttagtagagatggggtttcaccgtgctagccaggatggtctcgatctcctgaccttgtgatctgcccgcctcggcctcccaaagtgctgggattacaggcgtgagccaccgtgcccggcctacacatttctctaaaaacgatttttgtttcatagttcattatccatataataactgttcctggtactctaccaaggtctttgtctattaactttttttgaatgtccctttggaaaaagaagtctcccagtaatacctttcatgaaaagcacatctttaattagcctttcaataacctcaaggggaaggatatgcttatactttaactatttaggatttctcactccagtgagaaaagcaaacaatctgtattatttttttctatgtggaagaattaacctcttcatcagataacattttcaagatccacagaatgttcagtttttttttgcagcaaaagagaatgtacaaaggaagacctggttatctagttctttttttattcatgtgggtaaataaggaatgaaaatatgagtttttactgttcttgctttgttttccaataaaaggtgctgttccaatggaaaatatctctgtagaccctctcaatttcagtaccatctcttcttttcacagggatatgtaatcttgttttctccaaattaggatgttgagatgaaatgttaatttgtatgtcaatgttgtcctgagaatgaaaaggtatggtatcaatggaaccatccagaggactagcttttgagcatctgacgatcaatggcatctctttacactctgacagatgaaatcacatataacaggttgttttctgtaaggctagagctggagtgccctaattaataaaatgttctacttaatacctggattatcaataaggatacatttaattacaaaagtacattgaagatagcatttctttcttgacaattcagaagacattccatgtcctaatttagaaaatattccctgtggttatcactgcatagctagcattgtactccatatgtgactatacactagttgctcaagttctgtttgagaaaagtccctagaactcagccttcaactggcagtcaacattctagaagggaatgattggccagtgttgcctcataaagaaaaaaaggtaaaatcctagtgcaaaacaatttaaaatgtgttggtaaaagtcctgtatccctaaggatatgggcaagtgaatgggcaaaagctacattatgtggatattagctggttgggaaaatactgggaattccaaagtaaaagactaaatatgacagcatcagataacaggacgtgacaaaattttggttttaggatatcaaaaaagaatgatagtgaaatatttgggcactgttaaaaaaaagaattactaagactttttcatatatatcatagtgttattagccataataaaaaagtggaaaaaatatgatttttaatcacatgaaacataactttaaaaaacctgtaatgactgtcacagttttgttcatgattttgtatcaactgaaagttggagttttccatcggagggcagtatcttgaaggtcatatatgtctggaacttggtagaggctgtggaaattttgttgtagaaatgcaaatattgattatatttctggaacctgaaggttcacacacccaaaataagattctggtcagkagctgtttacagctagagaagccaaccatatgattactctcccttaaaatgtagatgctatgacgatagggactttgctgtttcttggggattgagtgctgaatcccttgagagaaaggagctgaacaggtagaggtaaaagtattactattatacaggctagagtgagggatgtggcctaggtgtacagccacagcaggcttttcagttgtgaaccccacagatacagaggctttggctccccagtgtaggcagcaccagagaaacccaggcctcccacaagggtagccttcattgctgagcttccatccacatggctgagagcaaaacagagcattgctttctaggtgaagacctcaatgaagaggaagagtcatgctgagtttcacatgttaaggttcctctgcccaaataatcatttaattacatcaataagggacacaccggaggtcagggtagttacatgaatagataggtgtccttccacatggaatggaatatgagaagtggggaataaaggctcccctgtccccagcgctattggtagagccttgtatgtatgttcatgctctacaaatgcttgtgatgctgttcagtaatgctttcctatttttaaataactggtaaaaactttaaaaaaatttaccatcttaaccatgtttaagtgtacaatgcagtaatattaagtgtattcacattgttatacaacagatctctagaacttttataacttgcagctctgaaactactcattaaacactaattccacagcctttggcaaccactgtttttgctttctgtttctatcattttgactattctagatacctcatatgagtggagttatacagtatttgcccttttgtgactggcttattttgcttagcataatgtattcagggttcatctgtgttgtagcatgtatgacaggattatcttctttttaaggctgtataatatttcrttgtgcatatataccacactttcatgacccactcatctgttggtagacatttgggttgcttccaccacttggctactgtgaatagtgctgcaaagaacatggatgtgcaaatatctctttgacattctgctttgaaattttttagatatataattcagaatttggattgctggatcatatgataattctatttttaattttttgtggaactgccatactgtttcacaatgtttgccccgttttacattcccactgttggtgcacaggggttctaatttctccatatctttgccaacagttatcttctgtttaatagtggccattctaatggctgtgaggtgatatctcattgtggttttgatttgcatttatctggtgatgttctcaaagtttctcatatattctggatgctaatctcttatcagatgatttttgaatgttcttttccatttcataggttgctttttcactgttttctttgacacatggaagtttttaagttcgatatagtcttctgtctgtcttttatgctactagggcccaacattttcacaactaaggaatcctttggcttatttttctcccattgtcctcagattttgaaagaagtctgtctctcaaatatttaaagaatcaaaatgatgtcgtattaaagcttgacaagctaatgagtatgtcaaatttctttattttttggctatacttaacagcatgcagtatgccagttacttgatgggcgaaagtattaggttgatgcaaaagtaattgtggtttaataaatggttttgccattgaaaataacggctttcaattggttatttgggttgtttcttttctgatgaatgcttaagctatgtaaaataggtgtttttataaaccatatgtctgtggacctcttttgaaacaatatttctttgattttatcttcttaacttaaaaaattaaaaatgtattccatatttaaacattatgtgttagaataaacttccagatgtcactagtcatacacccaatgtatgttccatattgagctgtaaaatatgaataaaatagaaccaatttatggttcttgctcccaagagccttggctttattctccaggcaggaatatacctaaaccaccagtggcaaaacaaacaaacaaataaaaaactagtaaaagcaatgtttgttgatatgtttgcagtggaatctgaaagaagctgcagacattccttgcctaattgaataaatttatactctcagtatctactatgaactggcattctaccagagtcaagcaatatacttttgggatattaatgcactgggaagacaaatcattggcttgtcttctatagctaaatcatgtcaccttgtgcttagcctgcagatcacgttggcagaataagctcctttggcttgcatgaatttacaacgttgatgagactgggagaacagaatgagaaatggtggtttagtagatgtttttcattaaaaagcaggcaaagtcagtctatataaagcgttatcttatttttgatgtcatttttcacattgagaatgtaaatgacattaagagctcaaaatagggctgacatgacaaggaaaaggatcagatgtttagttaaaaaaattaatgtgtccagtttctttttaaaggaagtgctatgaagcatctatagaaaatgatttgtagtaaaaaagtttcactaaattgggccaggcacggtggcttacgcctgtaatcccagcactttgggaggctgaggcaggtggatcacctgaggtcgggagttcaagaccagccttaccaacatggagaaaccccgtctctactaaatatacaaaaattagctggtcatggtggcacatgcctgtaatcccagctacttgggaggctaaggcaggagaatcgcttgaacccaggaggcggaggttgcggtgagccaagatcgcgccattgcactccagcctgggcaacaagagcaaaactccgtctcaaaaaaaaaaaaaaaaaaagtttcactaaattatttccacagatgctctgttgtttaaaaaaaagaaagaaaatgaactgtgagatatacttatctaaatactaaatgttattattagtagagttgaaaatctgtgcgtatgtgtgatgttactttttgtctacttattctgtttattttgtctgtatgtctactcttagaaataagtcataatgcgttctcatttaccataagctatataccaaatcatgctgaactttattattattgtttattcttatttattcttttagtagacatttttgccattctggtttaatattttagtacaaaaatggaagacaagacattaactcttgatactatgaagagttaattgtgaagagctaatgcagacatttataaatgaactaaaactatttaaccttatgaaagccaaatgactgcctgttctttcagtttttaatactgatgatttaacctctattaggaacctcccttctagttctttgaaacttatataattatctacttattcattcatttgttcatttatcaatttaagaaaatattgtttattctggaaggtaaaatgctaattgggctcattttgattgccacatctttcagaatttcaaaaagcacccaatttttggtatttcctgcttcccatggggactgttactaactagaacccaatcaatatttgccatgttgaattaaggaatctgaacctggtaccacactttgaaaaatctgtctcagttaaactgaccacttatatttatggttctcctgcaaccggctctaccttaaatatacattcattgtcacttttctctgcttgcagattcgcaggaaagcattgactgttttatacactgaacataattataatcaacatttaattgttttaatgctattacttccatattttaataacttggaatcctcttattgcctttgtatcatttctattctgattatgaaatttccgataagatttatcattgatcatacgtctcttcattaatatgtatttaggtaatccaaagattacataaagcatctttcaacaaaattatgaattggctggatctattttgaggttttggagacttggggtttgtactgcgtcttaagtgaagtctcagaggcatcagtctcggagatcagtgatccatctgacagggggcttggttattgggatcctttgttttcctctgctcctcttccacctgctccttgttgccagccttgttcatccttaatttaggagctaatacaagaaggttgagaactacaaaatacccaaaatgtaaacagaactgttctgtctcaatgtttcaggatggaaaatcatatggaaactccagggaatgtccatggcaaggctgcttgttgcctacatgattgaaatttggaaattaaaaggagagagatttatatcatgcagtttttcataatttgatttttttttcctcttttaccaggtttcaccaaaactcatgccaatgcagcagatcgcaaattgaaatatggatatttgtaccaggctgcgtgtttttcattttaaacacacaagatttaattgaaaggacatcaataatcataattgtgtatttaacaggtggttttttattagttttcttgtgtttcagactttatgcagccatataaactgttctctaggcatgctgtgacattttaataaaaagcaaaaggagcatttataattatctcatttgttaaggctgagaaggttgtttttataataggtaattatattgaatgcattttcactgaatatggtatgtatgctaaattatatgaacctttccccaagaagggccctagaaattgatgtggctttcctcttaaatattaattattagtcctgaaagaaagataacatatgtgatttttgtggttaggagagttgctgtcatgattgttttttcttcagcctcctctgacttttcttttggggcttcagattttatgattacatcttgtccccctagaacatcccccttcctcccatactgcttttaaacagatgcccaagaaggcaagcaggaatgcctcttgtgggggagggcagggagaaataactagttcaaaccaactatctatctatgctttgcaaagactaaggcgtattataggaagagggctagaaacctaactgattcttctcagttttctcattttaaaacagcccagtattcctttgtatcctcaagggtccttgagaatacttctgttattgagaccctgtgggctacttgtactgtacctcctctcaagccaagaagggctgtgggataatttaccatgaatccttagtagcaatgacagcagagttaaaaaataaaaggtgttttactttcaggctcttgttttggttcagaggagattttaaatattgaatgacacttctacagaacaacggtttttcttctgccaaggctacttcctttaacgaagtgcctttaattcagccttatccaactagggaaaataatgttggacaagtctaggatttgaagagtcagtgaacttttagtgtcagggaataaacatggtgggtagattaggtttgaaaaaaacttccttagaggtatttattctcaatacctgacaggggcccatgggaatgacttcagaagcatcccggataatagatgggtaaaaagtctaggcaccctgaagaacaggtgagacagctggcctctggacagaggtaggcatagtacagtacgatatatcattcctctggtcctaaatatacaaacttattcatgtttttaggtgatgatggtcattgaaactcacttcttttcaggtgtagctacaattgtgtaatgtacaatattagagaaaggacaggctttttatgagtaacacacaccatatataaaacagcctttctggctgaccacatggttaaatgcataccttcccagtactgggggkaaaaaatgacccttcttagaatgtgcaagttccatgagagtaatatattgatatgattttgaaaagaattgttgatagttacatcttcaaacttatcattccagtatgcatctttaagataatgtgattctaagtagatgactttatattcttgattraagagtgctatacatgttaagaaatgcattaaggaatacaataaatattctaaagtgatgtagatcagtgtgactgtcctttatttcacttgggaatggcattgctaaatgtgggaataatgcaacagattgtcagggtagctaacaataaagtcagcacacatcaccacttcttttttttttccttttttttaaattatactttaagttctagggtacatgtgcacaatgtgcaagtttgttacatatgtatacatgtgccatgttggtgtgccaacatgctaatggtgtgccattaactcgtcatttacattaggtatatcttctaatgctatccctccccccttcccccaccccatgacaggccccggtgtgtgatgttccccttcctgtgtccaagggttctcattgttcagttcccacctatgagtgagaacgtgcggtgtttggttgtttgtccttgcaatagtttgctgagaatgacggtttccagcttcatccatgtccctacaaaggacataaactcatccttttttatggctgcatagtattccatggtgtatatgtgccacattttcttgatccagtctatcattgatggacatttgggttggttccaagtctttgctattgtgaatagtgccacaataaacatacgcacatcaccacttctagtcaagttgttgcttttctttttatcttaccagagaaaagatattgttcttctagaaagatcaagtgaacattgagtttcacaacttgctccttgtcagaggctgctatgtttacaaaaatcatttatccaaggcttcatgtgtgaatccttgttcactttttgtgtaacattttcctttactgtacacattagttgcctggtgctgtgagtttatttccattttgaagtggctctagtggtagtctgctcagcatctgttttgctgctcctctggtaacaaaggggtgggcacgtccccaggatttgctacttccggtagctgtccttggtcgacagtggttatacccagagttgtgcatatgaccaaggatgtaccagtttatttctccaacatttaaaaaacagatgagaagtcaactttcttactcctctcgggctatgaagccataagaatgtgaatctgacaccaataccccacatgtctgctacacacatgcacatacctagctgagctccagctggagagaaagaaactgatacacaaaacatggagctgtataggaagtatgtcagtgggggcattctggtggtatttggatagatggttctggaagtgcctaaggccaacttccctccagccgtgcctggatagagttcataaatctttttgcttgagcagagtttttgtcacctgtaagcacagtgaaatcatacagctttggtaattctttttcgccacggtgtctcactctgtcacctaggttggagtgcagtggcacaatcacggctcactgcagccttagcctcctgggctcaagtgattcttccactttagcttcctgagtacctgagactataggtatgcactaccacacttgactaatttattttttgtagaaacggagtgtcactatgctgcccacgcttgcctggaactcctggcctcaagtgatcttcctgcctcagtcacccatagtgctgggattacaggcatgacccaacatgcatgccataattcttgagttctgagagggacctggtctcctagagaagttatgcagaatatgagcaaaactgctcgtacctagtcccagagaacacaagagcatttctgggtatttacagtgagtagggaggttatgagtagaagttcattctcttccaatctcagtatattcagcaaaagtttgggatgttatttcaatggaagtataagcaaaaatttaatcaataaatgggtttctttggcactgacttccttttctcagggtgtgatcttgagtttcttaagcttatttttagatcctccatctttaaaataggggagaatacactgttttccactgtggttctataagatgtaattaaaatatctggctgtaaaactgacatcttttaaaaatgctgtgccatcatattaccttggagacagaattgtttattgttcctgtcgttttatttaatgactacactgccttcccactggagacaatactgaatatcaaagtggatttaagtataaataccaataagtgtatgtgatctgagtgcacatttatgtgacatatttgaagatcctgcctctataaagttagacacatctgtgtaaaatcatccaaacaccccttgtggatcacgcagcagcttccatgagcatgatgcctacaacactccagataactaattggtaattcctttgtctagggaaacaaatatgtttgattgtagtcattatcacccctcatggggagccactctggatggtcctgttggaaagggcctcaggcaactctaccttgactcttgcatggcccacagtgtgtatgttggaaacacacctatttctgctgacaaactacaggatgccagatgcccaacacagccatttttttgtttttggctcactcctaaacaccaggtattctatctcttgccctttaaagtttttaagaggaaatcagacagttccagaagctggcatataaaaccttggtgttcccttggaagaccctctgtcttaatgtggggatagaaggtagcttctcccattttgcattcttggggttggagtactcaactctccaaactgtttctgtaattgctcgttaatatttattgaatcaatttgctggttgaaaacagcaaatttagctgaggagttccctcagctgaataattaggtaagaccttaggaagaggtaagaaaagaaaaagaaacgaggtggaatatggagggcataacacaggaataaagagacctgcgatggtcacatgtttaacacttgataatttataaagtacccaaaatatgctagctagcttatttgattctcgtaataacctgccagggagacattattacctccattaaaattaacttgattagttggaaagaagtaatgtctgtcagttctttaatcaaattagcttttcagggctaatgttggattttgccaaggtagttaatgagacgtgaattaaatcccctgaacagaactagatttgtggctctttggtaagctataaaacagagtccaaattctctaaacctaatggaacaaatattcaaattttgttccctctgccctcacagctcttatacacaacccagtttataaggaaatgggtagttgtcaagtaaaaacgatgatgccacccaccaggcaaaatgtccccatggaagacttgtaattacccaatgtgcttacatgaaaggttctatgtaggtaagcatgctcacctgacatcaaccagagggacggacacactttgctttgtctttgtggctgagcaactttctgaaattgtttgtttgcaattaacctttacccacgttcaaagtcagagttgtagttaagactaattcagttgagtcccagaaataaagctaagattgttaccaaactgaacatgggttacctgcttgacacagcaaagccaaacactgatattgggatatgcagcaagaaaacgtgaggtatttattgcagggcagcaagcaaggagaattaggcagctcatgcctaggacccatactcttcaatggcttaaatgtaagggtttttaaagacaagatgacagaggttacaggtgaagtcataagtcaatacatggaggctgtacattggtgtagcctaaaaaggcaggacatcttgaagcagggcccataggtcataggtggattcaaagattttctgatttgcccttggttaagctttgcttaaaaacttggggtcagtagaaaaaaagtgttaagctctggcctgtgggcatgacttcctccaggcccctcaggaagaaattcagaatgaggaacattggtcagagttcagccctcagttccctagtatctgaggtctgtgtgccagcaaagagcattttccatgtgttggggatctgggtttctgaaaaacaactcagaggcataaataaagatgttctcttgagtttctatagggaaccaaatatttcgttgctctcacttctttggctgttttaagctatatttacctttttgcttaacaggttgctcataaggctagctagccacttctcaaggatagctaggtgcctgggattttccttgaagggactccaggttttcttttatttctatgctctgtgggcccatcaggcctcaaagaggggtccctgctccatctcaatatttgtatcctgaaagtaaatgttacaggtgacatagaggaatgctcagtgagatctaatagtttcctccaacaggaaagacaggatccatggaaagaagaaaactggtcatggcactggagcctgtggagtggggttggggttggggttggagtaagaaggcattagggttcagcaagacacactttatatgaaacatttaagtgttattatcgtattttctttaaatgttaagacagcatcaattttaaaatgcactatgattttgtttactttcttatcacttagaaattttattgtgtagatactaagattttttagacttctcctcagtcccagatgagttcaccaattagtccctgcctgtttaaggcaaagaagagtcattaatggatgccttgtgcagctgataggcattgcaagcagttaatgacccaagaaaattgaccagtcttgaagtctgtgcatttgcaatccaggagtttatcactgacaagaggggtcaaatggtcaaagggacagggtcagggtggggatcaggtcaggagaagggtggaggtgtggggagctggtgcctgcctcagctccccctctggaacagtagtgcaaccagaggccaagggtgccaagacaattgtagtgtgccaccatttgtgagatgcatctcaatttcagaggtgataaaatgtggaaaattgtttatctttgctaaaatcagtgaattgcagggagtcctctcaggcctttctgaattggcataatgtttgatttacgaatattttaaagacacatcttgtcattacattctattacatacagcactgattgcataggaaataatccctaaggacctctttcacaaataagagttggtaattatattagtgtgtatgtaaataagtgcttaaaaatggttcccccagcaatccaagtgttcattatggaaactttccatcatgatttgccttccaggtttgtctctgtgtcctcctaaccttttcctctcacacccatcttttctatacacacaatttctgtttcaggtatataaaagttttgcctgtaatcccagcactttgggaggctgaggcaggtggatcacttgaggtcaggagtttgagaccagccttaccaacatggcaaaaccccatctctactaaaaatacaaaattagctgggcgtgggtcatgcctgtaatcccagctacttgggaggctaaggcaggagaatcgcttgaacctgggaggcagaggttgcagtgagctgagatcgtgccattgcactcaagcctaggcaaaaagagtgaaactccaactcaaaaaaagaaaagtttatctgtgaaaaagtttgaatactggggtgggtgcagtggctcatgcctgtaatcccagcactttgggaggccgaggcaggtggatagcttgagctcaggagtttgaaaccaggttgggcaagacatggtgaaacctcatctctaccaaaaatacaaaaaaattagctgggcatgatgacactcacctgtagtcccagctacttgaggggttgaggtgggaggatcgcttgagtccaggaggtcaaggccacagtgagctgagattgcaccactgcactccagcatgggtgacaaagtgagaccctgtctcaaaaaaaaaaataaaaagaaaaatttttaatgttgtaattaaagatatttaacatggtatagatactcaaatata

SEQ ID NO: 95689 - DNA, 19550 bp, Homo sapiens
  misc_feature (1)...(19550): n = A,T,C or G
aaatgcatggtaatgtaacatacatccaggaaaatgcacaaaccttagtgaacagcgggatgaattattgcaatgcgaacacacccatgtaaccaacaccaaacagacagaacatcagcagcactgcctgaaggaagacctctagtaaccccctctaatcagcatgcacagccgtggggaacgctgtcctgacttgtgaaatcacacatgagcttgactattgtggaacgtcgtagcaatggagtctcacactctgtgctcttttgtgtctggctttatttttcgttctatgcttgtgggattcatccatgtccttgtgtgtcattgtggtttgttgacatggtgttctcatcggttgactataccgccacaggtctctccattctactgttgacaggcatttggggggactctcgtttaatccatttcctttgattcaggtggagaaaagtgggtcactctcccacaaaagctaatctctccctcctccctctttcccgccctggggaagcccttctcctttgcttccctctgatcttgcaaacctgtgggaatttggagcttcatttcagatacactctggcaggctttcatggtgaatggaacccgggcaatgggactcttctggtcaacagggctttgcacgggaggtctcctgccatgggctgagaggatgtgctgtcacctaggggggtattcttaggaagtgagaaagagggtccactttcttctggtctgcagcgagggtgggggcagccaacttctagactctgccagctcttctggctttcacggttgtctatgctgggcgggtaagagaattcatatggcagtgctccaagacacagtgactcatccatggaatggagattatgacagtacctacttagacttattatatgtggagttcttagggcagtaccccccccaccccacagtaaggcgggctccagcagagctgtggtctaacccaaactctgctgtgtacctgctgtgtgaccctggtcaagtttctaacctctctgagctccagcttcctcacctgtaatatgggaatagcagtgtcttcttcatggtgtggctgtgaaaatcaaatgacataagaactcaggtcctgacatatggtagaaactcagtcggcagtagctatttctaacagagtttcccctctcagcatctgatagccttcctgttcccttccaccctccacctggagagcttgccaggttgtggcttaacagtatcatcaatgtttttccaactgttgccagggaagtaaaaacacacagacttgctgatatgtcccaagaaacaacgaggcccaatagatactaagacctgctgatgggcagaagcaagggggtttcaaattcacagactttcagagaaaggaaaagccatggaaacctttatatattcatcctcattgttaattcttcaaatgcaaattatataatgcctttttttcttgagatagggtatcgctctgtcgcccaggctgaaagaagtgcagtggcatgatcgtggctcactacagcctcaaactcctgggatcaagcaatccttccacctcagcctcctgagtagctgagactacaagcccacatcaccatgtgccgtgaattttacttcctcttcttcttttttttttttttttttttgagatacggtctcactctgtcacctaggctggagtgcaatggctcgatctcggctgactaaagccttgacctcctgggctcaagtgatccacccacctcagcttctcgagtagctgggattacaggcacacaagaccatgcctggctaatttttgtattttttgtagaaacagggtttcaccatgttggctaggctggtctcgaattcctggtctcaaacaatccgcccacctcggcctcccaaagttctgggattacaggcatgagccaccgtgtccgacctcccagctaacttttaactttttagtggagatggggtttcaccatgttgcccaggctggtcttgaactcctgggctcaagagacccacccacctcagcctcctaaagtgccgggattacaggtgtgagccaccacacccagcctccaaaaatctttatgtcttctgacccagaaatttcacttctggaaatctatactaaagaaaccatcaaacaatagaaaaatgcccagcaatgacacaaacgacagaattagtagttggaggacattgaaagttataactacagttgtcctcctttatcttcaggggatacattccaagacccccagcggctgtctgaaagcacggataggacccaaccctatatagactacattttttcatacatgagccatacaaatctatggtaaagtttaatttataaattaggcatggtaagagattaataatgatgactaataataaaatagaacaattatgacaatatactataataaaagttatgtgaatgtggtctctctttctctttcaagagagagtcacagccagtgtcacggctgggcactgtggctcatgcctgtaatcacagcactttgggagatcaaggtgggcagatcacgaggtcaggagttcgagcctgaccaacatgatgagaccctgtctctactaaaaatacaaaaattatctgggtatggtggtgcatgcctgtagtcccagctactcgggaggctgaggcaggggaatcacttgaacctgggaggcagaggttgtggtgagccaagactgtaccactgcactccagcctggcgacagagcgagactccatctcaaacaaacaaacaaacaaacaaacaaaaaacctcagtgacctgtataccacaggtcactgaaactgtggaaagagaaactgccaggaaactgataaaggggaactactgtagattctctatgtttaaggatataaaagaagccagggacagtggctcacgcctgcaatcccagaattttgtgaggccaaggtgggttgatcacctgaggttaggagttcgagaccagcctggccaacatagtaaaaccttgtctctactaaaaatacaaaaattagctcggcatgggcacatgcctgtagtcccagctactcgggaggctgaggcacaagaatggcttgaacctcgggggtggaggttgcagcgagctgagatcataccactgcactccaacctgggcaacagagcaagactccatctcaaaaaaatttttttttaatttgaaaaaacaaagaaagatgagcatgttaaggagaagcacagaaaatatttaaaagacccagattaaatttatagagaggaccaaatgcactgagatgggaaaaaaacaatggatagtattaacagcagatcagagaatgcaggagaaaaggttagttactccacttattttaagcagtgatgatgagggtgatgatgatgatgaggaggaggaggacgggagtcactgcagccgacatttattggtctctagctgtggaccaaaccctgttcaagtatcatcttttcatcctcactgtaacgctatgaagtaggtactgtcatcacccctgtcttacataggagcaagaggaagacacggagttaataatcagcttgctccaagttaaacagccagaacatcagggaggccaggctgttaacccagtcagtctgggtttgaatcccatctccccagtcctcttaacctcccatgttgtggttactgtaatggcattccctagatcggtgaggcttggtgccatgtgctttatggacattgtatctaaatctcacagccatcagggaagggagggactgttgaccccattttgcagatgaagaaaccaaggttcctggaggtgaagtaatttgcctagggtcccacagttggtaagagaaggagccaggatttgaaccagatctgtctgatcccaaaccttgcctgttggatgtgccctggggcttctggatatgtctgaggtaactctgaagatggggcttttgaggacgctttgtagcaccaatatggtgccttctctccctttagggaaaagtcttctggaatcaacaaagggcttgtggctacttttgctcccatccctccataccagatggagggtggcgtgagttctgacaggtagccacgtggcccgccaagagtccctgtctggaggattgtctatagggtaaggtaccacactggtaagtgcacaagactattgagcctacatgggagggggtgcatcaaaaaatgtgccagaggcatctgctttgcttgctgttgaattactttgtatgtagattgttgacacacatatgagctggtcagttggttgactgagtcaaggaacaaaggcaataatcagatttaaaagggagggaagagaagacagagagagggaagctcctagcagtggctgctgctggcatattcttttggatgagctgatttgctggtaacagaggtcagcctgggcattctgtccttagacagccatctaacaggcatcaaagctgtgggaacaaggttctcggtggagccccagtggctgaccttctctgtgtcgtggccatgtgtgtcctcccgtcagctcctccacccaagttgggccggcttcaccccatttgcctcattaggattctcacatgtaaactagggcagaccttctgtagggtaagttgtcaacacatatcaattgcctgccttcaaattgtgtgtgtgctttgattcagcaagtctacattaggagtagatcctatggaagcaattctggacatgaactgactgaaatttggccttctttcactctacagtctagattagtaaaaaaatatcagaagccacccatatatccatcaatggggcttcattagataaatggtatagcagtataataatatatataatagtataatgaaataggaacctgcctttttctttttgagacggagtcttgctctgtcgcccaggctgcagtgcagtggcacaatctcagctcactgcaacctctgcctcctgagttcaagcaagtctctgcctcagcctcccgagtagctgggattagaggtgcctgccaccaggccggctaatttttgtagttttagtagagatggggtttcaccatcttggccaggctggtcttaaactcctgacttcgtgatccacccgcctcgggctcccaaagtgctaggattaccatcacgagccaccgtgcccagccaggaacctgcctttcacaatgttactagagaggaatatttagtgacatagaaatatgtgcaagttatatcagcaaatgaaaaaataggctacgaagctctgcatatataacattttcctaatttggttggggaaaagtatggagagagagagagacagaaagagagacaggcagcaacgggaccacagagggacgtacaccaaaatgtcaatggtgcttaataggtttgcaggtgattttaagtttattgtttaggttttccaaatcttctacactgagtgtatgtttcttttatcaaaaagggcatggtggggaagctaaggcatggtgctcacacctgcaaccccagcactttgggaggttgaggcgagatgattgtttgaggccaggagttcgagagcagcctgggcaacatagtcttgtcttaaaaaaaaattgccaggcatagtggctcatgcctgtggtctcagcttcttggaaagctgaggcaggaggattgcctgagcccaggaggtcgaggttacagtgagctatgatcattctactgcactccagcctgagtgacagagtaagaccctatctcaaaatatatatatatatatgaatataaataaataaatacattaaataaatagaaaaaaaatgtgtttaaaacaaaacaaaacaaaacaaaactccccagtgccagaaaagtggaagtgaaagaagcatgtgttgcctccatgagagtgggggctgggagggagggctgggcaaggctgggtggggtgcatctgatataagggggcagcctgcatggaaagggactgccagcatctgcctccactgctctgtgctgggatcatggaacttgcactgctgtgtgggctggtggtgatggctggtgagtcggggacgggacccaggctgggaagggaaggagggaggccagtgtacccctgtgctctctttcccagattagggggctgctgctctgatccccaggagcctggcccccactccccaatccttctgcccctctgcaaagagccttcagtggccgtcagtctcctagcatggtagcttcagccagagagctctggctggccaagctgtgctgcacrtctctggactgctgtgaaagttcaaactagaagtccagcaccagggtctgctgggcccatgatgatgacgctttggacacaggtcacttcacccctacctctcccactgaataggagcaacccgtacgaatgcatagcactccatatttttagagccgtttcatgttcatgatctgccttgaacctgggaagagggttcccttgactttcggtgaagagggggcaatttccatttgatcttaagcagaccaaatataaagtgcagttgctagcaaattggcctttttgtcctcaatccatctcaaaattgtgattttggaaaagacttgcattttaaaatgtagttttatgttatcttgggactctgaaattctctagaggaacatgtctccaggattacagcaaaaaccattaggaaatttgcaattgagctgcaaaaattcatctctcagatgtaaagagggaagacactgtagagatcaaatacacagatgaacctgcagtcaaatgcaggccccgccatctcttagcagtatgactttagccaaatcaccaaacctttcaatatcctcatctgtaaaatgggtacaacccccttcacagggctgttagagggactctaatgggaaaacagacactaagtgttgagtaaacttaaataatagcttcacacatggcacatgcatgaaagatggcagtggcacctcctcccacccactgtgtccatcccttgggagaaggagcttcacccctgtcagtggcagccaagggtaggaaaagttacccaggcaagaacggctgacaagctaagccagttcatcaacacctccccagccacagctccagctccgtttctcaggctgggtcctcctcaccttaaaattatggcaagtaagaccacccgaaagcattctgaatcaaagctgaatgtatttttcacatggmaagaaagagctgcatcattcaggtgtgagttcagtttatgtatttctgagcccagattgaaagggctatatttagggcaaaaaaaagaggaccggggtaccctaagaaaggcaagattctgaacgcggggctctggttgatctgcaaggtggactctccgtttgcagttgggttccttatcatggaatctaggaatctctgatggattgtgtatgattccagagggcccgggatccttcaccagtgcagccaaagcttagcaagtcttctcttgtacatgtcttaacagctagaggcaccatgtcaaacaggcrtggcaacatggactcccacacattgaggggacgtactggggacatgatggcccagtcactttgagttgcaacccaaggccacctgtgtgtggtctcactctttgtccactgcatgagtttctcccaaccacccttcccagcccaacggtccccaatgtgtggctcacccactgtgtactattgacttcatttgcctgaggttgggtgcgggttccataagtaaactcactcgaagaggggctgcccagcccagtctccctgagactctgggctccatcgggacgtgtgctccctgcattctctaatcatctctaggagttgcacacaggcacagctccattcccttctgccatctgtttctcccaacctcccacttgaattcatggacttaatatattttatttctcctaactcaacataatgcattcctctcttccagtaaaataaattccccttactatcaattctaatcagcagttattatgagtgaaataaaattatccatgaaaagcactgatttctaaatcatgctgcctcccagaagacccacacactctctttattacagactcagatttttctaggggctggaggtaagaagggtgacttgggaccattcttcctattatggagtgggaaatcaacacccagagacagagaatgaaaccagactgttgtaaatgatgaattctggctccatttaccagccactaagactctgagcaagttactgagcctcaaactgctcatctgtaaaatagggtttaaaaataatattcattgtaccagtgttggttttaacaaatgaatcacaagtaagatgataacatttgaggaaattggctgaggggtatacaggagctttctatctttgcaacttttttgtacatctggaattattccaaaataaaaagtttatttatttaatatgacagtaattatccagccagatggagtcgagaaatcaatacaaaagaagacctatagtaagcactcagtaattgtcactttttttccttgagacaaagtctcactctgttgcccaggctggagtgcagtggcaagatctcggctcactgcagcctccacctcccacctcagcctcccaagtagctgggacgacaggtgtccaccaccacgcccagttaatttttgatgttttgtaaatacagggtgttaccatgtttcccaagctagtctcaaactcctgtgttcaagcaatctgcccaccttggcctctcaaacccgagatcatgccactgcattccagcctgggcaatagagcaagactttgtctcccaaagtgctgggattacagaygtgagccactgtgcctggcctgtcgctatatttttaatagcagtagtagatgtcgttttattattatcatcatctgaggtcactcatttggtctgggcagagcagaggtgccrtcctgtgcccattggcgctgccctgaaattcatctcctcttctctcctggttgctgggctgcttggcaggtgtgattccaatccagggcgggatcctgaacctgaacaagatggtcaagcaagtgactgggaaaatgcccatcctctcctactggccctacggctgtcactgcggactaggtggcagaggccaacccaaagatgccacggactggtaactcctttctcagggctggcaatcctatactgtcccygactacggtactcttcttttctctccacccacctgttcatttagttgagttgaatccattttgttgagcatctactatgtgctaaataccactgngtgccaatacggtcccagccctcctggagcttgccttccagaaggttccccagggtccctgaaggccagacgcccccttgcactcccatcccctactctagtgrcaaygcccacattcactccccactgcaatggacrttggtttttaaagccccctcaccacctctttttttctgttatctcatttgatcttcataacaaccctgggagtcagctagaggagcggtgmgagccagccaggcctggggacactgccacgatctgccacttacaggctgtgtgaccttgggcaagtgtcttgacctccccgagtctcagtttcttcatctctgaagagcggataatatgagtacctccatcccatggtggttttaaggagtaagagagaatgcatagataaagcaagtgtctagtgcayaggaatcgctcaaaaaatgttagtcatcatgatcctgaggaagactgcagccctgcaggccttgactcttcccaggtggggacacgggttcttctccagtagggggagcagccagagaccccagtaggctggggacccatgcagctgtgcaccctgtctgctccaggtgctgccagacccatgactgctgctatgaccacctgaagacccaggggtgcrgcatctacaaggactattacagatacaacttttcccaggggaacatccactgctgtgagtacgcagacctcagggcaggagctggagaccccaggaagggagatctggcccccactgccttcacagcacagctacttgacctctctgttttttttttgcatgggtccactggctgcagttgggctgtgaagaggcaagaatgggtatgggggtatggagaggacccatgggaggtttggcccctttagcacctggaattcaggcccacgactgaccagcttggtgaccacattgcttaacctctctgaacctcagtatcctcatctgtaatctaccccattaagttattgcaagagctraaatgagacagacagaatgggcctcacaggatgcctgccataataaattacacagagctacygattggctgttactttcatcatcactgatgctcgtggcagcctgtcgaggatcggcaaaaccctgattatctccattgtacagaccaggaaaccaaaactagagtggggaagtgtctgcctccaactgacagagcctgggctggaacccagggcacctggcccctacatcctttccagcatcacaagcatagaaatgtagcaggtcctcagggctgggaatctaaagggctcatcacagcagctgctgttaattgagggcttcataataatagtaacaataatatccaacatttattgagcacttactataggctaagtgccttgtcttgttactttaactctcatgacagccccctaggcaactcttgccattatccccgcttcatggataatgaaactgtgatccctcctgcccgggagtctttgcatagactgttgccatcccccactcccaaaccccagcttcctccaggaagagcagacccttccgatctcagctcaaaaggctcttccaccctgttttctgatctcctagccctgcatggttcctcatgttaactttgcatagttgtttttttcctccctgtggtgctctaatacctgcccctctctcatgtccctatcgttcagtcctctcctgccgtgacacggtaggtgctcaacaattgtttaatgaatgggtgaataaataactgaaggtgcaatggcacacagggaggtcacggtacgtggccaagtcatgcagctagaatcgaggttgctgggaccggtacctctacgactgagtaggaactgcactgacttcagaggctgctagactcatacctgcctctgtctcggaaaaggacaaacacatagctcccccttctccgtccacagctgacaagggaagctggtgtgagcagcagctgtgtgcctgtgacaaggaggtggccttctgcctgaagcgcaacctggacacctaccagaagcgactgcgtttctactggcggccccactgccgggggcagacccctgggtgctagaagcccacacyctctaccctgttcctcagcatggagctctggcatccccacctcagtatctaacctgaaccagcctggcttttcaaacactccggggggaggtagtcccagcctcccccggaaccctctaccaatgccttctgacyttctgaagctttccraatcctcccagttgaggcagtagctgtgtcctctgagggtggatgggaatcttgggagaagcccaagcaagggagccctcagaggtggtgtttggaccaaagcatcggggtgggggaggggtctgccgctgtcccccacctgctggcccccttgtccttcctcaccccctccaatatagtctcggagctacaaccgcagcagccactataaagggcaatattgatctttctgtccatgtggctctatcttttaaaacctcaaggccctccactgtcctaagataaagcctctcataggcactggggaccctgcacagtctggccatgtgaccctctccccaggcaagctctgaagtccctgcaggtggaggccatgcctgtcttaaactcagttgcatccctggtgcccaaagcaacaccagaaccaagaaggagctccataaatccttcttgggtgaagcctagacaaagccgccaggtcttgtggctccaggcaccagagccttgagtactttctcctgcctccaggcattggctcagggtgaattacaaggggctactgaatggctattactttcatcacgactgatccccacctcctcagggtcaaagggctactttctggaagtctccccaggctgactccttctccctgactgcaagggctcactccctcctccaagctcccacaatgcttcatggctctgccgcttacctagcttggcctagagtggcaaatggaacttctctgatctcccccaactagactggagcccccgaaggatggagaccatgtctgtgccatctctgtttcccctgttttcccacatactaggtgctcaattcatgcctgtgaatggcgtgagcccataatggatacacagaggttgcagcagatggtgtgggtacctcacccagatatcwtccaggcccaaggcccctctccctgagtgaggccaggtgttggcagccaactgctccaatctgcctccttcccctaaatactgccctggtctagtgggagctgccttccccctgccccacctctcccaccaagaggccacctgtcactcatggccaggagagtgacaccatggagggtacaattgccagctcccccgtgtctgtgcagsattgtctgggttgaatgacactctcaaattgttcctgggatcgggctgaggccaggcctctcctggaaccacctctctgcttggtctgaccccttggcctatccagttttcctggttccctcacaggtttctccagaaagtactccctcastaaagcatttgcacaagaatccttgtctcaggctctgcttctaaggaaagagactgaagagggacaactttttcctatgaggactcccaatctgccatttgtgtgtggctagctgtttccagccagggggctgaggcacctgcagtcacccacactctgggcctgtggcaccatctgtgcctcagctgactgagcagttctgagatgtggtgactcatgtgaagtggtgtcataggaatgaaggactgtgggcgctgggttcaaattccagttctatgcaccactccaggtagggatacccatgggggcagctgtgcctgtgtgggggaacagggtagggaaatctccataccttctcaattttgctgtgaacctaaaactgccatataaagataaagtctaggccaggcatggtggctcatgcctgtaatcccaacacttagggtggctgaggcaggcaratcacctggggtcaggagttcaagaccagcctgcccaacatggcaaaacctcgtctctactaaaaatacaaaaattagccaggcatcgtggtgggtgcctgtaatcccagctattcaggaggctgaggcaggagaatcacttggacctgggaggcagaggtttcagtgagcccagatcgcgacactgcactccagcctgggcaacagagtgacactctgtctcaaaaaataaaataaaataaaataaaataaaataaaataaaataaaataaaataaaataaaataagtctagtttttttaaaaaaaattccacttatatcactgactaaccatgtaccttacaggaggaaacattctctgcatgtaaagtataaatgaaaataagaagagaccagcctgggcaacatagacctcatctctacaaaaaataagaatttttttttgttattgttgttgagacagggtcttgctgtgttgcccaggctggaatgcagcagcatgatcgtggctcacggcagcctcgacctccatggctcaagtgatcctcctgccccagcctcctgagtagccaggcacccgaacacctgggtaatttttgtattttttgtagagatggggcctcactatgctgtctaggctggcctcaaactcctgggctcaagtgatcctcctgccttggcctcccaacatgttgggattacagtcgtgagccactgcactggactgaaaattttttaaaaagaagagaataagaaggtgttcatgtttgtattaaataagattagcgtagattaaattcttagcacagcaggcacctggcacagggtattaactttaaatgttaacggcatggttaatgttgttgtttcgtagtgaccagatctaaagtcacccccaagagaaatcaggaggagaaagtgtcctcctcctttccckccaagtcttctctcagtgacactggatgcatttactcaagagacaccatcgggagctgatgactcttatttgtctaccaaatttggcccaatagctccctatggctttgcagcaacatctctcttaatattcatgttggctgacttagccattacgatccccattttataattgaggaccctcctgaggtcccacaacccgagaaaggcagagccacagcttcgccccagcctcttcttgctccgctccctcgccgcatcacgtttgtattggttaagaagcttccagctaaaaactgtgactcattgggctgaaacaatgcaggcgtttatgatctcacatgatgagacgttcggagaggaggtggttccaagtctggctcttcggagcttgatatcatcagggcctggtttccttcctgctcctggcaagccacctctgtgtgttggctttgccctctaggtgactcccctcacagctccaagctggcaaccatgatgccagcccgcaggccaggacgtgacagcatccagccaaggagacgctgtgtcttcctctcttcctgtgtctttttgtttgtttgtttgtttgcttttttgtttgtttttgagacggagtctcgttctgttgcccaggctggagtgcagtggcgcaatctcagctcactgcaagctctgcctcccagccattcttctgcctcagcctcccgagtagctgggactacaggcgcccgccaccatgcccggctaattttttgtatttttagtagagacagggtttcaccatgttagccaggatggtctcgatctcctgacctcatgatccgcctgcctgggcctcccaaagtgctgggattacaggtgtgagccaccccacccggcctcctctgtctttttaataagccccccagcaccacccaccgacttctcttcaggacaggccgccctaacccagaggttacccaagacaatgggatgagcctggttggtttagattcattaggatttatttacccccaagacggaacaggatcaatgtccctgaggggttgggtagctgatggaatttgtgttgggcgagcaagcccagagccagggactgcaacccgctctcactttggctgggagcagagctgtgcctggggtgctcccatctgtgaccaccttatcaccagggcaggcttgatatgtagtaggtgatcaatagggatttgttgaacaaataaatgaataatgaatgaatctcagattggtaaagacatgggatttatttagattaggaggctagatgctcaggtggggcctcaggcagcaggacttggaatgtcccaccctgcaagttcttgtcctggatcagtgtccaatgattgaaattggacaagaggcagcaaggaaggagtaattcccaggagagcctctgttctccactcacccctctgagtgctcctggatggcagaggcagccactgtgcttcctgttccctctggggttaggctctgcccagtgtgggaagtggagtggacacggaacacctgtggtgcccattcacccctcctcttacctaccttgaggtgctggtactgttactgcatttgacagctgtagaaactgaaactccaagggtgagtcactggctgataagtggcagggttgggattcgaacccaggtatctctggctccagggccatgtcccagtctatctcccacactcttgactgagacagtccctgactcacccctgggtgctcctatcgggggactagccacacccagggactaccaggtgggggtgatgtgtgtcaaaggcagaaacctacccattggtgggtacaagcctcaggccacctggaatgcatggttccacctccagggggcccagcccagggacaaagtgacagggacgacttctccaaggccctgcctgtctttctggctggatcctgcttccaaatgcccatgttcattccccacatccttgccttgctttgttgtgcaggaggggctgggctcctgccaccccctccccaccctatctcagtgtccccttgaggaggactagggggcattcacacttggggttcctgactgaggtcagctggagggtcatcctgacctcagggcaccagggcaagctgaatagcccatgtctcccactggctggcctggcttgttctctagagctcagagtcccctatttttttttttttttaatttaaaatgaagagatttttaaagcagtttgtaaaagctcaaagcaaggtcagagaaggcaggatgaggattcctctctggtccctttcagtttttggttcctggccaagccccgttcaccttggggcctctgctgggggaagcctcccctgggtcttggcaagacgggctccttcttcacccagagctcagctgaactgcttctccctccaaaaaaatgtccctgccctcccaaccgaaagcaactacctcccacccttggttactcccagtctccctgccctgttttaattctctgctttacactttctgatggttttcttaatcagcattcagcaattcacttctctcaccccaacaattgactggaatatgaatgccttggacacaggaaggaccacaacattcccagcatctagaacaatactgggggcataggacatttctgttgaatgaatgaatgaatgaatagggattgataggaaagctcctgctatttctttcagctgggctacttcccagctgtgtgaccttgggcttgtggttttgttacaagaaaggggtccggatctggacctaagagaggcttctgggatctcacgcaagaaggaattcaggatgagtccatagagtaaagtgaaagcaagtttattaaaaaaaataaaggaataaaagaatggctactccataggcaaagcagcccgagggctgctggttgcccatttttatggttatttcttgatgatatgttaaacaaggggtggcttattcatgcctcccctttttagaccacatagggtaagttcctgatgttgccatggcatctgtaaactgtcatggcactaatgggagggcaggagtgaggacgaccagtggtcactctcgtgaccattttagttttggtgggttttggctggcttctttactgcaacctgttttatcacaaggtctttatgactcgtatcttgtgctgacctcctatctcattctgtgacttagaatgccttaagcgtctgggratgcagcccagtaggtttcagccttattttccccagcttctattcaagatggagttgctctggttcacacacctctgacagttttacttctctgattctcaatttgtgattagtaaaattaaccaataacacctactcttgaaagggaatttttgaccaaaccctcatctctttcctactgagaacttcccaccagtgagaaggttgggacagggtggaaggggtgggtgggcaggtaggaaaggcagggacattctgtcacctcccaagccttctctcaggatgatcagaaattagctcttcaccctctgccaggaacactccccctactttcaggaggccattgaagtggggtcaaagtgcattctgctcgtgggctgcctctgctggagccccttccaggatccagggctaggctggggtgagaggaagccaaagctgtccctgttccctcctcaaggattcagccctgagatgatgcagcagctgtcactggctctgcggtaagcgtccctccctgccccaaacaccagcccaggaactgcagagcagaaggaagggagtaaaattcagccatagtgcttctggcttcctgagagggaatgggaaaatgccaatttctgggttcccgtgtgctaagaaccttatatacattttctcacttacccttcattctgcatgacccagcaaggtgggtatgattttttttaaaaacgaaggtgggtatgattggccacacagtacagatgaggacacaggttctgatgagttaaacttcttgcctgaggtaactcactcatggagaagtggtggaggccactttgggaggccgaggcgggtggatcacttgaggtcaggagttcaagaccagcctgaccaacatggtgaaacccgatctctactaaaaatacaaaaattagctgggcttggtggcatatgcctgtaatcccagctacttgggaggctgagacaggagaattgcttgaaccagggaggcaaaggttgcagtgagccaagatcgcactccagcctgagtaacagagcaagacttggtgtccccccaccccctgcccccagaaagaaatggtggaagctgggcaaaagtgagcaaaagccatgttaagcccagggtcctggtgcgaccctcgccaccccaggtagtgtgctccctacactggaactgtaataggtctgttgcctggtgcacacagcaagttaacacgatgagacaccaggttgcagcagagaaggaagtttaaacttagggtcaccaaacaaggagacaggagagaaccttaaatccatttccctgaggagtttggggctggggtttttaagggttttggagtgggacaaagtgtggagatcattgaatggttgaagagtgcaggttgatgtcacgggacagggagaggaagaacatgcattctcatgctgatctcgttcctctgtgagagtcttcaagctggtggttggaatttggggtttgaaaaataccctaagcaatccttaaactagtcagtcttgtgattctaatgtcagagatcatatctataggaacaatgggaataccaatcaattgtagtgtcaggaatcctatctatagtaacatgagatgaaagtgggtcagtatctagtgctttgtgacttttagcaacatggaagtgagccaatgtgcagcctgattaatgcttcattatcaccatatttctgtccagaattcttgaggatggcttcaaaagcagcaggtctgaaactttatggtggacaaaaaatcacccaggggagcaagtttacaatgcaggttctcagggccccaaacctgaagagtatgattctgtaggtctagggtggagcccaggaacctgtattttgtaaactgaaaataaaattctaaggctccccaaccattggaatgaactccctcctctcagccaggggcattccaaagttagcctgaaaaactagtttcaggccatgatgggaaggagaagccagatatgcctcattaaaccctcctcccttttggaattactcataagacaggatctatt

SEQ ID NO: 95690 - DNA, 97952 bp, Homo sapiens
  misc_feature (1)...(97952): n = A,T,C or G
tacttccatatccaaagcatttgaatatatttattttattgatgtaggtctgccaactcttccttctcaggaaggactgtttttattccaaacatgtatatataaggttaaaatgtattttttaaaataagataattattgatagttgtttttaaaatagccttgcttagcaaaataaatgttggcaaccctaagtttgttctattataatattattgaaattacattgaattctgaaatccatgtcaacttgaagttaccaagttttaaccactgttagaaaataagcaggaatgaaatctgtttcaagcgtttcaatttcaatacaatttaataaacaggctttgagcatctacccccacccccttttggtttttttgcaagcacctggaggcagagctcatgtggagcttacaatttagtaggaacacaggcattaattacaaagtaattacaatgctgatgagtgtgttgaagtggagggggctatggggcttcagccccaaaaagctaaacctgcaggctaaaactttaaaaaaatatatttaattggcaaataaaaatagtatacatttatggtgtacaacatgttttgttatatgtatacactgtggaatcactaaatcgggctaattaacatatgcattatgtcacatatttatcattttgtaatggtgagaacatttaaaatctctgtgagcaattttcaagtatacagtacattgctttttttgtttttttgaaacagagtctcactgtgtcacccaggctggagggcagtggcgcagtctcgactcactgcaacctccacctcctgggttcaagcgattcagcctcccaagtagctgagattacaggcgcacaccaccacacctggctaattttgtagttttatagtagagacggggtttcaccatgttggacaagctggtctagaactcctgacctcaagtgatctgtctgcctcagcttcccaaagtgctgggattacaggcgtaggccaccaccccccgcccagtacattgttattaactattgtcaccatgtggcacaatagatctctggaacttcttcctcccatccaactgaaagtttgcattctctgaccatctccccattccaacaggcaaccaccattctactctctgcttctgtgagttccactttgttaggttctacacacgagatcacgcagcgtttgtcttcttgtgctctaggctggatcttggttatcagcccaatgacaagcagagtaaaggcccggaagttagggagaccagggctcagtgtggctggcactgagagctgagcttctagcgtgggcccacacatacatttaagactgtagccaattttcctttcagaaccacgatgaagaaatgaaagccaaggccaagaaaatctttaatgttctgttcctcccctgcttgggaagtagagtggtctgaaggctccaacacagaatctgtgccataaccaagtcttatctggggcaagttacataactgctcatgaaataggagtgataacaatgcttcccccagacggtttttctgagggttaaataagaattttgtgggacatagtaatcactcagtaaatgttctggtctgagagtgaccaaaaggatggaactagagatatttgggcaagatatttgctatggcctgaacgtctgtgttcccctaaaattcatatgtggaaatcctaacacccaaggcaatcgtggggcctttgggaggtgattaggccatgagggtggggggcccccattaatgggattagtgcctcataaaagagatcccagagtcacccctaggcccttcctctcactgtgaggttacagtgagaagatgaccttgtatgaaccaggaagcaggctgctggcatcttcatcttagactttctagcctacagaactgtgagagatttctgtagtttataagccatccagtctacattttgtataacagaccaaacaaatattaaaaataacttcgtgattagaagtgctacaaaatgctagactacgcatggaaccaagagtttctatttatttactttttgagacagtctcactctgttgccaggctggagtgcagtggctcaatctcggctcactgcaacctccgcctcccgggttcaagtgattctcctgcctcagcctcctgagtagctgggattacaggcacccactaccacgcccagttaatttttgtgtttttagtagagatggggtttcaccatgttggccaggctggtctcgaaattccgacttctggtgatccacccacctcggcctcccaaagtgctgagattacgggcatgagccaacactcctggccaaccaagaggtttcaaggaaaaaagccgtaaacttttggtggttaactgactgtggtcctaaacagaggcaggggctgtgtgcaatgacttctcaggatctctttcagcctacaggttcctggaatgcatttcagctaacactacaagagtgatgtcccttgctactgagaaccctgggaacagctcagctccatggtccagccatataaatctgataaaaataggagctgaaataccatccyggagttgctatttttaaaatcatctgagatgctggatggggtatatttcttcctcaaacacatcttgctgtttcctcctcttggtgggcaggatgctaacgtggcacatgatacaggagctgttccacgctgctgctcacacccactcctgccagagaggggccgcagggccagggcttcccagatctagatgcacctgctcctccctctgctcctgaggcccctctggttgccccagcacagaggtgtcctgccacttccaccaagcagaaacacaggagagtttgggaggcaaaggaaatgggaatggaggcagcactgatggcttggaaggggactaagacctgttgttcctctggttgccttggtcccactttggcacagttaacatccaaaagaaacagtccccatgggccaaagccctgcttatcccatcctactgcctcttgctgagccgctcatcatgtgttgtagttgcaccaaaggggggcctggggccaaaaaagcacatggagaggagagaggagagaagaggagaaggaaagatggaaagacaagaaaagagagagagagaggaaggaaggaaagaaggaaggaagaaaaaaaaagaaagaaaaagaaagaagaggagaaggaaagatggaaagacaagaaaagagagagaaaggaaggaaggaaagaaggaagaaaggaaagaaaagagaagaggagaaggaaagatggaaagacaagaaaagagagagagaaaggaacgaaggaaagaaggaaggaagaaaggaaagaaagaaaaagagaagagaaggaaagatggaaagacaagaagagagagagagaaagcaaggaaggaaagaaggaagaaaaagaaagaaaaagagaagaggagaaggaaagatggaaagacaagaaaagagagagaaaggaaggaaggaaagaaggaaggaagaaaggaaagaaaaagaaagaagaggagaaagaaagatggaaagacaagaaaaagagagagaaaggaaggaaggaaagaaggaaggaagaaaggaaagaaagaaaaagaaagaagaggagaaggaaagatggaaagacaagaagagagagaaaggaaggaaggaaagaaggaaggaagaaaagaaagaaagaaaaagagagaagagaagaggagaaaggcaccagaattgcttccctcctgccccaaagatgacatggcttctaggcagtgagctaagcttgtggccatgctgttaagaaactggagggaaaagatcatcatgagtaagcacattgtggcctaacctgaggggagcagaattacggttagcttctgggcacctagtaaccaggcttgggataagctgggggagaggcctgaatacagcttataggttagaaaaggcacgccacctgcatagtaacagcacacacttatatatagcaggttatgctttcagaccaaattcgcatccattgcctgatttaatgccaacaatagccctttgaataagcagttatttcctttcccctccccccaccccagtaagaaaactaaagctatttagtggcagagacaagagttggaactcaggtctccaggaacaaatgctggttcttaagttccattttctggtagagtgacatttacgtgattcacggcaagaactgcaaactgtgcttagatctagttcatcaaatggccaagtttagaggctgggctgacgcttggatcagttctgtcagattcacttagttatgaagggcagctgcttactccctttgggccagtcttcccatctgtagaacaaggaggctcttccctcttcctcgacttgcccgaggcagggacttagtcattgtgttctttatacccagcttaattccaggcctggagatggcatgcaataaatagttgttgaatggctcacgcctgtaatcccaacactttgggaggccgaggcgggcggatcataaggtcaagagatcgagaccatcctggccagcatggtgaaacctcgtctctactaaaaatacaaaaattagctgggcatggtggcacgcgcctgtagtcccagctactcgggaggctgaggcaggagaatcacttgaacccgggaggcagaggttgcagtgagccaagatcacgccagtgcactccagcctggcgacagagcgagactctgtctcaaaataataaataaataaataaataaataaataaataaatagttgttgaatgcatgtctgactgattaagccaaaggcaccatattcaaacaaaatcagacactggtgcaatgccaaacagcttctgcccgtgcaaggaatgatttagcatggagcacagtcacctgcagaggaacaacttggaggcagactctccttactcagctcacttggagcagagcttcctgagttgggggttcttgacakataakccctccagcttcagcagaagcaggcttggagctgccacttctctgaacccccttgcacttactgtcagtcactcacaccttgcacttattcacatcctatcctgcctcgttcttgaatggagtccatggtgagccttctctgtgccgctggatggtaagcttcctggggacagggaatgggtctgatagtttccttggagcccctggcgctcccggcactgggctgttgatacgtggggctccggaaacactgtgctgacctgtgaaagggactggcctaaggggctgtggattgtcctgtagggtgacttctgaactgttcttcagcctgggcagttcccaggtttatttggggggatgcctgggtccaaagaaccagggtcaggggcccaggggtttcttcctggagacaggatgcctggcgccttcaataacggaaaggaaactgagaaactttctgaggccaagataaagagtatgcaagtgaggggtgcagagagagcagtttaggggcagcaggccccaaccgaagcagaggaagggcccacgtctgggcccaggggactgactggctgccttgcgtgcatggggcacgggaagcataggctcccggaacaggaccctgccccagtttccccagtgagggaaggacaccgttccccgtgggatagagcactgcaccctttcttgattctcattgttcccgggagcgagcgccttggctgcgctgggcatacccaccctggcgccattcacaggcagtgcctgccctggccctgtgctcaccccatcaggcctcstcttccgcctctctggcacccacggcgcccctgcttgcctctgtccgggtctcggaggcgcgaacaccatcccaagcctgcgaccgcgcggcatcacccccgcccttycccctcctccaccccgccctttctacccctcccgggagctcctgggagtcgggccgccgtgtgcgcaagcgtgtccagccccttccccgcccccaacccgggcccgggtccccgcctcccctgcaggcggactcgcccgctcccaggccggacccgcgcccgggacagggacccggccgagtcgagccgtcgcgccagcgctgcgccgccggtcggtgcgcctagcggatcggagctgcgcgcggaaccgtgctgccccgccccgctccacccgtgagggtgagtacgcggcggcggtgcgcgggggcccgcggggcggggcggggcggggagccgcggggtcctcggccgcctgaccccagccggcgccgcgcctcccggagggggtcgggccctgcacgtgggcgcagcgcgggtcggggtggggctgccacagccctgcggagctgctttccggggtccctttccctggaccagattttcgcgggaagccggatcctctccgytcccttggagtgagcaagcgggacagttctgcggaaagtttccgcccccaatcccccagccctgcgcccggactgaagcggcggcccccacctccagcatcctcgagcgatggtttctcccacaactaccccggtcaggtccagcacttgggagctgactgtgctggaggtgacaggctttgcggggtccgcctgtgtgcaggagtcgcaaggtcgctgagcaggacccaaaggtggagttgtcagtgggaggccggctgtgcccagggtcctagggccacgttatgggggtcgtcaggcctaggccactgtgcctcagggctgcatgggtggtgagcagtgggagggatgcgatggggggagtgggctcagctgtctgctgtgggtgtttcctcggggacctggctggcagggacctccyggccagcccagaactgccaacatgtctgccagcactgcccctccattcccagtcctggggggaggctctgtctgggcagcttgaggcctgacctactgtggctgcttcctctgctccccagcctgggtcctgagggcctggcttaagggaactgctgccagaaggctgggagtgtaggcagtgttcgggtgcccagctgtgccctgtctgacctcatggccacccacaagctggcaccccccacaggcctcttggggaagcctgtactttccaccgcmggaggcgggtaccgcgtggaagccaggctcaggcggactcattctttttgaactttgggaacaggcctggtacaggctgagttctcacaagagacacacacccgtgtcactgtctcctgagctgtgccggacccgtcctacagactccacctcctctaggtcctggccctggcatctgccagggggattttaaatgagttgatatatgctaagtgctttgaaaggcgcctgcacggagggagagctgtataaatattcactattggtaatatttctcccatgctgttactctccaaagctgcccgataattctagagtgggttccggggacgtgcccgctgtttggggcctagaaatgaactygggaggttgttttgcttgctgagagctggtctgggaatgccccttgaccgttccctgccctgctcctggcccactcccagactgctcctgtgcctggccccattgcgctgggtgggtgatcctaagctgccccatgggccctgggctctgtcaagacatggggagcttgccaggagttggggccagatcccccagactccaagatggtaaccgaggttgtgagggtgcacatggaaggaagagttagaagagtgaattggaaattgccagcttggactttgggcagagtgggtgtctttagcttggggatgggttgttgttcagagacaacagggccgccttctctgtgagctggcggcccaggctgaggtgcctctgggctgccttccctacgggaagcagtgactggccctctgcttctcaggaagagagtgccgtgcccccgccagcctcccaacctcgttagactcctagaatccggttttctggatagaactaagaatctgctcctttctggacttttaatcctggaaagggctcccttccccagcaggagcagagagaccaaaccccctttctgtgctccatcttgagctgtcattctgtcctaactccccactggccaccatctgcccttgctttgggggctaccccaggtctgacttgggcacgttctctgggtctctcctcagagaggctgctcctggggttgtcccaatggaattgggaattcttctcagaatggctcaaaggtttgcaccatctgttggagggaagggatccctctatcttggactaatacaaatgtttccgtgcctgccaagttccagaccctgggccgatagggaaaggagctggctggggggcctgcaggggatggagagggagcttgggccccaagtggggtctgaagtccaagcctacagattgccatcaaggcagccgctagagcctagcccagctcctggcccctcggagatggaccttagatgctggagagcggggcagtccagcagtgcagggtgggacaccccgagcaaacagcccctgcttcctgccccctcagttcagtcgcactgggccggctggacgtttccctgcaacaggcccctgctggtggtttagctcccgctccgtgtttccctcacgctgggatcctccttcctactcaagacccacgaccttgacctgaagcttttggttgccgggaggaaatggtgagtgtaggcagatttgggtgactcttgttattaaccccctcttctttgttgcccccttcccagaggcttctgtatgagtgtcctgagtggccctggatggactactggctgtccctggcctcagaatcaccccaacccctgccacatttcggggagsgaggtgtgtgaatgatgtcctttattctacagactgaggaagtggtcagtgtagcttcacgtgagagcagcagcgtgcgatgcccaggccctagccaagtgctggtcagctttctgactggagcccctgagccctgcaggggctgaattcccccaaaggttgcttgggttgttgcatttcggggttagagggtgtgggtgtccagagctgtgggtttttagtgttggctgagccctttacctgggacctacagcckggccacaaccccatctctgttcccctgtaccccacactgccctgtgataggatgtgataagatggtaggattgcctatactgaagccctgggtgccactgctggcccagcagggaggaggttgctgctgctcgggctgaagtgaggtgtgggtctggctgggcctccagtttcccacctgggccttgattgtgaggaaggcctggcctggctgcagaagcccagaagcacctgagtaggagagttcctttgtcccacctgcagctcattcaagcctgtgcatgggggttggggtcctcaggatcttgctttcctgtttaggggaggcagccccaaagagtgctgggaccagtttggagagtgctaaggaatgctggtctgcagcgaccctacttgtgctctgcgtcctctgccaactgcagcatgggtgaacatctgtacatctgtccccataatgaaaatggcctcagcaaataacaaaaatattaccatttagcaatcaggcacttattwaaagcctggcccmataaacttaaaaaaaaaaaaaagatgtgctagacactttacgtcccttcatgtgagcttcacacaaccctgtaattaagcccatttataaatgaagaaatggaggattgaaggattaagttacttggccaaggtcatacagctcgtaagcagctgagctaggactcaaatccaggcttgcttccaaaaccttcacttttcagcccagttctcaactgccccctggagtttgctcattttgccccatgaagaaacagatcccagctcaaaggcgtgaaggggtttgctcaaggccacagtgtattagtgtcaaaggtggaacacaaaccctgacctctgagtgctctcccgaaccccacatcccggccgggccgtaccctgagcacacgcttgtccgctttctcagctgggcggggcggggcaggacaaggttcttctccctccctccttccctccttccctccttccctccttccccgtgggccctcccagcctccccagcccccacctctgctgctttcccttggcaattgcttccatctggcctgcctgcagctcctattcctttggaaatgtggctgccgcccacatggctgcaaggcaaccacggccacacgtggggaaggggaggggccctatggggtctaagcacagggaacccagccaaagtggctgctcctggcgtctggcatcctgattcctgccaggcagaagcaccttggctgcctggccctccttgatgcccgtcctgggctggctcaaggccagagaggctcccaaagacccaattctccttccaacatggtgagctgttttgcccacagacaagctccgcaccggcagccctccctgtctcttagaggttgctcaggttgggaggagggattcctggcaggagagaattaggggccagccggggtataccctgggttcccactgggttctgatcatttggagggaagtcatgcaagggactgacgagggcagaggctgagggatccgcggagttctgggcaggcgaggaggcagctgacttgctcatgactgtgggtatgcgccaccacactaggctaatttttctattttttgtagatacagggttttgccatgttgcccaggctggtttttgtttgtttgttttgttttgtttttgagacagagttttgctcttgtttcctaggctggagtgcagtggcgcgatctcggctaactgcaacctccatcttctggtttcaagttattctcctgcctcagcctcctgagtagctgagattacaggcacccgccaccacgcctggctaatttttgtacttttagtagagacagggtttcatcatgttggccaggctggtctcgaactcctgaccttgtgatccgcccacctcagcctcccaaagtgctgggattacaggcgtgagccaccgtgcccagccgagcgtgtctgtcttgttcactggtgtattttcttaatgcctggaatgatgtctagcaaacaataagcactcaatagattcttgtgtgatgagtgatggaaatgcagctcaggtatgctgatttgtctttgctgcatctttactttgcttcctcctcccagggcaaagggaaaaagtttcccttttgccagttgagctgtttgccagagaaaggtctggccccatctgtgtgctgccaccttgggggtctctgttcagacctcagagaggcaggcaggaacccaggtgaggatgggcaggagcttgtcccctgaggagtgcatgccccattccacccaccacagggtcggctggccacatttctctacccatcacccctccctagtaaccttcaggtccctgcagacaggtcctgacctcagctccaatccctatgtcagtcctctccttatttgaggcccaagaaaggtacccctacggtggaaccctcacttgggtcctgagagggagtgacagctttggaagagcgaggggttcacccacatttgcctcctcctgaacagctccacttttattccttgtacatattgcgtttccacttcaatttttttttgaaactgtgacagagggtttcttggctttaattttttttttttttgaaaacccccattgagttccagttgtgacccccctgtggttctcattttctggtagcatgccgtgtggggtctcacctcctcgcctttgcttctgctgccccctcacatggcttgggcattgttggtaatgaccttgctagactgcaaatgtccttcagtatcaactgaagccccagtcctgggaagcctccgtggccacccagcaccggcacttcctcccccttcctccccctgcgttctccactccctgcaggtcctatgcctgtgacagggagggaaccctgtgctggggtgaccccagcatggacctcagtggggctcaggctgaaccaaaggtaggtggttctgggggtagtgcctgaggtggttgtatggagctgtgagatttgtattcctagaagcaggttggaggctctcagcccttccctccatgcatggccttggatacagcttgcagcctgccactgtagcctccatttccttctccgagaaattaacacttctttttttttttttttgagatggagtctggctctattgcccaggctggagtgcagtggtgcgatctcggctcactgccatctctgcctcctgggttcaagtgattctcctgcctcagcctcccaagtagctgggatcacaggtgtgtgccactactcctggctaatttttgtacttttagtagaaatggggtttcaccgtgttggccaggctggtctcaaactcctgacctcaggtaatctgcccacctgagcctcccagagtgccaggattacaggagtgagccaccgtgtctggccaacatttcttccttttttttttttttttttttttaagacggagtctcactctgttgcccaggctggagtgcagtggcacaatctcagctcactgcaacctctgcctcccgggttcaagcgagattctcctacctcagcctcccgagtagctgggattataggtgcccaccatcacacccggctaatttttgtatttttagtagagatgggggtctcaccatgttggccaagctggtctcgaactcctgacctcaaatgatycacctgcctcggcctcccaaagtgttgggattataggtgtgaactaccgtgctccgcctggccaacacttcttaatgggataatgtttcagataacatccagtgcccggactccagcactctataaatgctggctggtgtgcttttctgggattccaggnnnnnnnnnnnnnnnnnnnngggggaagcttgaggcacagtgggtggtccttactctccatcccctgcctgagaaccaggaagcctcattcagagattagcccctttactgcaggtggtagcccaggtgcagccaacctgcttcagggtctcagggcctgctgtggacccccatggtcctgggagagactccttagaaacagcagaatcacgaacatggtgaaacccatctctactaaaaaacagaaaaattagccaggtgtggtggtgggctcctataatcccacctacttgggaggctgaagcaggagaatcccttgaacccgggaggcggaggttgccgtgagccaccgcactttggcctgggtgacagagcaagactccctctcagaaaaaaaaattaaaaaaatagaaacagccggggagtggagggtgtggtcagaaagcctcagggacctgcttcagccttcagggagttcagatgaggcacaatgaagccactggcctccactcagccattcttccctgcagctctttttttttttttttttttaagacggagtctcactctgttgcccaggctggagtgcagtggcacaatctcagctcactgcaacctctgcctcccgggttcaagcgagattctcctacctcagcctcccgagtagctgggattataggtgcccaccatcacacccggctaatttttgtatttttagtagagatgggggtctcaccatgttggccaagctggtctcgaactcctgacctcaaatgatccacctgcctcggcctcccaaagtgttgggattataggtgtgaactaccgtgctccgcctggccaacacttcttaatgggataatgtttcagataacatccagtgcccggactccagcactctataaatgctggctggtgtgcttttctgggattccagggtggggtccagagactgaagagggtctgctttctggcccaggggaagaggggcaggtggctcactaggagctgtcctggcatcctttgtccccgtccacttaccagttatgtgacctcgggcaggtcttgcactctggcactcaattagcatctgtgttaattggggtaagagtatctgccacgtctcacagcctggtgatggacaaacaaaacaaacattttttaggctgggagaggcctcagaggttggctgtcatattgcaaacgagggagcagagactcagaaaagtaacttagttgtttaaggtcacagagcacctctctccccacaggcagggagccggtaattgggctgagcctcaggagtaacccttctctctctgcctctccagcccctaccttatgcctggcccattcagctggtctgttctccaggcccctaggactgggtgggctaagatgagtggtctagaaatccctccccagctgggctggactgaatgaggggctggccgaggagcgggtgttgatggagtatgggagattgtcctcacaggcagtgtgggccgtttctctagacctcctgcccccatctccttcctgtccctgtttgagccgtgctcttcttcttcaatccctttctgtctgccttctctttccacccctagatttctcaccatcttcagtgatccctcctccttcctttctgcctcctctgcattctctccttgcccttgcttctctgatctgccttttttctccagcctcagcattcaggttgtcctcatagtggaactgggactctgggggtggctgggttgggttgcctggaggccgggaatgttcaggagagccttcattgggagcccatgggagcaggagtcagctcctcctgttggcagctccagcattttcgaacaaaaatggctcttccaggagttgagtttggcgaagagacagtgcctgcccaaagtatgcaatgcttttatctttagctcagctcctgagccctcatgcaactctttggacatcttcctgcaaaggacggtgggatcttgtctttctggggcctcagggtctccaaagatgggctgactaagcttccctagcctgggacctgaaccctccaccctcctctctcttgagctctttctcccaggggaagctgctcgaatgaggggagttggccaacacagttttctactctcagaccccattgaggtgagcacacaacagtgttctgtgtgagggtctggatacactccccaccctcccaggcccggcaccgtgtcgccctgccccagcccagagcttgcctctgttggctttgtgaccctcgctttgtactgtggctttgttctgccttagggaccagctggtcccctgctgtggttccacacagtggagactgatccctgaccactcattcagctgcctggcggccctggggcaagtgtttgtcccccatctcccaaaatggcggggtgcaggggctccctgcccggagtcccaaccctgccaaggcagagggaatggggaacagctgcgctgrcccattccggctccatatggatttggtttgacaacaaagctccctctgtgtgttcccaagccccttacataaccaggggctgtgggcagaggaggaaaggaggaggaggtggagatggggaccaggagacaccaggatgggatggctggaaaggacacagggaccgggaggagagggcaggagacgagggccagagaggaggagagggtgggagcaggagggggaagtgctggtcttgacctcccagttctgcctcctgcttcctggggaggggagggtggagtccagccaccgacttctgcttgtggatgctttgtcttcttttctttggacctttcccaccagtcctggataggctgaggaggggccgtgggacctgtctggggtgaggtgaggtcaggtgttgggctggatgtgggaggctgttccttggccgcagcctgtaactgaataaatgccattaaaaggggaatccatttcctccctcactcctggcttccattgccttcccccaggccccagccctggttccagaatccctctgaccactcctcttgtgctcaggagggcagaataactgcagcctttccctgtgccctgccaggctggtcccgggccccctcccagcccactcatccagggatgcagctctggccttggcccacccccatcagagggcctgtggccctgatcaccgcactccccactctgtgaccagacgttctctcctgagcatcgctgaccctgcagctgtccaaatagagcaagaagtgaatgttctctttggggcacagctggactggcagccctgcagggtcaggtgagctgccagtcctgggtgtgttctcgggggtgggggtgggaggatcacgtcctgggctgagatcccttcagctcctcctgggcaggaggaaacagccatgcaggggcggccaggaggactgggtggcgggtggttctgggctctcccagcttcggttggggctgggaccctgggggacatgctctcctgggtgttcccaggctctgtgtttggcctgtgcctcagtgtgtgggttttctggcaccaggcttccttgggaagagcctctggttgtgcaccagccctgagggtggggctcatcccaggctgcaggggactgagggccgagctcttccaccttgaggacaaggatggttcctcagggctgggaggaggaggaggcgctggccaggaccttagattacgcagggcatggtgttggggcctcacagatgatggagaagccagagttcaggcacttggcatgacccctggcatcgccttcagttgatttagtgtctctgccctgggrtattccatgggaccctgggctggcttctgtgtgcagaggtgggtgtgggccatagcccagacctgttgaaccagttgtaggctctggaatcctctgtccccaggtagtgaccaggccctgacaggccggwatctgtccctcccatcaccctcccagttatgggtgcagatgaccctgaaattgctaaagcctcagggcttgagcccagaaagtgtgagcaggctggtggggcagctggaggaaggccttgcaggttcctggatttgggtgccgggtgggctgagaggacagtccctgtcactgggactgggcacaggtgcagagaggctgagacrggcccagaggacagtgagtgtgtgttgtgtgggcgccgggccaggaagtgccctccatggggcagcaggctctgcagtaccctcggccaaatggccacaggctgccctgggacactctccaggcctgctggggacacacctgtggggctcataggcgtggctgggtctcctctcaggtgccagaatctttctgggagctgagcctggctgggcagagggcgaggagcccaggattcccctttccgtgactttggaggaacgaggttcctgagggctggcacagccactccctgccccttagaggctccgggctgcctggtgatagctcccagggacctgcaagctgacaaacaaagtctatacgagccagagctggggtgggaggaacccagtgggcctgggggaggtaaagcagcagcagctgctgtagctgagcccggcccacggccagccctgaggaatggaggaagagagtgccctggctgggggagcccctcaagccctggaagctgtatgtgggcatggggtggtgggggcgtgcagagaggaggaggactgagagctgggtgtgtgtgtgcgcatgcctgtgtctgtgtgatctggttcccgggtgtctgagtagggaccaatgtgtttgtgctggagaagcctgtgtaggttactgacatggggaggggtggggcttgctttcctcaccccgcttcccacgtcttcattgagtcctcatctgggggccctgttccactctccttcccgtgtgcagggccctcccctctggcgagtctgcctctcactcgctcagcccctttaaccctgctggctcctaatgagacttcaggtgtggaccctcgaaccctcagctgcacaggtctggaaacatccttgttcatcaagcaccaggctgaccatggtgtccgtctcagtgcccagcagatgttctggtgaggggaggcgggagtgcaaggtctgccgagtgagggttccttccgggaggaggcagggtgagcgcagaaaccactgctccaaaactcttaaaagcagagccgagagcctgaattcagaggctgtactgtggggcagggctggaatttgtggcacctgcagggctgaacgttgcctttgctgtccctgcttggggattttggggtactgggtttggatagagtgtgtcatctgcagagggagcactgttctggaagtggactctgctcaggtgtggggggcctgcctgtagggggcaccgtggtggagatggagcaccgctcatgacaggaggctggtgtctggtcaggctgagggatccgtgtgccagcccttctgggaaggctgaatggggcggaactggtcagggcctggcaccaactccaggaggtgctacacccagacagacagatggaaagccacctccctagaggcctcctccccctccccttctgcatgccaccacaccccagcagcgtctcctgaggctgggccatgggtgaatctgagtcgagggcagggcagagtgggagtggcagtgcctctgcctgtctccctggccgtggcaggtcctttgtcacgtatggaccaggagaggtgagtatgattgtggtagtggtgggggcagtggctgaggacccctctctttgctgggctggggcagagcttgaatggagaggggctgccttgtgcctgggaagggaggaccaggtgtcgctggtaccttccaggtcctgaatgcttgttctgtgcctagcccctgctgaggctgcggacgttacaaaccaggatgtgttttgaggctcaggacacctctgaggacttgctgctgttacccccatttaaaagacgaggactctgaagatctgaggtgcatagagtgtagggattaaaagtagttctggctgaattttaaatcctggttccaccatttttgagctctctgatcttgggacccttaatgtatttgctctgtgcctcagtttccccatctgtaaatgagaatgaaagagtaatcccacatccattggttgaaaacttcaataagattatgcatagcaggccgggtgtggtggctcacaccagtaatcccagcactttgggaggccaaggcaggtggatcacttgaggtcaggattttgagaccagcctggtcaacatggtgaaaccccatctctactaaaagtacaacaattagctggacataatggcgcgcgcctgtgatcccagctacttgggaggctgagcaggagaatcctttgaattcaggaggtggaggttgcagtgagccaagatcacgccactgcactccagtctggaccacagagtgagactgtctcacaaaaaaaaaaaaaaagattatgcacagcacctgcagcacagccccagggatgatttttaaaagtgaatccagggccaggtgtggtggctcatgcctgtaatcccagcacttggggaggctgagacaggattacctgacatcaggagtcagtgaccagcctggccaatatggtgaaaccccatctctactaaaaagaaatcccagattctgccatgccacagtgtccaagtcagtcacctgctcgcagtcggccctcaggccctgtggctcctgtttctgctgacttgtccagcctcacagtctggggaggccttggggtccccagcctgcgctgggacaggggtattattccgtcagcccttctgtggaacaagtagggaaggagtgatgtgacctccgtggctctcctgggacacaggttagtcctgtgggtgacctcactttagagagggctggccagctgtgccggaattaggaagtgggtacagctggacaaaaggtggctggagccagctctacagaagccacacctgctcatgagaagggtatccttgtgagtacaggggaaatggcatggagaaagacaaacactggtgggtggctctgccagcttcccctggggtgcttctggcgatgcccaggcctttgcacgctcagatctttgcaccccactgttttaacttggagaggagaggaggaagttagctgctctgaatggtgttgctgctaatctctacagcactttcctgtaaattaggaacggtaacacacacacccctcccccaccccgttggagaagccctgcaccagagcatacagtttggcaagtagggggagggctggagcccagcctcacttgccaccctggccaggccgtgattgcccagggtgcatactgtggctggtgctctgccacctgctgtttctgtcctcagggtaggacacaaggagggcaagtagggctagtcagtgagaggcacaggtgatgcgtgttctagggcttgagatcagctgcttccatttcagtaattgtctttggaggtacgttgtttgctcaagcaacctcccttcaagatagtgcctttttctttctctctctctcttttttttggsggggggaggcagagttttactcttgtcgcccaggctggagcacagtggtgtgatctcggctcactgcaacctcggcctcctggattcaagcgattctcatgcctcagcctcccgagtagctgggattacacgtgtgtgccaccacgccctgctaatttttgtatttttagtaaagatagggtttccccatgttggccaggctggtctcgatctcctgacctcaggtgatccgctcgcctggcctcccaaagtgctgggactataggcatgagccaccgtgctggctgatagtgccattttttaaaatccctatttacccagtggaaaacctgagacccggaaaggtcattcacactcccagaagtgatggttggtccagaattcaggtccaagtgtgagacttcaacatttacattccttattttttcttcttccttttttttattttaatcaaattattacttcaaaatgtatcacactcatcagtttgaaacagttaagcagtacaaatgggaatatgagagaaagtcactctcccacccgccctcttgagaggcaatagccttgttttgcatccttctgagtactctattcacataagatgtatctgaatatgcatgtaattcttttgtgaaagtgcatttggagatcactgttttacacctgccttttacatcttaatattatgctttggagatcagttgacatcagcatgcatcgatttgcatcctatttttcacagctgcatagtgtttcgttgtgtgtgcctaattttttaaaacaggtgcctgtgcatagatttcatgtttccatcttatgctgttagaaaaagtgctgcagtaaagatcctaacagacaagtctctttgcaaatataggaaacttttctgtggaataagcttctggcacggaagccccggggtaaagggtattttgataaatattgtgaaatgtcttcccagaaggtggcctggttttcacttccagcatacatctgtgagaggtcctgcttcccacactcccccagcactgtgtagctcaggacccttgttttttgctgttactatttgtgaaaaatggtatctcaaccacaccggaagttttaaatgtagataaatgtcttatgtgccatttatatttctctacagtaaagtatatattcatagccttagcttatttttaaattatgttccttcattgtttggggagtggggggtagacttgcatgagtatgttataggctaagggaattaactgataagttaatatatgtacatcttgcaaatgcacttcttagttttttactcttttaagtatgagcttgctcacttgctctctgtatctcacttaaactttatgtgagtgtattaatctttcattatttagcttctgaatttatatttcttcaatctccattccttttttttttttyccttgaaatggagactcgctctgtcacccaggctggagtgcagtggcacgatctcggctcactgcaacctctgcatcccgggttcaagcaattctcctgcctcagcctcccgatttgctgggactacagacatgtgccaccaygctcggctaatttttgtattttttagtagagaccattttggtcaggcaggtctcgagctcctgaactcaatcaatctacctgccttggcctcccaaagtgctgggattactggtgtgaaccactgtgcctggccctcgttcttttttttatatgaaaatatttcaaatatgtaaaaattaatataacagacctccatgtgataatcagccagatttatcaagtgtgaaccttatcccatattagatattttttcctttaagaaataaaatattacaagtatagaactaaagatgtgctactatgatctattctattcttccccacattcctttttttttttttttttttttttttttttttttgagatggagtctcactctgttgcccaggctggagtgcagtggcgcgatctcggctcactgcaatctctgcctcccagatccaagtgattttcctgcctcagcctcctgaatagctgggattacagacgcacgccatcacgcctgtctaatttttgtatttttagtagagacggggtttcaccatgttggccaggctggtctcaaactcctgacctcatgatccgcccaccgtggcctcccaaagtgctgggattataggcgtgagccaccgcgcctggcctattctttcatcatacacataagcacgcactatttacaaatatacacaaacttagtgctgttttctgattcatcctttatctatttgcaacactttaaaaagttaatgttatgttttcacattgatcccagttgacctgtatggattaatttcttcagttgacatggctatataatattcagttgcgtgaatgtagcacagcttatgtagccatccctctcctgacgatagttaagttgtttccattttttgctattgtaacactgctaataaacatgcttgaatggggtgtcccgtacaagggagggttactcggggctgtgcccggaaatgcaatcrccagattgtaaggtatgcacgtgttcagcctgactacatattgtgaagtgctcttctaagcctttgtatcaactggtactcccaccagcaatgtgtgagaaactatatttggttttaatctgtattccctggttactagtgagcctgagcatcttttctgtctattaggtgtttgaatttaatctgtgaattgcctttttgtgttcttttttattcctttgattgttttggtggtggttatgataaaatgcacaagcacaaggttctgttgacctgttgaccrtcttaaccctttttatgtgtatagttcagtggcattaagtacatttagaatgtgctaccatcccgccatccagctccagaaatcttttcgtctcgtcaaactgaaacatcctcctgctagtcaatggctcatctccttttcccctcagtccttggcagccgccattctgctttctgtgtctatgagtttgactgcttttgagtacctcctataagtggaatgatacagtatttgtccttttgtaactggcttatttcactttgcatagtgtcttcaaggttgatccatgttgcagtgtatgtcagaatttctttttttcttttcttttcttttctttttttttttttctgagacagagtttcgctcttgctgcccaggctggagtgtaatggcgcgatctcagctcaccacaacctctgcctcctgggttcaagcgattctcctgcctcagcttcccgagtagctgggattacacgcatgcaccaccacacccggctaattttgtattttcagtagatacagggtgtctccatgttggtcaggctggtctcgaactcccaacctcaggtgatctgcgtgcctcgacctcccaatgtgctgggattaaaggtgtgagccattcacccggccgtctttggattttatacagcaaaactccataatatttcctttacatgaatttcctttctttttcaggctgaataatattccattgtaygcatagatcacattttgttcattcatccattgatggatacttgggttgcttcccgattagctattgtgaataatgctgctatgaacatgggtgtacaaatatcgctttgatattctggtttcagttctttggggtatataccccgaagcacagttgtgggatcctatcttgtctcttgttttctctttgcttccatgttttttctcattgtttcrtgggaatactgatattatatattcaagtatttgttgattacatgcactgtacctgacttgtttaaagcctgatgtcttgagtactgtgcacccctgtgcctggctgagtagtggaggaactttgaaagggtctgttctggagagggggtgctgctctggagaggcggtgctgctttggagatggattaatcaggaacttgggtgctgattctaggaggtactgcatctagaaagatgggaggtggggagtgcaacttccccaattttgcctttaacttcagatccttggggtgggtgcattgcttctcctgggatggaggggtgccggggagcccctgaccaggacctggagcaggtccacacaggcactggatttgtcctttactttgggcccaggctgcactcttgattccacctcctcacactggcttcagctttctcaccctcagaatggaattcaaagcctctgcccctcccaggcagacaccaaggtatgattttcaagtggttggtgtcttgtgactggcagctgataaacgggtgatacagtgtttctatacaggagtctgcagtgccaggctgcaggggcggaygggagggggtcgtggtgggtagcctgtggagcctgagggtgggaacagagagacttcttttgctgtaggtggaagcctgtctggctcctttccctcaaaggtcagacagcttgagagatgtttccatcctcccatgcatgaccytgaggcagttagctggtcagttactcactgtgctctctgccaactctaatgagccaggaagcctccccgtgcccaggcgtgctgtgatcacagtgttcaatgatggggtgaggctgcagcgtccagccagggrctgtgccrcaggggccagaagatatctgacctactgtcactgcctcttccactctgttccacctgcactggrgcratgcyatcygatgaacagatccatttattaattcaacacgtttgtattgagagcctgctgggtgccgggcactattgtcracatgggtratacagcagcaagcaaaacaagagaaacatctttgcaagcaggggagggggcctgcagtgttgggtgtgtggagttgttgctgggaagtagagaagctgagtaagagctggacaaagaggccaggcacagtggctcacccctgtaatcccagcactttgggaggccgagtttggcagatcacttgaggtcaggagttcgagaccagcctggacaacatggggaaacsccgttcctactaaaaatacaaaaattagctgggtatggtggtgcatgcctgaaatcccagctacttgggaggctgaggcacgagaattgcttgaacccgggaggtggaggttacagtgagccaagatcacacaccattgtaccccagcctgaatgacaaagcaagactttgtctccaaaaaaaaaaaaaaaaaaaaaaaatagagaaaaggaaagctggatgaagagagatagccaagcccatgtctacggaaaagcattcttgactgagtgaacgaaagtacaaagcctcaraggagggagcatgcctaggtagccccctaracctggtgaggctggtgcgtggggcagcctccatggaraggagttgggcaaggagggaggaggtgctggccagtaragcacgtgtgtctctgtgcgtcaragcaaggacccgggctctccccgtaagtgagaagagtccatggaggttttggggctgaggaggagttttacagatgaccggtctgttcttggcacttgcaattagcggaccgtctgtatccgagtgttgatcgggtggattctaaccctgtgggagaactccccagcccgtagcctgcgctcactgtacctggcagttgtattaatgacgtcaaatgcacagtccagcttgagtcccctctagaacgtgggcagcggacactaagccgagaggaatcgctgtgggttggcagacactgtggagactgactcctggacaggctgtggaatgtgtggaagcaggtacagcccaggcccgcrctgaagttcggcagggaagccagaggagtccgcagcccgggagacctggcctacagcggagagagtcagtccatgccagtggtgggatgtggctgcaaaaaatggtcggattcatggaagtctggtgtccatctggcaggcgttagtggtcccacgaatacagctgtgtgccttgaacacatactgcagrgcttccagagagcaccagggctgtgggggctagagactgtgtctcgtgcggaagcgtggctgaggaggggcttgacaggctcttcgtcactgtgcggagccttcgaaggacttggatgtgcttgagaccccttcccctaattgctgtgtagggcaggggtggacatcccggggatcgtggagtctagggagccagtctgcacgggatggttttagaagccgtaggatgtgggggttctggctgaagtagccagaattccagtgccagctccgctcctcacgagctgtacaacctgggcccgttactgacccctttcccaccttagttccctggctctacaatggaggtaattatcgtgttgaactcacagggtcgagatcatatttaatacttgcacagcccttagaagcatctagcacagtggtcctcagcatttggaaatgtctggaaacattctgtcacacctggggagtgggatttccttctggtgtctagtgggtagaggccagagatgctgctaagcgtcccacaatacacaggacagaccccgcaacaatgaactgtctggcccccaaagttagtggggcagagattgcaggatcctgattccttttcttccttttttttttttttttttttgcccctggctatgagtaagagatcctggtttcgcacaaagtgaacgtgcagtacattgtttcagttgttaattcgccatgcaatacatcgttagtcacgtattattgtttgtcaaatgtgtataaaacatctgccacattcttggcagtttaatagaatctagagatataaagaagttcctgaccacagagttcatagcctcacaggcaagataggaaaacacagaattatataatacgaaattacattatatcatagagcatattctatagtaagttactccgattggcttttggtattaaaatgtcttcagtttcagaggtcccaggatagtgggcaatatttgaaagccagtaaatataaaataaaatatattacctgtgtgaaagagaatttttcaggcacaataatattttaaagagtttatttgtgtaagaagtgaattgggaaacagaaaaccgaaagaggtttagtggcccaatgacagtttcagaggcaggtgtttggagagtgaatgtaaaagcaaaatgaagaatttatttgatttaattggttgcaattacaaaattgctttgtttggtttaccttgttggaagtttcctagtcacataaccatatgttagttggctacttatgattggctgaagttttatttgtgtcaaacagaagcatttaccataaataaccccagttaagatttgattatgctgtcttttaagcaaggttaaggctgttgttaaggcctcattggttttgtttggtaaggaatttttcaggcctggtctccaaattttgctttaacaattccttgcttctggttattctctcagcaagctgatagtgtgactagatgacacagtattactctctgttaccaccaccaatgtagtcactgggacaaagagtcaggtagatgttgttgtcatcatcagtaggtaggttggggatgagaattccatggccacagttagcagttacatagtcagtgttgctttcctcaagttgaatgatcctcatggtaactgtttgatatttgagcagctgttggaaatcatttagaacccttgagagaatacaaggcaccaggggggtaaacataataattataaggagaataatagccaaggattgaaaaattcctctgagcaaagattcccaggagccaagacttaaccagctgagtgaatcaatggagaaggcagtgcccatctaatgaaaaacccatgtgtgttctttaaggtattttaagttttcggtaatacctgatttgttaacataaaaatgacactttttttttttgagatcgagtcttactctgtcgcccaggctggagtgtagtggcgcaatctcagctcactgtaaactccacctcccaggttcaagtgattctcctgcctcaacctcctgagtagctgggactacaggtgtgtaccaccacacccagctaatttttgtgtttttagtagagatgggatttcaccatgttggccatgctggtcttgaactcctgacctcaggtgatccacctgcctcagcctcccaaagtgctgggattacaggtgtgagccaccgtgcctggccaacaccttctttttttttttttttttttgagatacagtctcactctgtcttgcccaggctggagtgtgcagtggtgtgatcttggctcactgcagcctctacctcctgggttcaagtgattctcctgtctcagcctcctgagtagctgggaatacaggcgtgtgccaccacacccggctaattttgtatttttagtagagacagggtttcacccaggctggtctcagactcttgacctcaggtgatccacctctctcagcctcccaaagtgctgggattataggcgtgagccatgcgctcggccagcaacacctttctaccaattagggaacaaggtctccctttttgagcagttaaagtagcaagaagtcttctattgtacagtactactgaggccaattcattcatcccagattgtactgcttaagataattcgaagtgtcaattaaactttttcagaagttggtaaaatattaattgatttttttcaattcactcaactgagagaaacgggctcttacagaagtatgaaatccagaaccccttcgtaagactgtgtctgggatattatgattctcttttgtgaggggtcactttatgtacaaatgactctaaggatttgtatggcaattgaagagtcatatctagtcattttaggtagaagatagcccacaccacagatccagactggctaggtagaacacctttacatactttgttgctgcataaaatgaataattcggtgttatcgatagaaagggtcaaagtgcatcctattacccacgagttgggggtgatacgaatgtcatggttattctccgtcacatctgcgtctgcacagcgccacgttgaatggttatggtttcaattggagtaggaacaaaaaacatttctatgaatttgataaaatgactgtatgccatcatcaattagggatgattggttttctttttatttgagacggagtcttgctgtgtcactcaggctggagtcagtggtgcaatcttggctcactgcaacctctgcttcccgggttcatgcgattctcctgcctcagcctcccaagtagctgggactacaggcaccaccaccacgcccagctatttttttgtatttttagtagagacagggtttcaccgtgttagccaggatggtctcgatctcctgacctcgtgatccaccctcctcggccccccaaagggatgactggttttctttccaaatatgacctgagcattgatctgtccaataagcaagactgttatgtacattatgtagtggatctattgaggcatacgattttcctgtagcatttccattgaaccaatgtctagttctagtaagttctctgatgatatggttgaggctttcatggtcatgttcagattttatatatgtgtctcatgtaggaatctagtcttcataatctgtgtcaaacctaagaatttgagtacagagggattctggaacactgcccagatttggcccagttccattcatgttttctgtgcgtagagataagttaccattaatgacatcaatcgtagttgtaggccatccctttgcctctgttgcttcttccaagagctacactggttgatcataaatatcagccaactgccaagggaaggataccaacccttttcataacgccattttcctgaattgctcactcaagtgtgtatgggagcaggttctaatattagttgtgattctttccatttatctagaggattacgtagccaccaattgctttgcttagtagcgaggatggcttcatgttgagcagtagatcttagaggatattcagtgtggataatgaaattccctaacgaaaataaaagtgtgaaccttttgtgctaaaacaaaacaaaaacaagtctgagtcaatagaagggggccacatggagtcttgtttcattgtcttgggaaagctgtgtctatttcatgatatcatctacttttatggaaggatttctcttgggtatccttaattttgtttttatattattattattattattgagacggagtttctctcttgttgcccaggctgcagtgcagtggcacgatcttggctcactgcaacctccacctcccgggttcaagtaattctcctgcctcatcctcctgagtaactgagattacaggaatctgccaccacacctggctaatttttgtatttttagtagagatggggtttcaccacgttggccaggctggtctcaaactcctgaccttaggcgatccaaccaccttggcctccttaagtgctgggattacaggcatgagccaccacacccggcctgttatccttaattttaaatcacatgtggattgacaagtccaaaactctaagagagctctcattagctgtgaaacatgtacccaaggttcaagatcctgacattttgctacggtgagaatagtaactgaaactggtgtagtgtctttcaatggggctcaagggcagttgttctctgctgtcttttacaaaagagctagtctcggccgggcacagtgacttgcgcctgtaatggtagcactttgggaagctgaggcgggcggatcacctgaggtcaggagtttgagaccatcctggccaacatggtgaaaaccccatctctactaaaaatacaaaaattagccgggcatggtgacacatgcctgtaatcccagctacttggaaggctgaggcaggagaatcgcttaaacccatgaggtagaggttgcagtgtgccgagattgtgccaccgcactccagcctgggtgacacagcgagactgtatcaaaaaaaaaaaaaaaagatccagtttccagattccaggtcacgtaaggtgggatcatcaataggcaggtcacagaaagcctccttcacctggtgggatatactttggcatcatacatcaagaccttgcagtattgagtcacatcagagccaccagtagagtggataaatgaagttctgttatgaaaggcacaagtcgttcagtatttattttgtgaagggccactttatgtgttcccctaggggctgatgttcttgccataaaggtcggtgataattcttttggccaaggtaattcagttgactctgttaatttagctaattttagttttgtgataccatttctgcattcagcctttccagaagagagagtgatgagggcaatgatagtgccgtcaggtctgtaaactcttatttggtggataacctgtcaaataaagcgaattgccctagcactagagacctcctcggcaggtaggtgggatttcatctttctggagcctgagcatctccaaagaagagctgccgcatggagcttccctgactggtgacctccaccctcttctctccagagctctttgacccagaggaatctgcaggaatggagggagttggccaaagtagggagatttttactcagaccatatccaggtgagcacacaacagccttttgggcttgggctgatgcgtgcatttctgtctgtacatgcgtgcctggaagtgtgcagatgagtgtgtgagagagggtaatggccatgcatccttgcatagacaagaacatggggtgcacttctgcatgtgcacagcccctccccaacccgggcctgtggtgctgtcctgcccctagcccagagctggcctctgttggctttgagaccctagctttgcactgtggctttgctcggccttagagaccagctgctcccctgctgtggtctctcatagtggagactgatccctggccacccattcagctgcctgagggccctgggaccagtgttcatccccccacctcccaaaacagaggtgtgtaggggttccctgcctggagtcccaaccctgcaggatggagaaaatgggcaccagttactgtgacccattccggctccatatggatttggtttgacaacaaakctccctctgtgtgttcccaagccccttacataaccaggggctgtgggcagaggaggaaaggaggaggaggtggagatggggaccaggagacaccaggatgggatggctggaaaggacacagggaccgggaggagagggcaggagacgagggccagagaggaggagagggtgggagcaggagggggaagtgctggtcttgacctcccagttctgcctcctgcttcctggggaggggagggtggagtccagccaccgacttctgcttgtggatgctttgtcttcttttctttggacctttcccaccagtcctggataggctgaggaggggccgtgggacctgtctggggtgaggtgaggtcaggtattgggctggacttgggaggctgttccttggccgcagcctgtaactgaataaatgccattaaaaggggaatccatttcctccctcactcctggcttccattgccttcccccaggccccagccctggttccagaatccctctgaccactcctcttgtgctcaggagggcagaataactgcagcctttccctgtgccctgccaggctggtcccgggccccctcccagcccactcatccagggatgcagctctggccttggcccacccccatcagagggcctgtggccctgatcaccgcactccccactctgtgaccagacgttctctcctgagcatcgctgaccctgcagctgtccaaatagagcaagaagtgaatgttctctttggggcacagctggactggcagccctgcagggtcaggtgagctgccagtcctgggtgtgttctcgggggtgggggtgggaggatcacgtcctgggctgagatcccttcagctcctcctgggcaggaggaaacagccatgcaggggcggccaggaggactgggtggcgggtggttctgggctctcccagcttcggttggggctgggaccctgggggacatgctctcctgggtgttcccaggctctgtgtctggcctgtgcctcagtgtgtgggttttctggcaccaggcttccttgggaagagcctctggttgtgcaccagccctgagggtggggctcatcccaggctgcaggggactgagggccgagctcttccaccttgaggacaaggatggttcctcagggctgggaggaggaggaggcgctggccaggaccttagattacgcagggcttggtgttggggcctcacagatgatggagaagccagagttcaggcacttggcatgacccctggcatcgccttcagttgatttagtgtctctgccctggggtattccatgggaccctgggctggcttctgtgtgcagaggtgggtgtgggccatagcccagacctgttgaaccagttgtaggctctggaatcctctgtccccaggcagtcaccaggccttgacaggcgggaatctgtccctctcatcacccccccagttatgggtgcagatgaccctgaaattgctaaagcctcagggcttgagcccagaaagtgtgagcaggctggcggggcagctggaggaaggccttgcaggttcctggatttgggtgccgggtgggctgagaggacagtccctgtcactgggactgggcacaggtgcagagaggctgagacaggcccagaggacagtgagtgtgtgttgtgtgggtgccaggccagggagtgccctccatggggcagcaggctctgcagtaccctcggccaaatggccacaggctgccctgggacactctccaggcctgctggggacacacctgtggggctcataggcgtggctgggtctcctctcaggtgccagaatctttctgggagctgagcctggctgggcagagggcgaggagcccaggattcccctttccgtgactttggaggaacgaggttcctgagggctggcacagccactccctgccccttagaggctcygggctgcctggtgacagcttcggggacctgcaagctgacagagtctccaggagccagagctggggtgggaggaacccactgggcctgagggaggtagagcagcagcagcagcagctgagcccagcccccggccagccctgaggaatgggggaaaagagtgccctggcttgggggggccctcaagccccggaagctgtatgtgggcatggggggcgggggcagagaggaggaggactgagaagtgggtgtatttgggcaggtgtgtgtgtgtgaccaagcttgcgggcgcctgagtatggactagtgtgtttgtgctggaggagcctgtgtaggttactgacatgggagggccggtgtgagctgcagggaccggagagctgctggaaggggctgtctatgccttcaggctctgagtgtggatgcagctgggcctgttcaggcagattcaccagaggggctactgcgcagagcctgggccctggacacctagaagggcccctcctcccctcgtcttccctccctcatggcccacctttactctgagggggtgggcttcctgcgggggacaaactggagagggactctcttgccgccttctctgttcctggggacaggctgctgcagggtggagggcttgcttttcctgcccaccctcatctttgccgagtcctcgtctgggggccctgccccactctcccttcccaatgcagggccctctcctctggcgagcctgccttgatactccccggctcaacccctttaaccctgctggctcctaatgggactaatgggayttcaggtgtggacccttggaccctccgctgcacagttccagaaacttgttcatcaagtgccaggctgaccatggtgtccgtctcagtgcccagcagttgttctggtgatgggaggtgggagtacaaggtctgccgagtgaggcagaggaaaggggtttctgagcccagatctccggtgctccaagacactcaaaaccagagctgagagcctgaattcagaggctgtactgtggggcagggctggaatttgtggcacctgtgtagggactccagggctgaacgttgcctttgctgtccctgcttggggattttggggtactgggtttggatagagtgtgtcatctgcagaggcagcactgttctggaagtggactctgctcaggtgtggcgggcctgcctgtggggtcaccatggacaggaggctggtgtctggtcaggctgagggatccgtgtgccagcccttctgggaaggctgaatggggcggaactggtcagggcctggcaccaactccaggatgtgctacacccagacagacagatggagagccacctccctaggggcctcctccccctccccttctgcatgccaccacaccccagcagcatctcctgaggctgggccatgggtgaatctgagtcgagggcaggacagagtgggagtggcagtgcctctgcctgtctccctggccgtggcaggtcctttgtcacatatgggccaggagaggtgagtgtgattgtggtagtggtgggggcagtggctgaggacccctctctttgctgggctgggacagagcttgaatggagaggggccgccttgtgcctgggaagggaggacsaggtgtcgctggcaccttccacgtcctgagtgcttgttctgtgcccagcccctgctgaggctgcggacattaaataccaggatatgttttgagactcaggacacctctgaggacttgctgctgttatccacatttaaaagacgaggactctgaggctctgagaggttaagtacctggtccaggtcacctggtcagtttctttcttttttttttttgagatggagtcttgctctgttgcccaggctggagtgcagtggcgatctcggctcactgcgagctctgcctcccgggttcacaccattctcctgcctcagcctcccgagtaggggactacaggcgcccaccaccacacccggctaattttttttatttttagtagagacagggtttcactgtgttagccaggatggtctcgatctcctgacctcatgatcctcccacctcggcctcctaaagtgctgggatgacaggcatgagccaccgcgcctgacccacctggtgagtttctgagctccagacaactcatcccaaatttcatgggtgcatagagtatagagattaaaagtagttctggctgaattttaaatcctggttccactattttcgacctgtctgattttggaacatttaatgtattccttctgtgcctcagttttcttctgtgtaaatgagaatgaaagagtactcccccatcaatttgttgaaaacttcagtaagattatgccaggagctgcagcacagccccagggatgatttaaaagtgaattcaggacagggcgtggtggctcacgcctgtaatttcagcactttgggaggctgaggtgggaggatcccttgagcccaggagtttgaggccaccctggacaacatagtaagaccttgtctcaaaaaaaaaaagcgaatccagtggtgtcactctttgttatcaatgccctccagtgacattcatgacacccaaacttagaatctgagcttttagggtggcctgtgacatctataccacgtgtccccgtggcctccctggcaccccctttccttcctggctgtctgccaccatatggaactttctgtgccttgcacccagccagctcagagtcttgggcacttctctcagtctggaaccttctcttgcctaccccatcttcccatggctgcccttcatgtaggcctccggtttatagccggctcctcagagacatggttctatccccccagtggccaagggctggtggccctcactctctgcccctgtgccctgtgttagtggtcctgtggttgtcattgccccgtcatctccaccatttcctgtttgccgtgtgtctgtgccccccaaggatgaatgccatgagtccagcatgtcaccctgtttctgtcctgccacagtgctcgagtcagtgccctccctgcttgcattcggcccacaggccttgtggctcctgtttctgctgacctgtccagcctcacagtctggggaggccttggggtccccagcctgtgctgggacaggggtattattccagtagcccttctgtggaacaagtagggaaggagtgatgtgacctctgtggctctcctgggacacaggttagtcctgtgggtgacctcactttagagagggctggccagctgtgccggaattaggaagtgggtacagctggacaaaaggtggctggagccagctctgcagaagccacacctgctcatgagaagggtatccttgtgagtacaggggaaatggcatggagaaagacaaacaccggtgggtggctctgccagcttcccctggggtgcttctggcaacgcccaggtctgtgcacatccagatctttgcactgcgctgttttgacttggagaggagaggaggaagttagctgctctgaatggtgttgctgctaatctctacagcactttcctgtaaattaggaacggtaacacacacacccctcccccaccccgctggagaagccctgcaccagagcatacagtttggcaagtaggaggagggctggagcccagcctcacttgctgccctggccaggccgtgattgcccagggtgcatactgtggctggtgctctgccactgctgtttctgtcctcagggtaggacacaaggagggcaagtagggccagtcagcgagaggcgcaggtgacgcgtgttctagggtctgagatcagctgcttccatttcagtaattgtctttggagctacattgtctgctcatacaacctcccttccagatagtgccattttaaaaatcccatttacccaaaagaaaacctgacacctggaaaggtcgtttgcactcacacaagtgatggttggtccagaattcacatccaagtgtgagatttcaatattttttttcttcctcctttttttaaatcaaattttatttgaaagggtatcacagtcaccagtttgaaaaaggtaagcaggccaggtgtggtggctcacacctttaatctttgcattttgggaggcagaggcaggcgtgtcagttgagcccaggagtttgagaccagcctgttcaacgtggtgagaccccatctctccaacatttacaaaactagctggtcatggtggtatgtgcgtgtggtcgcagccactggggaggctgaggtgggagggttgcttcagcctggtgggtggctgcagtgagctgagattgggcctttggtcttcagtctgggctacagagcaagactctgtctcaaaaaaaaaaaaaaaattataaaggtaagcagtacaaatgggaatatgagcataagtcactctcattccagacctctgacccccaggacttttctcttgagaggccatagcctttgttttgcatccttctgagtaaacctattcgtgtacagacatatctgggtatgcatgtaactgttttgtgaaagtgcatttggagatatggatatcrttgttttcacccatcctaagttttgatgctatggatactatgttttggagattagacgataccagcacgcataggtttgcagcctctttttcacagctccatagtgtttccttgtctgtgagcagatttcaagttgtttccatcttaacccctagaaaaagtgctgttgaagatcctgacagacaagtctgtagaaacataggaaactttgtagaataaagttctggccatgggccaaattccctctgagaggtagctctagtttttcttcctagtacatctatgagagctcaggtccctcgtgttttgctgttatgatgaatgaaatatgctgtctccatcacgctggaatttgtagatgtagatgaccatagtttcttatttgccattcatttctttacattaaggtaaatattcatgtcctttggctatttttattttatttcttttttcttttcttttttaagacagagtctcgctctctctcccaggctggagtgaagtggcttaatcctggctcactgcaacctccacctcctgggttcaagcgattcttctgcctcagcctcctaagtagctgggattacaggcacctgccaccatgcctggctaatttttatatttttagtagaggtgggggttttaccatgttggccaggctggtctcgaactcatgacctcaaatgatccatccaccttggccttccagaatgctgggataataggtgtgagccactgcgcccggccctttgcctatttttaaattaggtttcttgttttttttttttttttttttctgatttacgtgagcacatcataggctcagtgaatttactgatatgttaggtataggttgcaaatgtactttagtttttcagttgtctttttttttttttttttttttgagacggatttttgctcttgttgcccaggctggagtgcagtgcaatgacacgatcttggctcactgcagcctccacctccttgggttcaggcaattctccagcctcagcctcttgagcagctgggatcacaggcgcctgccaccatgcctggctaatttttgtatttttagtagagacrgggtttcaccatgttggccaggttggtctcgaactcgtgacctcaggtgatccacccgcctcagtctcccacagtgctgggattacaggcgtgagccaccgctccccggctcagttgtcttttaagtgtttcatttgtcttctctctactcctccctctctctcttgcacttgctgtctgtctcacttaaattttatgtaggtgaatatattcatctttccttgtttagcttctcaatttatatttcttcactatctctattaatatgaaaatatctcatctatataaatattaatgtaacagagttgcatgtgataatctgccaggttgaacaaatgggaatattatctctcatatgacgttagatttttttcctttaagaaataaaatattgcaagtagagaaccaaagacatgcccctgtgacctcttttattcttccccatctccccagaatataattatcacttaaagttgggtgtcaacctgtatttcattctttcatcatacacacaagcacacactgtttatacacataaataatgttgtttttggacgcatactttgtttttgcaacacctttaaacataagtttttacttttattattttatttaagataggatcttgctctgtcacccaggctggagtatagtggcgcgatcatagctcgctgcaacctctcatctcstgggctcaagtgatcctcccaccttagttagcctcctgaggaactgggataatcacagtcataagccaccaagcccagctaagttgtttattttatttttttattttttaaataaagatgaaatcttgctatgttatccaggctggtctcaaactcttgggctcaagcaatcctcctgccttggcctcccaaagtgctgggattacaggcatgactttaaaaagttaacattatgggccaggcgcggtggctcacgcctgtaatcccagcacactgggaggccgaggcgggtgaatcacgaggtcaggagatcgagaccattctggctaacgcagtgaaaccccgtctctgctaaaaatacaaaaaaaaaaaaaaaattagctgggcgcggtggggggcgcctgtagtcccagctacttgggaggctgaggcaggagaatagcgtgaacccgggaggcagagctgcagtgagctgagatcacgccactgcactccagcctgggtgacagagcaagactctgtctcaaaaaaaaaaaaagttaacattatgtcttcaagtttatcccaattgacccatatggattgatttcttcagtttacatggctatatagtattcaggtagcacagtgtatatagccatggctgtactgatgatagtgtttccagtttgtttttttttttttgctattgcagcactgcctaataaatatcctggagtgggttgtacttatatacttcaaaatggaattaccagattgtaaaatatgcacatattcagcctcactagatactgtgaagtgctcttctaagcctttgtgtcagtttgtacttctgccagcaatgtggaaatgagatttggttttaatatgtattccctggtcacgagtgagcctcagcatcttttcatatgtccaccaagtgtttgggtttaatctgtgaattgcctttttgtgttctttgctttttttttttttatttctttgattgttttggtggttgttatggtaaaatgcacaagcacraggttgtatttaccatcttaactctttctgtgtgtatagtgcagtggcattaagcactttcagaatgtgctaccgtgctaccatcccaccatccatctcccgarctctcttcatcttgccaaactgaaacatcctacccactagtcaagaactcctcatttccgcctccccccagccccttggcagccaccattctgctttctgtgtctgtgagcttgactactttaagtatctattctaaatggaatgatacaggacttgtctttttgggactggcttatttcacttcgcgtagtaccttcaaggttgatccatactggtagcagaatttcctttctttttcaggctgaataatattccattgtatgcgtagaccacattttgtggatccgttcatccactgatggacgcttgggggttgcttccacattagctattgcaaagtcaataatgctgctgtgaacacgggtgtacagatatctctttgacatcctggtctcaaatattttggggatatacccagaagtgcagttgcttgatcctatcctgtcccttgcttttccctttgcttccttgttttttttttttctttttgttttatgggagtgctgatatattcaagtatttgttgattgcatgcattatgcctgacttgctcaaagcatgatgtcttgagcacttagcaaccttgtgcctgctgagtggtggaacagttctgaaaaggtctgttctggagtgggggtgctgtttcggagagcgatgaatcaggggcttgggtgctgactttaggaggtgcggctcttggaaagacagagtgtgacttccccagtgtggtctccttccttttcctcaccacttctcctacctaaccccaagaatgagtccttgagtctgtctcagtaggtggatctgcattcagtgcagggcagagcctgggtggcagtgcctctccttgcctccctggctgctacaaggtcctgtgtarcatctggtgtggacccagcagccaggaggagagctgagtgtgattggggtcgtggtggggccagtggcagtggatctctctctttgttgggctgggccagcgcttgaattgagaggggctgccatgtgtctggggagggcagaacccagcgtcactgacaccctccagatacagagttcttgctctgtgtttggcccatacctaatgttgtgaagtggaaatactggggtgtgttttgaggctcagaacacctgtgataacttggtcrtgtgtgtgtgtgtgtgtgtgtgtgtgtgtgtgtgtatgtgtgtgtatgtgtatatataaaattattttccttaacaccactgacctgaaggcagttacacgtaatttacaaatgaggaatctgaggctttgagattgtcaaggtcacctgaccagtgactgcagaggctggattggcctgtgggcctgagtccgtaccccttttcactggctcctcctggaggccacatgtaccttgcgcttcctggggcttggtcctggggtttcatctcaggttgacccccgttaggaggaagtaagtaggaaggaaggagatttcctgggtattagggtgtcctcaagcctgcagctctcctgggactgcacagagtttactgtcggacatcagttctgatatggtgcagcagacatggagctggtaagtggttaagatcagtcggacatgacaacctccagttctgcagaagccacttcatttgcctggggataaagcaggtccttgtgagctcatcgacatgcatttggcagaaagtgcgctggctctgccagctcccagtgtgagcttctagcaagccccttgtgccttagatgcccaggtcttttcagaataagcctggcttgttttaacttgatgcaacttgctgctcacagtcatcttattgtttgctgatgaattcagacctccattcatttaaatatttgtcagttatctaccatgtgtcaggcattaaatttagtgctggagatactatgggacataagaagtccctgcttgctgggagtgtgtggtctaattggtacttgggrcagtgtggtttaactgccacaaagttaataaagcagcatgatgtgacagagctggatgtgggggagtgaggaagcttctctggactgggtggtctgaaccccatgcagggaggaaactgtggctgggaggagaggaggccggaagagaggtctgggcttgggtcccaaccactgattccagatctctcaacatttgtaacacgaccaactcctgttctttttttttttttttttttgagacaggctagagtgcagggggacgatcatagcttactgcrgcctcgatctcctggactcagggggtcctcctgtctcagcctcccaagtatctaggactacaggtgtgtgccaccacacccrgctaattttatttttatttttatagagacggggcagagtctgcagtcacatgccttgcaagtagcagagacagggtttagtctcggtagccagtgcctagggcacaggtcttggccagaggagagaaggctcaggtgaaccagtttcatctgacctgcttgctaactcaaacatggctgcccaactgcgtgggctggcaaggtatgtgaggtgggtagctgggtggcccgccccttgcaggcactggggcaggatatcagggggtccagaagaggttgggtttaggcagagtagaggtgattgtgtgggccgggggagcaatgtcaccttgaatgtgtttccatacccagggcccagatggctcaggaggagggggatggggacggggagagtgaggtctttttgactttgatgtgctttgactgcacatcagagtcaaacgagtcagaataagcgggacccctccacaggcatctcagccctcctaatttagcctttctgaagtggagccttgggagccgatgaagcttaataaactctcctggtgcttccagtaggcacttgagggtggacaccaccgtcttcaggtcataggaagtgtgagctagcaggaatcctggagattttctagcccaacagtgtccggtcaaaatagaatgggagccagaaatacaagccacatgtaattttaaattacttttaaaacatttaaatttagccacggttttaaaaagtaaaaataggtgaaattcgttttaatattttaacccaatatagccaaaatcttggcatttcaacatgggatgagcataaaataatgaaggtgatattttattctttttttggggtactaaatctttgaaatccggtgtgtattttccacttaaagcacatgtcagtgtggactggccccattgcaaatactcagtggcctgggactggggtgaccaagtgggatgtggtggggctggtgcmgtccaccattctcacagcaggcatctggggtcaggggaggcagggcactggcygtgctggaagcaggggattggctgtgctggtgggaagccagattccagccccagacactggtacctttggctttagatccttggggtggggtgggtgcattgcttctcctgggagggaggagcgcccgggagccyctgaccaggacctggggcaggtccacacaggccctggatttctcctgtatcctgggcctggccctgctctcttgactcccacctcgtcacagtggcttcagctttttcaccctgagaagggaattcaaagcctctgcccctctcaggcaggcaccaggatatgattttcttttttcttttctttttgtttgagacaggatctgacttggtctggagtgtagtagcctgatctcagctcactgcagcctccacctcccgggctcaagtgatcctcccacctcagcctctgaagtaattgggattacaagcacatgccaccatgcccggctaatttttgtattttttatagagatggggtttcaccatgatgcccaggctgttcttgaactcctgagctcaagcaatctgccctcctcggcctctcaaagtgctgggattactggcatgaggcacggggccctgccctgggtatgattttcaagtggttggtgtcttgtgactggcagctgataaacgggtgatacaatgtttctgtacaggagtctgcagtgccaggctgcaggggcggatggkggggggtgggtgggtagcctgtggagcccgagggtgggaacagagagtcttcttttgctgtaggtggaagcctgtctggctcctttccctctaaggtcagacagcttgagagatgtttccatcctcccatgcatgaccctgaggcagttagctggtcagttactcactgtgctctctgccaactctaatgagccaggaagcctccccgtgcccaggcgtgctgtgatcacagtgttcaatgatggggtgaggctgcagcgtccagccaggggctgtgccacaggggccagaagatatctgacctactgtcactgcctcttccactctgttccacctgcactggggcaatgccatctgatgaacagatccatttattaattcaacacgtttgtattgagagcctgctgggtgccgggcactattgtcracatgggtgatacagcagcaagcaaaacaagagaaacatctttgcaagcaggggagggggcctgcagtgttgggtgtgtggagttgttgctgggaagtagagaagctgagtaaagagctggacggagagagatagccaggcccatgtctacagaaaagcattctagactgagtgagcataaatcgcaaaggcccagaggagggagcatgcctagctagccccctagacctggtgaggctggtgtgggttgggcagtgatacggtttggctgtgtccccacccaaatctcatattgaattgtagctcccataattcccatgtgtcatgggagagacctggtgggagmtaattgaatcatggtggtgttctcccccaagttgttctcctggtagtaagtgtcaggtgagccgatggttttatgaggggtttcccttttcacgtggctgtccttctttcttgcctgctgccatgtaagatatactttttttcttctgccatgattgtcaggcctccccagccacgtggaactgtgagtccattaaacttctttttctttattaatttcccagtctcgtgcatgtctttatcagcagcacgaaaacagactaacgcaggcagcctgtgttgggaggagttggcaaggagggaggaggtgctggccagtagagcacatgtgtctctgtgcrtcagagcaaggacccgggctctccccgtgagtgagaagagtccatggggttttggggctgaggaggagttttacagatgaccggtctgttcttggcacttgcaattagcggaccgtctgtatccgagtgttgatcgggtggattctaaccctgtgggagaactccccagcccgtagcctgcgctcactgtacctggcagttgtattaatgacgtcaaatgcacagtccagcttgagtcccctctagaacgtgggcagcggacactaagccgagaggaatcgctgtgggttggcagacactgtggagactgactcctggacaggctgtggaatgtgtggaagcaggtacagcccaggcccgcgctgaggttcggcagggaagccagaggagtccgcagcccgggagacctggcctacagcggagagagtcagtccatgccagtggtgggatgtggctgcaaaaaatggtcggattcatggaagtctggtgtccagctggcaggcattagtggtcccatgaatacagctgtgtgccttgaacacgtactgcagagcttccagagagcaccagggctgtgggggctagagactgtgtctcgtgcggaagcgtggctgagaaggggctcgacaggctcttcgtcactgtgcggagccttcgaaggacttggatgtgcttgagaccccttcccctaattgctgtgtagggcaggggtggacatcccggggatcgtggagtctagggagccagtctgcacgggatggttttagaagccgtaggatgtggaggttctggctgaaggagccagaattccagtgccagctccactcctcacgagctgtacaacctgggccggttactgacccctttcccaccttagttccctggctctacaatggaggtaattatcgtgttgaactcacagggtcgagatcatatttaacactttcacagcccttagaagtgtctagcacagtggtcctcagcatttggaaatgtctggaaacactttgtcacacctgagaagagggatttcctactggtgtctagtaggtagaggccagagatggctgctaaacaccccataatacacaagacagaccccgcaacagtgaactctctggcccctccaagtcagtggtgcagagattgagagatcctggtttcgcgttttgagcgtgcagtacatttcagttgttagtggaacatgcaatacatctttattcacatgttattacttatttgtcagatgtttgtaaaacatctgctacattcttggcagtttaatagaatctggagatacaaagaagttcctgaccacagaggtcatttaggcaagctaggaaagcacagaatgatataacacaaagttacattgtaccataaagcatattctatagtacacttaactctggtgggctcttggtataaaaatgtctccaatctcagaggtcatgggatagtgggcaagacatgaaaaccttgtataatataaaattttgttacctctaagtgctgaaattaaggtataaacaacgtctcatgggaaccaaaacatcagtcatttggaagtataagtcaagccttcgtaggagaggaaccatttcagcccgatattaccagagtgggatggtcccagcgagcgggatgtggagggttaggatgttatcttagtctgttttgtgctgccattaccaccaagtagrtaatttataaggagcagaagtttatttggctcacagttctggaggctcggatgtccaagatctagaggacacatccggtgagggtcttcttgctgcattgtctcatggtggatggaagaagggcaaggtggagagagagagcaggaaggggcctaattgtscttttataaggaacccactcctgtaataatggcattaaacccattcatgagaacagagcccttgacccattcatgagaacagagccctcatggcctactcttatgagaccccacctcacaacattgttaacatttaggatcaagtttctagcacatgaactttgagggacacattcaaaccatagcattctgccccagtccccaaaatggatgtccttgtcacatgtagaatacatttgcttcttacctataatcccaaattcttatttgtttcagcaccacattaaaagtccaaagtccacagtctcatctaagtcagctgtgggtaaaactcaaggtatggttcatcctgaatcaaattcccctccagtcatgggctgtgaaatcaagcaagttgtctgcttccaaagtacagtgatgggacaggcataggacagatattccattccaaaagggagagataggcaagaagaaaggggcaactggtccagacaactccagaacccagcagggggaacaataccaaatcccaacttgacaataatcttctttgactccatgtcctgccttccagacacactcgggtagggacttgggcccccaaggcctccggcagccctgcttccctggccttgctgggctcattccatgcagcagctctcaccggttggagtctcatgcttgcagctcccccaggttgctgttgcacactggtagctctgcagttctggggtrtcaggatggccttactcccacagctccactaggcttcctggggactctcagcagctcagactccacagttctgctgggcattgccctacaggggctccctggtggtggctctgaccctgcaaccagtctctgcctgggtcccgagtctgtccgcaatatcctttgaaatctagttggagggagccaggcccatagcccctgcattctgtactctggtggcattaggaccatgtgggatgccaccaagactcaccacttgcaccttctagaatggtaggtcaagctgcacctgggcccatttaagccatggctggggaggcagaggagcactgtgcccaaatgtgggagcagagacttgaggtggccctggacagtgagccacaggtcctgagggctcccaagacctggcttttgacatagttccttccctcagattttggcactgccggagctgtgatcacaggtcatctctgcagtacctttgggatcattcttattttcttgatgaatagcctctggcttcattcttattgtactaatctccttatcaaactgtggctctggccaatactaatctccttatcaagtggtccatactaatattcttattaaactatcaaacggtaacatgcctgcacccttgctttcctctcctgaaagttctttcattctctactacagggccggtctcagaatccttccagtctctaagttctgtttcgcttttcattataaatttctttctttctttccttcttttttttttttttttttttttgagatggagtctcactctgttgcccaggctggagttcagtggcacgatctcagtttactgcaacttctgtctcctgggttcaaaccattctcctgccttagcctccctaatagctgggatttcaggtgtgtgccaccacacccagctaatttttttgtatttttagtagagatggggtttcatcatgtcagccaggctggtctcgaactcctgacctcaaatgatccgcccgcctcagcctcccaaagtgctaggattacagacgtgagctactgcgcccaaccctgcttttatttataagtttcatctttaaattatttatttcttctcaagttttacagtatacagttaaaataagtcatacagcaaccaaaatgctttgctgcttaggtatttcttccaccaaatagcctagtttatcactcttaagttctgcctgctatacagtttgaggacctggacacaatgtagccacattctttgctgctttgtaacaaggatgactgttatgccagtttccagtaccttaatcttcagatatatctgagacctcatcagaatggccttcacgatcgatatttctaccaccattctgatcacaaccacttagtctaagaagtttcagactttccctacagatcttctaatcccgctttattgcctgcctgcctccctccctcccttccttctttcctctctgctctctctctcttttcttcctttccctcccctcccctgctttcctctcccctctccacttcttggcaccaattttctgtcttagtccattttgtgctgctgtaacagaataccacagattgagtatattataatgaatagaattttatttggctcatggttctggaggctgggaagtccaagatcaaggggctgctctggcaagggccttcttgctgcatcatcccatggtggagagtggaatggcaagacagatcaagaggggacctaactggccttttataaggaacccagttccacagtaatggcattaacccatccatgagagcagagccccatgatctaaacaccttttattaggccctgcttatactgttgcactggggatcaagttgcagcacttggacttcgggcaacacattcaaaccatagcaggcaccttaataaaggtggaaaagggatgtggcagctacagtgggagggaaaaggtggctcccttagtgtgcttgggaggagggtaagagatgcgtttgcagttctcatggccgcagactgaaggggcctggttacctaagggaccttggcttcatgtaaggagtgcggagtgagtgaagcaagagggtgatttgatccatatcatttcttagaaggataccatgttggcagtttcgaagaaggggcatgagtgaggaaacagttgtggtgaagagaccagttaggaagcctgtaacttggggtgggatctggaaccaggctgtggctccggaagaggagctggagggctgcactgtgaagtatttctcagagtctagacaatgtgaccttcacactggggctgagttttgtaaaatccgacatccccagtttcacctatgatgccaggcctgtggtaaggagctttgcaagcatttgctagaatatgagcaaatggaggtagaactgataatatttagtaaccatggggggatgaaagagggaggtgttgggagactgggttgataatatgggggttgggagtgaggagagagtccagctttgaacatcttcttccatttgaggaatttaagatcatccagctagaaaattagaaatactaggatggagtgtggaagagaaattagtgctgaaaataaagagctcgaatcatcagtgtatgaatagtagttaaacctctgaaaatgagtgaacttgtcccctgaaaatgtgtggcaggggagaagcgaggttcaaggacagtgcccccgagaatgccagcatttaaagggtggaccctcggtggctcacgcctgtaatcccagcactttgggaggctgaggtgggcggatcgcttgaggtcaggagtttgaaaccagcttggccaacatggtgaaaccccgtctctactaaacatacaaaaattagccaggcatggtggtgggtgcctgtatcccagctactagggaggcacaagaatcacttgaacctacaaggcagaggttccagtgggttcgtgccacttcactccagcctgggtgacagagggagactccctctcagaaaaaaaaaaagaagaagaagaaaaaaaaaaaggtgggccccggcagcagagcctactgtcccggaggcaggaggaaaacctgaagggaatcttgaccttgacctagaagccaaggaggaggcatggccaacaacatcaaaggcctctgagcagcgcagtgaagactgacaatagacctttcttaagtttggcaattagaaggtcattggcctcagcaagagcaatttcagaataaaaacaagagtggagggagtggcataggggtcgggggacagagtaggaagtgagggtgtagtagaggggaagaagtttgatcactgagggaaggagggagatgcaggggtagcttgaggaggagatagagcagagagaggtttgctgtttattttaggaagaggagacttgagcatgtttataagtcagagaatagagaaggagaggtgggagacacagggaaaagaggagtcattgattgggaactattctgggaaggtgaggtggatctggtgtctaggtggaaggatttgggggaaagaggggaggtaggagagtctagacgtagacagcaggcagacaggggctccaggttttccctacagaactgaggacagtgatggccgagcgtggtggctcatgcctgcaatcccagcactttgggatgccaaggtaggtggatcacttgaggccaggagttggacaccagcatgggcaacatggagaaaccccatctctactaaaaatacaaaaattagccgggcatggtgacacatgcctgtagtcccagctactcaggaggctgaggcacgagaatcatttgaacctgggaggtggaggttgccgtaagctgatggcaccactgcactttagcctgggcgatagagcaagactgtctgaaaaaaaaaaaaaaaaaagaagaagaagaagaactgaggacagtaagagtaagtggtcgcttgtgatcacagaaccagcaagtaaaccgcgagcttctgcccctctggtcttcccagaccccttccccggaacattaagccatatcgcttttatgggtccaggggctctgaggggctgggcatcatactgtgcccctgggggcatatctagttctgccccacttggttgggcgggtacctgctgagtactcactgtgtgttaggctgtgaatgctggggcagcaggaggcatggtttctgcctccactgggccttatttcttcaccttgtcccccagttctgcccttgggtaagttctgtggcagaactgaccagctcccttcggccagggacatcttggttcctggcagagcaccaagaagagcagattgtcttcctacccgggggcacctttgcccagcaggtygggtgagctggcctcttggtgagaggctggtccccttggacatgagtggattcgatgcctgctttcccacccaggtactctactgtggctttgctcctgccctttatgctcagagctagaccagcaatgtgggggagctgctggggaaaggcgccatgttgtcttgaggtagcagccagccccggaagccctggaatgcctggggccactgagcaatcctcaccctcagccccacaaggggagggcgtggctcgtgaaattcctgattgggtatagcccagcaagccccaagactcgcccagtttgcttagcgcaacactgacgctgttttggaatgaagacaagacaatgtagaactttactggggaagaggtcgaagaagggctaattgtcttgttgttcaagactggttagcgctgctcacctctgacgctgctcacctctgacgccaaaggtttttccctggaaggcagccctggaggatacctgtgtatctgtctttcacaaaaggtgaaatgagctctttgtagtgtttcccgcccaggctgcattttagaatcacagaggaggtacrgcgctgatttgttttactattccctattcatgcctgggccccacccctaaccaattaaataaacatctcggagagtggggcctagactttatatgtttaagctcctcaggtcattgcattgtgcagccaatgctgtgacctatgaatacaaaggaagatgaaacgcaccctggtcatgcaaggaagatggagagagggagcagggagggtgagagaggctgcagttcgtaaggtcctgaaatgttagagctggagggatcctggttcggagcactgcaactcaaaagagtagttctagccatgcagcaggccccattagggagctggttagaatgcaaatccccgcctgccctgcaccccatctggcaccctctgagtcacggcgtgcacatcgaggtttgagaagtgtgctttcaggtcacccacagatcatccagaccagtggttctcaaccttggctgcactttagaatcacccagcgggcttcagcgaattccagtgctgggctagatgaattaacccagaatttctaggtgttgggacccaaatactcatttaaaaaattttttttgtttaagtacttcaggtgagtctcttcttcagccataatcaagaayatcaggcttgaccagtgcttctcaaactyggacagatagatgaatcgccagggtatcgtgtttaaatgcagattctgattttataggtctggaaggggccaaagaatccacttgtctgggctctgggatgcccatgggactgatctggccttttttgagcagtgggaataggctgacttctcagtttgacagcraggaaactgcaggtcagagagggaggtgtgatcgtccacggtaaccaacctgatatgcattcagtactttctgatgtactctactgtgtgccaagcagcatgctacatgtgggactagagctgcgaacaggacagacccaattccaaccctcacagagcttatatcccaactggggagacagacagaaagaaaacaagtaactaagctgatgacagatgggaaaagctatgaaggcgaggagggccatgtgtagggaacgactcagagattgctgtggggtgaggggtaggtaaggcacgcccctttcagaagagctgtcgggggagttactaggacaatacctttaactggggactcctgctgattacaaactgatcacttttctttactggacaggactaggcttcatcccctctggggtttggggatggtgcttctgactctcctgaggcagtctgaccctggtccctgcctggctgtctcctctgactcaagactctgatccttcagtgtttgtgggttcagagcagagcctgggaatgagcccgctggggagcaggacactgactccaccataggacagggctcaggatcattggttaatggtttgtaaaatggaccaggcctcatccagatgctgtccccagcccctatgaaaacatggaaagtttccactggtgcacaaacactagtgcttgcctccctttcctgatcaaccgtcggactcacatgggctgtttgtgaaaatgcctgtcccaggccatactcaggctgaccaaggtggtctggtctccagggaagggccgtgaaatgtatttttaggaagtggtccaaaggactcttctgatccagatcatcaggaagcatggcgtggatggaagaaactggcacttggcatctggtgcctctgtgtggctgtagaagctacagaaatgtcttctgcagtgactgcagcgtggccctggctgagctggtgcttgtgaggaagcctctgcttgtgtgcaggggtgaacagcagctcaccccttcccatgcacagtcctcaccttactaccttcacccttactggaagcatctcttgacttctctttggccagccagaccctcccagctccctgtgctccccatttaaacaccttccctccctgagcttagcccatggctgggtggggaggcgtgagcactgtttgcatttggtcagggcctagaagggatcaaggaggcctcatgaggaccatgtcatagccccaccctcactccccacccctgacctgagcaaacctgtttggctggattgatgatggagaggcaggcagtgaccagaccaagagacgccttggatggtggagaataggtgaccctctgttgggtaaaagaggactcaagccctcacacagtgagttggctaactttttgtctcaacagtgggcgggggtagctgtctgcctcctggagctggcccttcctgggtcaaaatgcagaaggagatggtgagaagaaccacaccagagaggctrgagtaggccagcctggcttgggaccgagtcccgagtccctggctggacmctcggttttcccttccgtggcagggctcacctggatccttaatgccgcccttggaggagttaggargatcctggatgagaaaactcaccctcaggatgattgccccagggagcagcttcctgctttctggtggaagggaggggcagacagtgggtgtgtcctgctccagtgtctaggcaggagagtttgtgaagcygaccggacacctgtggctcttatttcctaggtggcccgaggcagccgggatgacagctctccccaggaatcctgctgcctgctgagaaacatggtcagcaagtcccgtgagtgtcatccgagggctcccccaccctggaggacaggcctcagaagccgtcttcagcaggatcctgggacctctgggggctgtggagggacagacagggagccaggggcccttctcttcatcttgaaggacagtgggtacaatcagggtcaagccctcagccagggccaggagagggccagagactgcttctgttgagttaggggtcggagggactcagaagggggcaggtgggaaggtggacgggggttgtacctgcctgttgctgcctctagctcctctctgcatgtgtcctgcaggctggaagctcctggccatgttggctctggtcctggtcgtcatggtgtggtattccatctcccgggaagacaggtacatcgagctgtgagttcaccttccatgtccttccagtggctcttgtcagggacagggcttagggatggagcatcatggagcgggggacctagtagggcaggaaggttccaagagccggcacatgacctcatcccttcagctgctggtacggagtgtttccatgagggtgggtgggggtagggcctgggatgtctcactgggccctcacccagggagtgcaggggcaggaagacctggatcctcaaggacttgggttccaagtggaacttaacttgagatgattcctccccggcaccttgggaccttcatgccgtgggagaaggcttaggctgcctggaacatgggtccctgggtctgactggggcttctgcctcctgtccttttttctctccagtttttattttcccatcccagagaagaaggagccgtgcctccagggtgaggcagagagcaaggcctctaagctctttggcaagtaagtacttaaggatgaggagggtagagcagggcatggagcgagctgggattgagggtttcacagtgtggggagtagatggaaagagcagctgtgttggtggacatgggttaggtgaagccagggarggaagagaaggccttataatattagtcatgggcctaaccctacttctggcatcaagattaattctgttctcatccccacccggctttcacctctgtgcagctactcccgggatcagcccatcttcctgcggcttgaggattatttctgggtcaagacgccatctgcttaygagctgccctatgggaccaaggggagtggtaagttcctacccggctcrtgggaaccatgggctcaccctgaccacgttgcttcctattctctgccgtccacggccccagtgcccaagttctgagcctgactcgggtaccagggtcaggggaagaagaaggcagccagcgctctgaggagcagtggagggagggcaggcagccttcagaatgctatctgtcacatcagtccctccgcctggtactttttgtagaggatctgctcctccgggtgctagccatcaccagctcctccatccccaagaacatccagaggtaaggcggcactccgactccagtctgggcaccttctcctatttcctgccccctgcccgctccccccactccccacccccccgctctgtgaaacagtcatggactggtaccatcccagccaattctcatggtagcctagcctgggcatctgggtgcagagtgggcagaggctgctcgagggtattgcaacagtggggcaggcgtttctcattgatacacccccccatgccttccctccactcctctgccctcttctgtgctctgcgcagtctcctcctcttacaaagcccagggctgtaaagtcagcatgaccctaagcaggaccacggggtgatgcctgcttcatggggaccaggggctgagggggcctaggaagtggtcctgagatgggcccaggcagatccagggcagcgagcctgggttagagtgtggggtgacatagaccactcctctttctatggcagcctcaggtgccgccgctgtgtggtcgtggggaacgggcaccggctgcggaacagctcactgggagatgccatcaacaagtaygatgtggtcatcaggtgtgtgtgactgtctcttcctactgttgtttgggaactggatgtccgagccagggactgtagacaggcccaggaggcctctagtgatgggaatcctcctcccaacccccagaytgaacaatgccccagtggctggctatgagggtgacgtgggctccaagaccaccatgcgtctcttctaccctgaatctgcccacttcgaccccaaagtagaaaacaacccagacacactcctcgtcctggtagctttcaaggcaatggacttccactggattgagaccatcctgagtgataagaagcgggtaagttgggggacagactgggggctgaggcctggcggtggggacgctgcccgagtcaggacctcacgctccttgatgtccgcctggcagtcctaaagaggctgtgaggggacagcatgaaccgggctccyggaagtcagcgccttaggctgccctccaagggtggtgctcygataagctgccccagcaactgggtataaaagcctgcaggcgtcaggtggcagcagccacaggcacccatgctccaggcgtgtctgtgacaggaaagctttccgagtaggtgtttgcctgtgaggaactcgggagctgagcaaccctccagcagccatctccaggctgagggcaggttagagcaatgaggcctgtgtccaaacagatggtccccagaaagagttcactacatcactttgccatccggtcacaggctgaactgtcccatctggcatttttgtcaagtgtttagacagcctaaaactttagtcccttctacctgtgtggatgttcttggaagtggtccatggtttagaccctccactctatacacctggtcacctggcctcccgagggggtgcctttcctcctctctttccctggtcctctcctggtctcccatctgtggcacagacttcacctccctttcctctcaccttgtgctcctgaaggcctctgccatcgcttggaccccctcgcctcgctgaggaccactgggttggatttgagaaacagggcttcaccygcttctgtctctctcttctgaccccatcctcctaggtgcgaaagggtttctggaaacagcctcccctcatctgggatgtcaatcctaaacagattcggattctcaaccccttcttcatggagattgcagctgacaaactgctgagcctgccaatgcaacagccacggaagattaagcaggtgatgatgggaagtcaggcctgagggctaggatcctgggcgggaagtaggagggatgwtcctatgggcttaggaagccctggaaggatcccataacagaggcggcggtttgcattttccctccaggaacacacctgtcattaaagttgctgctgcaaagggragtgcacactttagagaaccaaggggcatttactaagtggggagggatggggatggcctggatcaggtttaggggctggtgtgagaggatggttttggcaggcgctggtcagaatttgtcaactggggagctgctggaacagtcagtggtctgatctgtggaacaacttgagccatgcagagttactgttagatacttcatctgtgatcttatcttgaaacactagtctgaacgagttataagagttggagctaaacagtttgtcttgcatgtcatgatttggtatggtgtgtcaattcagggagtcaatgtagttttgcaagttatgggtttttgttttgttttaaagatagcgtctcactctgccacccaggattgggtgcagtggtgcaatcatagcccactgtaacctcaaacttccaggctcaggtgatccttctgcctcagcctcctgagtagctgtgagactacaggtatgcaccatcacgcctggctaatttttaaatttttttgtagagatgggggtctcactgtgttgcccaggctggtcctgaactcctggcctcaagtgatcctcgtgtctcagcctcccaaaatgccgggattacaggtgtaaggcactgtgtctgaccacaagttatgtgttatgtgtttcttctttttaacctgatgtccttgagccatagcaagttatggttttgagtgcagtgccctggtggtcttcagctggtgggctttaacccactttgtagcttcccaagtacttccacccatatcttggagcccctcggggaggccgtgtgggatggtgagagacaggcacyagcagacacaggtatggcgcttggctgtgctgtgtactgtgtggggcttggcaggtcaactgctcagatccttgtttttcttgcctgtgtggtgggataatatccataatgaccttttaaggctgttgtaggagtttgaaaaataataatgatgtaaaatacctattctggagaccggtacacagggcctgccctttaaatatttgccagattttgaataaatgattttattgtttactgaacatttcctkytattccatgttctgtgttgaatggctgcttttgtgactgctcaatgccaggccccgagtcttcttgcttggcgaggaagttgtgctccttgctctaagggacctcagtctagcagagtaagaatgcaggttgcactgtggggtgataaaattccacaatggagagttgttcccaatgccgtggaatctcagaggaggggcagacatctgctgagagatgtctgggaggctccccagaggaggtggtgctggagccgggcctggaaggatcaggcagagagctggggaaaggcattccatttggccagagcaggcggctcctccagcactgaactgtttccagtacaagtggcgttgaagggcaacaaggagtttcatgccattcataggattacagatggagaggaggctggagagggagatgagagagggcgaggacctgaacccagctcctggcagtgggaagggaaaaggaggagatggactcaacattgtgttggttgtttttttttttgagatggagtcttgctctgtcacccaggctggagtgcagtggggtgatcttggctcactgcaacctctgcctcccaggttcaagtgattctcctgcctcagcctcccaagtagctgggattacaggcatgtaccaccacacctggctaatttttgtatttttacgaaaatacaaaacacaggagtgctggtctcgaactcctgaccttaggtgatctacccgcctcggcctcccaaagtgctgggattacaggtgtgagccactgcgcctggcctgtattagctttctgttgctccctaactaataccacaagtttagccggctaaaacaatacccatgtactggctcatggtcctgtagatcagaacagcagggtgtggctggttctctgtttagggtgtcacaaggctggactcggtgtgtcaaccagacagttctcatctggaagcttgggggaaaattttgcttccaggctcattcttgtggttgaaataattcggttcctgcgattgtagaactgaggtccccatttccttgctggctgtcagctggaggctggggsccacgctcagctcttggaggtggcccacatttcttgaccgtacagcctccatcttcaagccagcgacggcacaatagatcctttctgtgcttcaaatctctgacctccgtttctgatcttgacacccggatttaaaggttcaggtaattaggtcaagctcagcaggacagcctctccttttgtgttcaactgtgccatataaagtaacgtcacgtaatcgcatcatattcacgggctccccacacgcgcaagggaggagattacatgagggttagcrtcactggggttctcttacgattctgccttatatattttacaggtggaattgagagatttctgaccaattctgggtttctagcttggacagccggtagggggcggggggtggtaacatatttaactaatagagagagagtgcaaggaagaggaggaatttggtgagtgtaaggagactgtgtccaggcagagctggctagaaggccatggaagtgtggctcagcccagctggatgagataacacactggtggtgaaagcaacaagggtggaaaagaaggtccagccagggagtggaagatgagaagacaggagagctcagagagggagaaagctggcatgtcgacaggcctgatgaggtccaggaaaggctcccaaatgggtatgggcagctgaaattgtgtgcaaagcaggttgctgaagcggaggaaggcggggctggagaagtgagaatatcaggctgcccgtcactgtggatgaattaggcatgagcaactgaggttctcagagcagccagtaaggtgaatgggaaaggtactgctgtcctgctttaaaggagagggcagccaccatggctcacgcctgtaatcccagcgctttgggaggcagaggtgggtggatcgcttgagcccaggagttcgagatcagcctgggcaacgtggtgaaaccccatctctttaaaaaaatagagcgccacccccataaagggtcrcacagttagtgcatgtcagagcacccaggtcttctgaatgaggtcaggttctccaaggaggagggcagaacacttcctttcctttgaatgagttgcttaacgcttttgtaagccttggttttctcatctgtaaaatggggctgatgataatagctacctccaagtgtttttgtgagactagatgagataatgttttatagtaggtaggtaaaatactaaacatagtgtctggcacatagtgtttaaaaagtaactgatatgatgatggctgtcattctgattgttagtcttatctctacaggccccaggcctcccccagatgtgtggagctgtaccatccagaatggtagccgctaggcacatgtggctatttacttatttatatttgtttatttttagagatgggggggtctcactatgttgcccaggctggagtgcagcagctcttcacaggtgcattcttagcgcacgacagcccaggagtcctgggctcaagcagtcctctgacctcggcctcctgagttgctggaactatgggcatatgcactactgcacccagcacatgtggcgatttaaatttacaatttaattaattaaaatttaataaaataaattcagttcctcagctgcactggccccatttgcgtgctcgttagctcgtggcttgtcttgttggacagcgcagatggagaacgtttccgtgactgcaggaagttccactgcagagcgctggcagagatgatggtgggaggagcagggctcccactaacaccctcctgcccctgttcctcagaagcccaccacgggcctgttggccatcacgctggccctccacctctgtgacttggtgcacattgccggctttggctacccagacgcctacaacaagaagcagaccattcactactatgagcagatcacgctcaagtccatggcggtaagtgcctggcttgtgagcatggtgggccagggcgtggacgggcagacagtcagaggggcactgggtgagtgggagcagtgctgagacccagaggtggctcccgcagtcagaactggaaccgaggcacctggactccctggccagcatcctccatgttcagccacatgggctttgtcttccttccaagagccagcctggggaagggagctcccawgaagtgtggggccattgggaggggnagggagactttcctggggacagagaggtccctgggagtccctcagtttatttccttggctgtctccacaggggtcaggccataatgtctcccaagaggccctggccattaagcggatgctggagatgggagctatcaagaacctcacgtccttctgacctgggcaagagctgtagcctgtcggttgcctactctgctgtctgggtgacccccatgcgtggctgtgggggtggctggtgccagtatgacccacttggactcaccccctcttggggagggagttctgggcctggccaggtctgagatgaggccatgcccctggctgctcttatggagccgagatccagtcagggtgggggcgctggagccgtgggagcccggccagggcagggggctcgttgctgtggcaccccctctctgccagcaccaagagattatttaatgggctatttaattaaggggtaggaaggtgctgtgggctggtcccacacatccaggaaagaggccagtagagaattctgcccmctttttataaaaacttacagcgatggccccaccaaggcctagacacggcactggcctcccaggagggcaggggcattgggaatgggtgggtgccctccaragaggggctgctacctcccagcaggcatgggaagagcactggtgtgggggttccaccgagaaggggacctcatctagaaaagaggttacaaacctaccattaaactatttttcctaaaacggaagcagttgtgatgtcctgtgtcctttcaggtgggggaaggcatgggacagggtgtggcagtgggcaggcttgttagaccagagcagggcatggtcactcaggaaataatgacttattgagtccagtgttgggtgcccggtcatgcattatcaccctggcatagcaggagagtgagtggtgctcacagcacccgtctgcaggcacccagcctggcacccggcaccctgggttactgcccagaggagggaggggctggaggatgccagacgagagtgccagagtcctctcccaccttccttcctctcttccccaccattcttcagttacccaaatctcatgcttgggaggtatgtgttttaaggacaggggtggggtcagacaaagaaagccaagtttcccttctcagattaagtgggaaccagaaaatggagtttatggaaggtcttgccagcggcccaggctgccaggatgggatgggcaggcctggagggcagtgtggaagggatttggcaaggcctaacagccagttgctgggccaggggatgaaacggcttctttcctaggtctttagcatcctaacaatcctgccgtttgcctgtctctcccgccttcgttctccatcttcccagatcctgcttagctgccaactgggcttcctgccaccccacagctgttcctttacatctggagccaggagggagagttggaactccccacttggggaatggaactggcagctgtattcctggctttctcggaaagagttgcrgccttgaggttttgagacaagccaggctgggacaggacagataaagaggggcagcagtttgggaggaacagaggaagatgacatggttctccacagagcgttggaatggccttgtggacacccacttcatcccccagaatggccccaaggaccctcccagggaacagaagggctgctctctcagcagcctggctgctttgccaggggagaggggggttctgagagcgagtagagccccagcatctgcagccccaagcccactcccctccacacgggcaaactttgtcttgaaggctgtgtcctggggagcgagcttgcagacagcaggggttgtgagcgtgtggggatctcaactctgctcaccccgatgcgtccccagctgccgctcatgtggagatgcaagggagtgtccgttttcccatccggggccattgagaatggctgtctgcatacatgatccagctggcctggactgaggccactgcctgttactgaacgtgcctaaactcaagctagaatccggcacacaggggtgggtcagacccgtctaaactccacacacgcacacatgtagatatgggagcattttacattcttggtgggttgtttgtgattctgtgtgcggacagtccttcctgctcacatactgagaagactgtgaatgcggggtgtgtgtatacccaaatagaccattgtttgcttggggggrtggggatagctttctccagggtgcccaacatcctacgcagattgaggcaatactggccaagggtcggagctgagaatggggctttgatgtggggctgttggatggggttctttggttttctgggaaagggactttcagtcttcaattagcccaaccaacgggaatgaactgcctgccagcctgcctgggactgattaaaccataccctggaaatgaggaggggaaagagcacagtagggcacgtgcttgagggcaagtcaggagatctgggttctccaccagcctctgtcgcctttttctgtaagaacgtgggccagtcatttctctgcaacaaaagggtgggtccagctaaggagaaccgcttgtctcagaattacctagggagacttgggaatagagattcctgggtctcacccaggctgctggggacagcaggatcatcgcacgggcctcttgactctacggcctgcgtgtaaagcctgcgctaagccccagtgtccttcagcggcgtcaattaggcgcacgcgcagtttcctctccggaggggcgggcagggcaggggagggaggagctactgmtgtagctcgccccgccctggcgtcagggccgtgcaagcgttgtccgcatgggcgccgcgccgaccctcgcggccgtgggaacccgcccggaatctcgcagggcctgtcgcgcttcgtccaggttgccggcctcctccccgcgcttttcgggatgctggccccggcgccccgcctcaggcgaggccggcccctccctggcaagcggctcaaggcttggcgacggctcaggggaggctgggcggactagggggccgcgcccctccgaactctcgctgggcctcggtcatgccacctgctttgggttcatcgcagaggctggggtgaaactgccttaggttgcgagggagtggaagagctctgtcccatcgaatttagatcctggaagtccacagaggggaaactgaggcccggaggagagaagggactccccgcttcgtcaccttgctgggcaggataagagtcaaggtctctagtgcgggaacacttataaatgttactctgtgttcacatcacatggtgtgccttaattttggatgccaaggattttatttacattttccaaggacacaaatgcattccgttgctttcctccagaggctgcctagcctacgaggagtttgagcttggaacaggtttttgtgggagacagtaaggtgcgatgcacaccaaatagggacagttggaccgtgagttcaactccctgctctgtcgtttagccgagtaaacctctgcttctccatctgcaaagcagtgatcatgcatgtctctctcacaatgaggttttaaagacctaatgggaaaatgatcataaaaacattttgtagagtgtaaagtatgatatcaatattaattggaaagctgccttgcatcgtggaaaatgccagagggtatgaaacaggttaggtacatttgtagggccaaatacttggccaggtagtgagtaacatggctggttacagaaaagtctttgtcttcaaatcacccacaaggtaggtaggggaaggtaagacatcagtgaaatgactgcaacacaggctttgcataatcaaacgatgaatagtgtttaaactgctttatattggtggttttctttttctttctttcttttttttttttttttgagacagagtttcactcttgtcacccaggcaagagtacaatggcakgatctcagttcactgcaacctccgacccccrggttcaatggattctcctgcctcagcctcccgagtagctgggattacaggcgcctgccaccacgcccagctaatttttgtatttttagtagagatggggtttcatcatgttgaccaggctggtctcaaactcctgacctcaggtgatccacctgcctcggcctcccaaagtgttgggattacgggcgtgagccaccgcgctcggctattagcggttttcaagttgaagtcggacacctttagggattcttggggaaagagatttcttgggagacattatccatttcaatggtacctagcatgccacagtagattcctaaacaaaggttgagaagtataacctgagtttgtcagctctattctaatctctccaacctttttgaagtcttcattatagcttcggaaaactgttagtttccaacattcccataattctgtactagatgtggttccaagaaatcagacctttctgacttaaaagtttaaggaggggtatgcgcgtggtgtgcgtgtgggtgtgtgtytgtctgtagttatagctggttttcctgtccagttcaatctcattgagtttatctctcttgttagagatttttgggatcctgtgcccaataaataagaagagatgaaccttgagtctcattagatgacagatttttgagaagctcaaatgtatgggaaggctccacttcttcacttaaagggactgcagatggtgtgaagcaggtgggagagaccccagtgctaagagggttattacaacagggcttggcaagaatttttcagggaaaaatgaactttgggaggcgggtgctgttttttgccccattttgggttcccagggaaaggtaacaatttaaacacacaccacctgaacagagacatagcttcctctcaagagccttggaaggctgggagagtggtgttgggtggagagaatgagagcaggctcagatgttgaaacaaccctaggggatyggagttggaattgctgaactgagctagtccagagccatctatcattctgagtcttcccaaaacactatttacacagatcaccaactttcacacttaaggagtgtctccccgtttctcttcttactaagcatggagctggtggagtctggttggagatagccttcaggtctgtgctctttttctcagtgaatttrtgttgcactgatggagcccttgcatggcaggagagctagataaacttttaatttctgttaaaagtcaaataggaagctcttatctgaaaattctgcttaaatccttgtctgcatcactttatctctacttgccttcttcttttagtatttctctgaagtgcaatgcccattaatgtcacaaatgtacttcctagtccttgggcagcagagcctggccctttattttccttgcaaaggaggtgaaagtggtaacttgaacttagtccacctggactttgtctcatagaaagtgatcttcaggccggggccagtggctcacacctgtaatcccagcactttgggaggccaaggcgagtggatcacctgaggtcaggagttcgagaccagcctggccagcatggtgaaacccccrtctctactaaaaatacaaaaaaattaactggccatggtggtgggcacctgtaatcccagctactcgggaggctgaggcaggagaatcgtttgaacccgggaagtggaggttgcagtgagacgagatcgtgccattgcactccagcctgggcaatagggcgagagtctgtctcaaaaaaaaaaaaaaaaaaaraaaaaagaaagtgatcttcagagggatgaatcccttcctatattcagcttctatccagaatagtactttttctcttgcataactgggtatagatttcagataagctccatttagttaaactccagttatttccaggaacatctggactccctgagacctcactagccttctttttgagcattaatagtttagattcaccataaagaagacagttacaaagaaccattttttgaatgttttcagcattccaagatattgccaagggccgtaaggttaaggaacagcggaaagaaatgctatttcttgtctggtattctccaatcagggaactcaaggaagctctctactcaggggatgaggctgtctcagccccgtgggtgggctaagtggactgtttccgagaaaagcactgggaacatggagtggcaggcagatattggcagaggcataaatataaccagggatgtagatgacaatttgatgacgtatcttgtgaatggtgtatattcacagaaggccttttaaagatggaggctgtgggagtaggaagacttatagggcttgtagtaatgaaagctttcagtgtatgtcaaagaacttgctgttagcgaggacgggaggagggccaaggaagaatggcggttagagagggaaagaattaatggttttgcggcaaacatggacttggccaggaaaacaattccttatttctagaaagaagaggagcttttaaattttttaaaatttttctcagtttatgacctggttaggaacactgaaacataaggagttggggaaaggatggttggaggctcactggaaatgagaggcggctatcagtgaatgagctctttatcagtgactcccagagactgctgctaattttgatttgaaagctgcaaattgctggtatgtggttacagttcctaagaacaacttagataagagrttttcaaaagccgttttgaaaggggaagtgaaatttaagatttagttgtcattggtctacatctaagtgtttgtttctttagatgtgcacaccaaggagcatttaaaataaaaatctatttgcaaattaagatagtctttatttacatttttatatttttatttcaataaaaagtgtgttttatagagaaagctcccagagaagaaactaatctcaagactcccttttgtctttttttttttttttttctggtgccaggacaaaccgcacacataatacctgggaagaactaatcaaacgtgtgtgtgtgtgtgtgtgtgtgtgtgtgtgtgtgtgtgtgtatgtaccttgtgccttcggttctgattccataatagcaaatgacccaagcagcacatactcctctccaaccaggaagtgagaaatggaattttggttgactcctttttcttgttctaagaaatctcccaaggactgcaccatgtttgttttcatttccctggctcctttccattctgraaacttaaaatcggcttcatggcctcttgctttatagaatttgttcaaaaaggcttcgtcagaaatggatttgatgtgacatttttgctcttcacgtgaaagtacttcctattccctgaaagtggaagaggtggtggaaataaccctggccttggccgactgatcttgaacctgagaattagagactgggcctccgtccagtgactctgagccagtaatgaagtttaaagctatcggaagactggctgccgtccttggtagaggtgggggtgatttgatacacagaagagctttgtttcccagggctttgtggtctttccgggtcatttggggacttagggtggaggacgccagtcttgccttcctaatggagctgtgcttgtcctcgcccggcctgccccagagcgcatgctagcacagtcttgccttcctaatggagctgtgcttgtcctcrcccggcctgccccagagcgcatgctagcagatggcctttaccatcagccacttccagcgacattctaggatgaatgtgtgtataaagctcatgtttgtcactcrttagcgcttgacgctgggcaagttttctggcttctttaagcctcaacccacatctgtaaaatggtgatacttcgtagaattgtgagcattaaataagattacaaatgtagagcactcattttatttaatgtgaaatcacctatgggggaattcggggcttcccactgcctttgtttttcagcacctcccttcaccagcttttctgcacccccactcatttgtgagaaatagatagtgctggagacagctgagggatgtactcagctcagttcaggcttctcaatgccccagagtcctccagatccccctcattttttccctccatgctcttgtctctcacaaagatcatccttgtgacctcctatcccttgggctattctttgctgcattgggcattggacagtgctaagagggttgggcaccgtgcagcctagtgtttgcagctgccccggtgcgctctgctcagtccatattcttaccctgggtgtgccgagggacaggacaaagggcttattttatagaacatatttcttccccattcttctcgtttataattttggtttccaggaaagaatggaagaatgggcacctccaccctattagtgcacactctgtgtgtgtgtgtgtgtgtgtgtgtgtgtgtgtgtgtgtgtagcaggagcaaggggcagggtcagctgtgctgaggactaggaggtaaatggtctacscatatccaaggtgggaagaccaagagaaataagagaagtaaatgaacagatcctctaaagtcatcttttccttattccagcacaccaaggcattgtgcatatggtcttggatccttattctctgttagccaatggaaaacatatatggaaagaaagcaagcaagcttgctgagattaacctagagagggcaggggccagcatcctgatgtctatgctaggccagcatggtaccagcagcagaatgtgggctgtggacatacacttaacatttctgatcagtttttactccctcaggcttaggggctrcaaaggaagatagccaggtttctgggaaatttcgaagcacttggaaatatgatcgaagcagaaaattcctctgagtggaggagctgtgtaggctgtgtatagaatctgtggattgggaccatccaaggaatcagtgtctggaaagaagcacaaactggtgtgatgaaggttcccatgatgggtaagaactaccagggaaggttggagaagaaaggtttaaaactgacaaggaacctccaagccaccttagggacaatttgggttctttaaagttccatttgaatcccactccctcaacgagcactctaacttgcccctgtttatccaccccatctgccatgaccacatcaaacttwcccacaagygaggcccttcttagaacactatttgagttgtatattaaaatgttagggtgcctggtggtctagactctttccagcrggtcttgttctctgaacctctagaggagggaactttgccttcagaatattgctgagaggaagggtccagaatggcctgkccagtatctagtgtgaccactctgcctctgagctatatttggctgagtcaggtggctggtgagtcccacacktcctctggattgartccacccacaggggagaggagtcagcctgtaggtttwattgccaccacaatcagagctatcaactgcctttattgtctaggawgattgaatcaaaggagggcagagaaccttgggttcccaacgcattctatgagctcttgggttcttcctgtggctttgtaggaacaaaagaacagaacaaacatgttggagtagtgtccctaacatttatttcaggtggtgactaggagggttgaggtgtagatatwcttcctctcttctcgtggagccttactgaagacaggatcgccgttcttgtgtttatcagctgagaagggcagtctcgccatcttaaagacctgccctccagccccttcaaacgccacacttcccaggaagcactctctccrtaagtgttcagagaaccctgaccagagaagctcccgcacttcttatatgaactccgattgtgctgagggggaggggaggagtacacaaagcaggaggtgggtggggaggctggggtcacacagcccaggaggggcacacccggcgaggtgctccgtcagcacaggctccctcctccctccctccccccagtacaccaggctctgacsggaccggtcccaccgcagagttcagcggcatcaagtccaaggacagaactgcaagagtatggacacaaaacaccaaacaaattgggggtgggctcccggccagcctggtgagagagaggctcctttagccaaggccatttctggcttgtcagcctccagggtatgggctatgagcagcagtggggagccggggtttctggggcagctcagtgctgggaagacgtcatccccttctccccagggctgtatgggagcacaggcacaggggtaggtagagcttstggtcagygaggggtagagcccacagagagaccagagagtggaccgcagtttcatgaaagcagagttatagctgccacttgtgcctgtgggcagagcaggtggtagaggggcctccaggaaagggccggggacacgggtgtccagcactaagcacarcgcactcagccgcagcctctgtcygtctccccacccgcccacctctggcacacagcacctggggacccagatttgtgcttgatcagagcttcgaaggaaggcagtggcagaggcgctgggaggctgtcctggaagtggccaattctggtgtcctctgcaaagtacccctcgtccctggacaaccagaacgtgccctgacctcttccctggcccgtccccacccgcgrtgtgtgatccttagacgtgagtctgcatccgccgctgcaggggtcgactggggtcagagttctgggacgaggactgggagtggtgggaggaggaagcagaagccttgctggccttgtcgaactgcacatagccatcctgcttgccgctgctgctgacgctgctgtcacactgcgtgtccaggaaggagctgctgtcrctgagggagcctctctggaactcccgctcacamagctcgatggacgagctgcccatgcccagcacaaaccgctgcccgtagtcgtagaggcggccctggccgctcagggtgctgtagatgttggtgaaggacatgcctgtgggcacacgctgcttncccgcaggacgcaggtcgggctggcagctggagagggagatggtcggggttgagtggtgctctttgaaggtgttgacgctgtagtagccattggtggggtcctggatgggcgagaggaagaggagcgtcacctggtggagtctccactgagcgtggctggggtttccaggctgagcccgtccccttatgcggggagggaagagggaaaacaggaggaagggagcaacctggtagggagcaaactcaggggtgaacagctgcagggaaggtgcaggggaagaaggacactgaacaggagatggcagaagggggactgcggaccccaggaggggagggacggcaagggtgagggctgagggccgaaggagggaagcagaggctcttgactgggtttatgtcagggcaatgcagggtcatttgaaagtcaggctttttaattgtttttatccagaacatggatgcttcattttgaatctacatgtgaggaggctgtggaagagaactggggagtctcagccttagctctctyagcctcctcagcgttggggtagggagaggaggtgccttaggcagggacgggcacctgccaccaagctggcctctgaccttttcttctcygacttgctgtcatttgttgtatagatttggggtttgggccatcagagctaaagaccagattccatggctgtgtcttataacccrgggcccttcttaccttcaggttctgaaactctttctcctcttctttgaggacctccagctgtttcaggactgagtcttgctggaattcaccccggtccatctgcaacccaaaaaaggctgctcagtagataggaggtggctaaacctccacttcccccaaggaaaagatgagatcagaaactcaaaagattgccctgtataacccccaccacccctcactgcctggaccatgtgaaagagtcaagatgagttcctggagccccatcctaggagacagggaagcagttgaggggggtgggtgagtaggtgaggtgaggggcagttaggggaggcgaggggcaggtatccgaggccatactttcctcgcttgggcgagggcatcaccagagatctcccatggctgattcaattccattgactgaacgtttattgtaaaatgccggccagttgctctgctaaggaccagagatccacagattaacgtacattaagatacagctctgctcatcagggagatggacttgtagataaataatttcagaatgtcagtcactgggcatggcaaggctccttagggcagtttcttttccagcgtgcaggcctagtgcaggccttagggagtcacaaggaataaccatctgtgagatgctggcgacatgggccacacctgttattctcatgaaaagttaacttccttagagatgccaaacagcctgagggcaaggatcacttcctgcttgtctctgggtcctcccacacctggttcagtgctttgcatgttgtggtcactgaccttgcctgcttttgggatggaatctcttaattatttgatttgccaatgcctagcacagtgcctgatatacaatagagctgcttcaaatggtatgtatatgttgaatgaataggcaaagtggcttagctctaaattactgaaaattaacaaaattattagacataagatgaaaaagcatactccacacacagtgggcatatgaattaatctgaataaccacagtgatgcttaacctgtgacacacgagaggcttgccatgtgtctctgctagttgcayggtataggtagtaggttccctcctactctctgggccgggatgtttcttctcccttgcaacctgctttcctcgtttctttttggagccctgtagaatcagccaaagtgcggccacccggctgcctcctcactaaggagaccatgcggttcatttttccagtaaatgctctggcactgtctggactggagaccttctttcccatcagattcaacttctaagtctgccccttcttgcaratggggctgtcttggggccaggaggtgaagggaatgcgagaatgacgatatcctcaaggggtggcttagcccagagccctcagcaagtcccttctgctcccacctgacactgagctgcccccactcttgcctgtggatttggactaagggatgtggagacagtctgaggcaaacagaatgtttgccgatgggagagaattcaaggtcccgtttgggatgaaggacacacatgattaagcttaagtatagagacgtcatcccttctcacatctaggctgtggtttcctccctcgtaaaactaaacactccactgtgttaattttaacagtgtcaggccctgtgttaggccccaggggaaatagatgagcgtagactcagaaacatgacctttgcccttgaggagctctgggataactggggaagctgacatggaattgggggaatgcactataaaggaggcacatacaagtgttttgggagagcagaaggtgcacagctccgccaggggtggggaggacaagcccggaacatcttggagttgattgttatgggagaatgtgagattcaacagacaaaattagcaggcagagagaacagccggtgcacaggcctttgaagtccaaaagattcgaaggccaggaatcaagctctttggcatgtctggaaggccagatgtacttggccggaaaatggagctggagaggttggtggttgcctggcactgaggagccctgatggcacaccaggaagttgggctttgtccagcagatgtggggagccacygagggattttaagtgggcaagtaacaggaccagatttgcattttagaaaggctgctttctcaaggctctcgagggtggattgagaaaagagacaaaagactacaaggctgagaccaactgggaggctgctgtaatcatccaggggagcaatgatgaggcctgaagtaaagaagtgatggtggaggacaggtggggcacacatttgagacactttttgaagtggaattgacaggacctgaaaatcaattggagagagaaagcgtagccgagggaaaagtcagtttgattcagtaaacgtctgtgagcctctaccagggcctgtgtaaggctccgaagaccccgggatgaacacagcagcagctgctcaccctctagcaacataaaccgctaatatttcttgagcacttattgtgttccatgggcttcaagcccttctgagttttgtccacttcaccctcaccacagccctgtatactgtggctttcagacccatctcatggatgaggacatggaggcaccagaaagcccatctactatattccttgctctgctgcctccactccaacatgttacgaccgaggcaaccagaaacttctagcatggttgtccaggtttctgcttggacaactaggtagatgatggcccataaatggggattcggaagaggaggagcaggcttgatgtgcctggagaagtgatgagttgactggcaatccagtccccaaggaggaacctgtgtttcttgcagactgttttggtggggtgcgggggatgagggagagggacatgtattgaatatctataatagctatgtgtgtgtgtgcgggggaggggaggggattatatgttatataacaacatattgtggcaatttatgcatatgtcttttctccttactgaagagccaggctctctgaagggtagactgcatttttgttgttgttgttgttttgagatggagtctcgctctcacccaggctggggtgcagtggcctgatctcagctcactgcaacctccacctcctgggttcaagcaattctcctgcctcagcttcccaagtagctgggattacaggcgcccgccaccacgcccagctaatttttgtatttttagtagagatgtagtttcaccatgttggccaggctggtctcgaactcctaatctcaagtgatccgcccaactcggtctcccaaagtgttgggattgcaagcgtgagccactgcacctggcctggactgcatcttagatgtctttgagtctgccagaacacaagcacagtacagcaggcacacactcacatttgttggctgagagtgtgtgcctcacctattgtggggtgggcagggggcatcttgaacgctgctctgctttttggaagcatctagttcattgagaagcctctagtcccaggaccttctgggaatggagtcacgggatgggatggggcgtaattgcattcttaccatcagctgcttgatggtggagtgctcctcaccctcccgaccagaggctggttccttgtggacaatttccactcggatatcatttttggctgacacaacacctttgagatctggagataaaatagtaaagtgtagatgatagatttagttcttacctttgagatgtcaagctcccttgcagtcccctgcccctgccctgccaccctctgcatttcccctccagcccctgaactcagcagcttcaccagccccccaccaatagaacctccatatggagatgctgtgggtgtttgggcctcagaggaggctgaccccatggccggcctgcctcctgtcacatgcccctcagccatgcacccttggcttgaaagatcgtcttcagccacttgtccgccttactgagctaggtccttttcatcctactgaattctcacttccttctagaagtcttctctgacctgctctaccaggcgggctccaatccctccattcatagaaccataaatctcagtgttggaaaggacctcaaagtgcccatggccaacccccatccaaagagaaacgcccctgaggcagtgggcagcttctctgtcgacgcctccgtgatggaagctttactgctacttctgcaggaggcaggctgtttctagttggagagctctgttagaaaattcttggctgggtgcggtggctcaygcctgtaatcccagcactttgggaggccgaggtgggcagatcacgaggtcaggagtttgacaccagcctggccaacatggtgaaaccccgtctctattaaaaatccaaaaattagctgggcgtggtggtgggtgcctgtaatgccagctactcgggaggctgagcatgagactcgcttgaatgaacccgggaggcagcggctgcggtaagccgagattgtgccactgcactccagcctgggcaacaggatgagactctgtctcaaaaaaaaaaaaggaaattcttgaggagctggtgcggtggctcacgcctgtaatcccagcacattgggaggccgaggaaggcggaccacttgaggccaggagttcgagaccagcctgggcaacatggtgaaatcctgtctctgcaaaaaattaaaaaaatagcaaggcatgatggcacacgcctgtaatcccagcgactcaggaggcttaggcacgagaatcgcttgaacctgggaggcggaggttgcagtgagctgagatcgtgtcactgcacttcagcctggccaaaagagagagaccctatataaaaaaaaaccgtatatatatgtgtatatatgcgtatgtgtatatatttgtatgcttccctataatttccactgagacggtggtgatggaggtcctgagaccacatcattgctggggtggtcttgagagccaaggctgcttagctcggagtgcagaaaatgcaaggggaacagctttcttcaaacatgtgcaggctgcygagtggcagaggagcagacccattctggtgattcattttttgcattacacttatataatgttagtgccagatggggccatcagagtcatatcctcattataaatgaggagacaggcctggaataactgtggctggcccagggtcatgtggcagaagaggtgggactggaacactgtgtctccattgtcttcacctgttctctgccatccaatctctcacacgttatctcctcggtgcacgcaattcttcaagcgtgcacaaacactagaattttattggtaatcactgaagacctttaaaagttttctcaaagcaattcctttattgcttccccacccactcccccacagctgtgtgagtgacctgcttttctggtgagactagcagctctttatttttattttgttgtagagatggggtctctctagactaacagctcttgtagagcaaggatcaaaccacaaaccgcttttccccctatctttctgtacagttcctgactgaaagagctatgtgttcaatccaaaatgctggctgccctgcagatgaagttcagtctagtccaggtcaacctcagcctagcgcccactctgccaggcgccatgttgcccaggctcacatacaccgatgcatcagacccactccctgccccaggagctcacagcactgttaggacccctgttcattgcactcctgcttacttgctctccggggcagcctaagcctggcctttttctctgtccccctccctgagatcccggatctccctcccgtacttctctgggaacgggcacagcagaacgccacgatggttgccataaggacgaggaaggccacaccagctcctacggccaccccaatgatgacggccatcggcacagactctgtgggagagaagcgggcacagctgaygacggatggggaatggcctactatccccccawgatctcaccccgttcctgcgggggcagcccctgccacatggggccctcctgggaaatgcctcagtggggcctgggcaggcacaggccgagtccaactggggtcagctctagctgggactgcaaagaccagggtggaggacacaggggcttggtgggtggaggagagggcaggggaactgaggtaaagggcagaggaaggagagcgaggcaggcagacacggagaagggagggccaggggacaggaagaccggagatgaggggtggggctggcacratggagctctctctggcattaaacaggaatgctctatcacacagcggccagtgagtcataggccctggctttttttgaaaaatgactatggtcactgcccttgtttgttccgtatgttctctccttcccttccctttctcgggtgaatatagaggacatccggctcttagtgtttgcaggtctaagtagcttccccgcaggtctgctgggcatcagttgtggccctcaggtgtccaagtctcagggtccagggagcagggttacagcttctccactgccacctctctaaggagagaggcccctttccctccatctccaggtctgcagcttctccctcaaggctgcccctctgagcatccttgcacccctcctggcaagagaggcccacacactgggcaggcaagccctcacccctgctgagtctctgtggcctgtctcctgcccaagccgagtgggggtagggacagggagggtaaggatagagtcgggggtgatcttccacacagccttggcccttctacagctgcaagtggggtcggagcacatgatttagggccttgaggaatccatcaggaatagaactagagaatgctggggcagggagagcttggggctctcactgaggtccggagaagtcaagtgatttggccaaggacacacaggagctgcccagccagggtcaatccaggtctcctctcactgctcccacccctccactcaccccactcccaccccgtccagctccacccacagagtgacatgtgagatcccccacatctcatgtgctcggtaccgcccagactgctgctgctccgagtcctggctccatcccttctgctgagcaactgactttgcctctcttatatctgtaggatggggataatggtaccggcccctctgagggttgttatgggcttgagctgggtgaatgtgggcagaggccttggagcagagcctggcacccagccctgtttggtgtttgctgttgttgttacccaggaaggggtcaccagcagttcacggtcttttatttttgggatggagtctggctgtgacacccaggctggagggcagtggcacgatctcagttcactgcaacctccgcctcctgggttcaagcgattctcctgcctcagtctcccgaatagctgggattacaggcacatgccaccatgcctggctaatttttgtatttttagtagagatagggtttcaccatgttggccaggctggtctcaaactcctgacctcaggtgatccgcccgcctcagcctccgaaagtgctgggattacaggcgtgagccatcgttcccgatcagcagttcacagtcttaaaggccaggaaagttcctttgaaagactgagcccctccccagcctaccctgcgttcgtcagtgtgggcgagtggggacagctaggtatcagttctgggttgtaagcctcttgctgtctttttctttaaagggaggagaaagacctcaaaccctggcctctgaagatgctgctgggaggaggtatcaaggggtgggggtagggtggcagccatttgccctccggccrgagggagctggcgcccctggctggcagtgttgctggttaagctggcacatccctttgccaccccaggacttgcacacgaagccattggttacctaccaattagtggccaggacagctgtaggggtgacagggaggggaccaagaggaggtggaatggtggacacttagggattgaaacgggaggtgctcgcattggttcaacagtcagactgagaaaaggggctgggcctcagcagagcttgccttgaccaatagacgacaacgtctctaggtttagttccatgaagaaagggaaactgctgtggcagctcattggttctctgcttttgaattggattgatttgggttggtttctcctcagattcctagtaagtttccttggaaaaacacagggcttgtctcagcggaactcagagccaaagcatktccatggaaggctcttaacacctctgggcctcagtgccttgtctgcaccctggagagctgggcagcagcattgaaggtgccttccgatcctgggatccccagcccacgtttccacacgctgctgacggctgggggaggggtgccctcttagctggacaacggtcaccagggaggtgggcagggggagagcagggggtcctgtgggggcgagtgccccggggtgccatctcttcccagtccccagcctgcctgtgtgtgtttcctccttgcctggcttcctgaggtttggcctagggcgatgtgcaggcccctcctctctgcacagagccttccctgcatggctcctggagagggactggagggaggggctgtccccactcagcctcccctccatccaaggaggtgtgccaggcaccaggagccaccgaggggggaaggtgttggggagctctggatgagtgtcagcagacacaggagacacggagacaggagacaccaccctcagcactagcatggaccyggggagaaggcagcgggaggctggcagctttctgggttgccccagtgtgggctgcaggggcctctgtgagcaacctgtgccctgggttggtgctctgataggggcatgtctgccaggaggggcagaggcaggggcatgaggatcccacgtggagcttgttgaggaggtaacagaggccaggggccagtgtggcaggaggcctgggatggaggaccactcaagtcttcagcatggccatagagcctggcttgctggtcctgattctcttttctggttttctgctcggggtggggttgagagcaactccgcccagggggcctgatgactgctttgctgcgtgtgcctggggagggaggcgctgccctgcagcctcagcttggggtgagatgacacttccatggggactgcaggagtagggaggggtggcaaacagcaagcatggattgcacaagccacagcaggggctgggggcccccggtgtcctgggaagcagtggccaagctggtgatgatgtggagaagcgggaagggtcggagagagcctggaagcagaaggcagtcaggacaggggccagctgaccccagaggccaggagtcagggctcctgaagagaaaggatggaaggaatggagcggggacgagcaagagccagtgtcccagagaggaaggagttgtgggttccggcggcaggcaggagacaggtctctggggtccctaggcccaagctggctgggacctcctctccccactgctttgtctacactaaaccctcaggacgggggagggcggagacactagcrgccagcacaggcctccytaccccctgctgggttccctccccagctagccaggaagtcccttccccccttcccagggccattctcatcatctccttccgtacctgcttccagcccggctcccgacttcatttccgaacctgtttggaaataaagcaagcgtctacagccagggcctggctggccagggtggggtgggactgggaattagctgcttgagsggggctgggtgaggggctcctttcccagtcatgtctctgggaccccccaacagatccaggctagcccagctgaacttggagttcattcaggctgacttagagactctggaggggctagggaccggagagagatcacgtctcggaggggtctgggagggttggggtgagaacactcgggggagggcatggggatgggggcaccaaggggaagacacrgagggtaggcaacaggggaccaggaaggtttgggatgatgtgtggatgatattatgcaaattatgtgcaaagcattatgcaaagcagcacctattagggaagaggtgttgggagatgctgtgtgatttgacccataggtgtgatcctggtgtggcccactgaggcctgggggcccagctgagaccacccacttggcctagaatctcttgctgggcctgacagcctgcgaatggacctttacctaagagggtgtcagagaccgtcaggactgaggcctcctgggccccagaggcccaggcccagctgagcacgaatccctggtccaccatggcttagcccctgctggcaaaagggcaagatcaactgcccctctcagaacccggcttgctgctggctgtggtggggcttctggagccacccctccgtgcccctccaaggctccccatcctgttgtctgtgcctgagagctctgagcagacgctggagatctgagcctctttgaccaggagctgggacgtcagcgcacgggggcacagtggggtgaggcttgttcctcctgcctcctccctctcacccacccggctgctttgcccagcgctgcctttgaggtacaggggtccatgtgcctcctgggtctgcaggtcatctgagcccagcccccgaccctarggatctggacaagcaagcctaaccccttagctttagcctgggtgccctctgtgggacttctgtctgagtaactggatgggcttgtcatcttaactgtgactgggccaggttcccagcacacccatgccagtgtatcccacgctccacccaggcatgacactttggtgtcagaccagggcccatggcagagggcagggcacagaagccagggcctctggaggctrctgggcagcttgtcactgccaccagcctgctcactgttrtggtcacctcccactgaagcatcgccctcaagggctgcccctctgagctgtgttcttccctttcttggttcctggtggaggctcgtgccccttgcttcagcgagagcctggctgaggaggctgctggctggctaggctgtgtggtcagccaggaagagcactgtggcttgtccttgggccctggcccaccttgcagccacccgcgccctgacctaggtgaggagagggccctctggttccatcgttcgttgttccctcatggccctggcagctctcaccttgctccttgagccggatgatctcagtgtcggagccgaagctgttccaggccgtgcagttgtagatggtctggaagtcggcccgcacgatgttgctgatggtcagggtggagatgacgccctcctcggtgctgatggtctccaccgtatagcgccccgatgtgcccgactccagaacgttctccttccaggaccaggcctgcccgggggcgcagaatcaggaggagaccccaccagaggggcccaggacacgcccacaccagagtcacagtgccactgtcctgctcatgttcatgctcactgccacacactaacacatgtgcacacgggtatgtatgcaggcacacatgccacacaccacaaataygcacacatgcaggtgcacacacaacacgcatcaccacacatgggcatgcacagcwtcccacacggcacccacatgcaggtacacgtgtgcacacacaacacacaaacacatcacacgtctatacacagctccccacacatggccaacacgtttatatacatactacacacaccacaaatgtgtacacacagctctgcacacacacaagtgtgcacccactataacacacacatcaccacgtacacataccaatgtatatacacacaggtttgtacacacacaccacactacaaacatgcatatgcaagtacatgtaccacaacacacataaacatgcatcacaacacatgcacacaccaaagcacacaacacatcacagygcacacatgcctgcacatatgtgcacatgtcacaacatgcatacacacatcacagtacatgcacatcacacttcacactaaaaacatgatacagacatgtacatacacatggcagacacgacaccacatctacacgcaacacacagccactccccgaaatacatgtacacatgcacacacacaccaagatgcacgcaccatatgccacaatacaacacacaatacaagcatgcttacacacatgtacataccacaacacacactgcaacacatacacacattcgccatacacaccatcatgtgtacttacaggtacacacactatgacatacacacacaccatrtgctcacacacacaagtacacacactaccaacagatacacatgttcacacatgccatgacacatgtacacggtaacacacccacaccacacatgtacacaatccacaaacacatgtacacacacatactctggggcatcctcagagggtctttccatcccagaaaggggcctggggagcatctttctgggcaaagtgggtgccctgttggcctgcgcactgcgcctccacacaaatgccccccgggactgtggctgcctgggtgggtgtgagttaggacagcagccccatgaacgcgtctacctgtgtgatgttgtatgtctgtgtgagaaatgtgtctacagagctgtgtttgcgatcaccttcgtctgccttagtttacagggctgctggttaacagttttcagagccggccacatacactgtctgcacctcatcgtgtaagcgcctcgtatatcctggttcggggctgatgagagggactgagtttctcaagcttgctgctattgtcacgctggactgacccattcctggcygtggggctctcccaggcattgcaggatgtcagcagcaccctggcctctacacacccggtgccaggagtatcctccaagtgatgacaaccaaaatgtctccaggcactgccaaatgtcccctggggccagtgagaaccgctggcctagaatcagatatttctggagagaaggtgtgaaaatgtccaagagtgaatggaatatttgacaatgagcatgtgttacatttataattaaaaacatcaaaaagcaaagtgaatggggaggcgtaggtattagttttattcatgagttcttgcaatttttttgtgaatctttcagacagtgaatgaactgaatgcttgagaaagcgtgtagcagcaataatactctaataatatcttagttaacaggatgacagtttcagttggtgcagcctgggtgtctcagcccccgcatgcacgggttaggggtgacctcagctgcttcacatctgggccagccccaccctccctgcacaactgccctgcccactccacccctggacagtcttctagcaggattttgccatacactgggaattactacaaataagttttccccgagtagtgctataaaatgctcacttttctttgttttcatgcctgagatccctccagttttagatggatttgagtacaagactctgcccctggatcacctgaggtcaggagtttgagaccagcttggccaacatggtgaaaccttatctactaaaaatacaaaaaaattagctgggtgtggtggcaggtgcctgtaatcccagttacttggaaggttgaggcaggagaattgcttgaacccaggaagtggaggttgcagtgagccaagattgcaccattgcacccagcctgggtgatagagagagactctgtctcaaaaaagaaagagggaaaaaaagactctgccctcaccttaatttttttgttgttgttgtagagacagggtctcactatgttgcccaggctggtctcaaactcctgggctcagtcgatcttcccacctcagccttccaaagtgctgggattacagacatgaggctcctgctcagtaagaccctccctttaaaaaaatgcagatactggctgggcatggtggctcacgcctgtaatcccagcactttgggaggctggggtaggaggatcgattgagcccaggagtttgagaccagcctgaccaacatggtgagaccccatctctactgaaaatacaaaaattagcgaggtgtggtggcagatgcctgtaatcccagctactcaagaggcgctgaggcatgagaattgcttgaactgggaggtggaggttgcagtgagccgagattgtgtcactgcactccagcctgggtgatagagcgagactccatctcaaaaaacaaacacaaacaaacaaacccaaaaaacacacaaacaaaaaaaccaagcagatagctggtaggaggcgctgagggtggactcctcagttgccttagctgcattgcagggataagttctttgaggaagggagagagaatggaatggtcactttagaggggacgattgataggcaacagggcaggctaccatggacagtaaaggccacagagacctggcaaggagggctccaggaggcacagaaaggggttgccaactattacctgcgctctaagattttgctaaagactggcctggagcccaggaagagaagaagtcacttgtcttttctctccactaccctcgtgtgcccctctgcccttaggwtgcggaatttggtcagagccgttcatgtcagagctcrgcagaatggcagctgaaccctgggagagcactgcctrttctgagaaaggcctgcaattgtgtcttcacgatgcttttccaagacagccaaggcaggtataattttcctcagcaagaaagaggaacctcggaggtgtgcaccgcctggctggccacccaggtattggcaaaagtgactgtygggctgctggmccggcccccgcccgccgtccctggagcactcacgatgcggtccggcggcggcgtgctccggatgaagcacttgatctggcccttctcgccgtggagggcgtgctgggtctgggtgctggagatgatggggggtcctgttgagaaacagcgtcccattaggcacccgggaagggcacgtccctgctggcgccctcttgggtgggttcagaagtgtattcattaatccaagcattcagcaaacatttgccgaaggcctgtatgtgcaaggtaaagtgcaaggtagaggactcagagataaattaggcattcagtcataaacctctcaagggatcatgagcgaatgcttctaagtcagaacccccagaagatacaaataactgtaataaaaggtggtgagtgttagtaccacaggagcggtgcagataaagtgctaaccgacttcagaggagagagaataattctatctggcggacggggaaagctttagggaggaggtggtaagcctgcagagggggtggggaggtgtctagatgaaggaagactcccccgcctcagccagcggcacccctgcgagccattcctcagatatccagtagagggcgcccttgcctaacaaatgggagctgctcggccagacgggccaacgggaagaaatggttgctgtccctctccttagggcgggaatcaccccggacagggggaatgcatgcgctggccgtgttcacagccctcctcccacctgtgtctcaggaggtcctgcagttcatcatcttgtctgcctccacgtccatacccagactgcccaagtgaggccatggctcccaaactgaccccaatattatcatatcacagagtgtggcacatgtttatgggtgtcaggttctgagagcgcctgtctcattcaccacattgcacagccaagagagttcacctggtggaggggagcctgttccccagcgcctcctgtccagttccgcctgttacctaacccaagtctttcccctgtgacgcctgcctggccgtgaaagacaaaagaaggagcagctagcttagcctgggctctgctggcttcctggctgggctgggtggttgaaggatgggagtagggacggaaactgtcatgctccctttccaatccctggggtcacagttgggacttagatggcagataccagaggaaagacagccgggagcaacgcatctggagaacacacagaattatgcaggaacaaaacaaaaattgctgcaaacataattgctgtttattagccaccttaattaaagcagatttgcatttctatgagtagctctcagccaagggagaaaaggtactgtagacactccagtgacttctgttgagtttgagaaggcaaaagggctcggggcagcgtgaggtgggcgtgggggaccctccatggctttaagaatgggctgagcgctgccctccttcctaaaaatccttcagctccaacaggtctaggacccaaagagatgaggagattgatgttttaggaaccggatggtgctttgttttattgctggactaaaacgtgatgataatataaaaccttttctggtcaggtgcggtggctcacacctagaaacctagcactttgggaggctgaggagggtggatcacaaggtcaggagttcaagaccagcctggccaatatggtgaaaccccgtctgtactaaaaatacaaaaatttttagtatttattatttagcctccctacttgggaggctgaggcaggagaattgcttgaacctgggaggtggaggttgcagtgagccgagattgcgccactgcactccagcctgggcgacagagcgagactccagctcaaaaaaaaaaaacaaaaaaaaaacaaaaaacccaacatgcacagacacacaaaacacacacacacacacacacacacacacacacacaaaaaaccttttccttgtgcttcccaggagctaggaattccctgaggggttttcatgattctaaaagccatcatcaaatgcatctgcttcttaaaagaaaatgaaaaccaggataaagggaaatggggtgagggttagtaagatttctctccccttcctgcagatacctgatttgagccaaatcggttgaggtgtgtgccaatttctttcccaaaggactgctgcgctggccagcagttgtccaaggctgggatttgtcgcgataaaaacctgatctcatttgaatgctttcatatcaccagctccctccagcccatgcccaggtcccatccactgggcgtcccccctccctctgcctgctctgcagaagcaggggcagacagttcgccccctggcaggtctggtgcgctcccctccggggccactgaactcatccacctgcctccaggtgtgtgaggccaccctagtcaagaaataaacaagcagcttctttgcttccctccaatccctccagcttttctctgcctggaagcctcggggagcttgtgctggcaggggtggaggcagaggaggggagagaaagagacctggagagtgcagattcaaccttggtcagcgccagggcccgggtttcagtgccctccccgtccaagagaaatgtccctcccggcctgtgttccccagggggcattctctcctcaagaaatctctttaaatctcccttggaaatgtctgaacgtctaaagtgacagcagatgtcagctcctcctttatccacctgcttttccccagaaacgccaatgctcatttgatgctccaggcttgggggccctggagtgcatgagtgagtgtgagggtcccgggctggctggtcatagggccagcagagcagagccggctgcaggcacagacagcctgacttccgagtgccctggctggcgcgggctgtgtggagggccgctgatttcactggggcctggagctctgagccgagtgtcagacacctgcgctgaaaggaaaaggctgcagcctgtgttgccatggatatacggaggcgcgatcagatgctgttatttttagccctgcagtgccaatttattggtggcatcctggggacactcaggaaaggcaggagggctccgactcagggctctgccaggacaggtggctgtgaacgtgctggggtctgggtagactcagcctcccttgggggctgccacgactctggggtggggggagaggaatggaaatgcggggcagtgtsgggggagctggtgaatggagacagtagagaggtatggctgaggagacaccaagctggttttggttttctagcgaaggggagaatagatgaggccatcagcaggtggctttctgggtagagaggaagctgaagcccacgagctaatttggagacctcaggagggccctgctctggggccaggacccagatgtcctgcaaatgttggtggttcagttcctgcagggtcccagagctttggggttttgatctgagtcaggctatggtgggaacaggggcctcccaaagggcagtgggcatgacagaggtgaggggggagcattcggaaacggcagaggaatcgaactggcagctttgctttttgcctgtggccaaagcaccagatagggcagggacgtccgcatttgcgtcctggtgccacaaccttcttgggtctggcctgagccaggtctcagcttctccatgactgtctacaccccatcattcaggcctggtgtgatgcccttgtccctacatatttcatgtaacagtcattcatctactaactcccaccgtgaaaatactcccctgctgcaattatttttattatatataataagacatgctccctgccctcaagggggcccctgaacacgtggcctcgtggagacggtgacagggctccctggctgggtgactcacacgcattgggaagaggctgatcaggagctgcagagatgctctcttaaattctcatggggccaggagaggtggctcacgcctataatcccagcactttgggaggccgaggcaggtggctcacttgaggttaggagttggagaccaacaatggtgaaaccctgtctctactaaaaatacaaaaattagctgggcgtagtggcacgtgcctgtagtcccagctactcaggaaggtgaggttgcagtgagctgagatcgtgccactgcattccagtctggacaacagagcgagactccatctcaaaaagcaaaaaaccaacaaaaaattctcacgggccaaggccatggtgagtggatgaaagggtggacacgttggccacctagtgacctctgatgctttttttcctggccaggataaaattcatcacccaccactctcagggctgagaccccttcaaagctaacaaacaaaaagagaggtgactagaaaactacccaggcccttcctccctcagcctgggtctgacggggaatccaggaggtggacctaattgttgtctacccatagttggaggtgacagcaaggcccagagccagcgacagctcctttggggctatgcctggtgccaagatgcctgaggtccttcttccctccctcaggcctggctcaccccagcgagggtcttaccattgacggtcagggtcacctctctctccccggctcccacacggggcaccacagcccggcacacgtacttgcccgcgtcctcctggcgcacggatttgagggtcagggtcttctcattgctcaggacctaggagaattggcaggctcagacgccaagagcaggcggaggggtgcactcttgtctctgggaacaaggcagctgagaggctggcctggggtaactgaggcagtctccggcatctcagtaggaagcaaggtggggaggaaagaggccaaaagtttcctggcccagacaatgcctgtgggctgtacagaggagactgtaccagcagagaggccgccccgtgtgactgaggatgttacatcccaggcgcagccctgtgggctgggggcatgtgggggcacatgtgccggaggagggggatgcctgcctggggacttccaggtttcctcctacaggaacctccctgtacctgcggtggcttctcctctcccaggctagccatgggtgacatgatcctacagctgaacttctctgggggctcctggacctgttttcagagtcattttcaggatccctttgggatatagcttggagtgatgaaaacaggctctggcatgagcttggtctgcgttcgaatcccggctccagcagtgaacacctgtgtctctttggtcagttacttatcttctcagacgctccctttctatgtatggaggctgctaggataatgcagcgtctgctacataacaggccacacaaaggtcggtttccttctggtccccctgcttccctaccyggrrctctccctgttccttcctatgtgaggacatctgacaatctcttatgcaccgaagaatatatacgtcttaaaagaggaacacaagggctggacacggtggctcacgcctgtaatcccagcactttgggaggccgaggtgggcggatcacctgaggttgggagtttgagactagtgtgaccaacatggagaaaccctgtctctactaaaaatacaaaattagctgggcgtggtggcccatacccatagtcccagctactcaggaggctgaggcaggagaattacttgaacccgggaggcggagtttgtggtaagccaagatcacgccgttgcactccagcctgggcaacgagagcaaaactccatctcaaaaaaaaaaaaaaaaaaaaatggaacacaggaaagtgaagcccaagtccaaggctaagggtggctttatttgggggaagtttaaaaggctctttctttctctttcttttctttctctctctttcttttctttctctctttctttctttctttctctctctctcttcctttcttcctttctttctttcctttcttcttcttttttttccccaaggtcttgctacgttgcccaggctggacttaaactcttgagctcatgtgatccttccacctcagcctcctgagtagctgggactacaggtgtgtgccactgtgcccacttgaaaagcctttctagtgccttccctcccagcacattggtgaccacctacttttcttgtaaggtttaggacagggcaagagtgcaatggctgaatgtgctcagggtgggacaggcacatgggggtgcctgggttccccctcctctttctgggatctttctccctgtggctt

SEQ ID NO: 95691 - DNA, 46446 bp, Homo sapiens
  misc_feature (1)...(46446): n = A,T,C or G
gataaaactgatttgccatcccagatccagctcagccccctccttgggaacatgagtcctcttaaccttctccagtccttccccaaatagtacagtttccactcacatgccttatctagctgtcactttaaagaaggtcctgcctctttcaaagaaacacaatgacaatgcctggaaaaagggctccgtgtggatgtcacctggcttccacaatgcgatgccttcctgccaaacccaagttcggcttccagagtcctgatactgcttacatccagatgcgggaacatatgccgcgcatgagtggagctggcctcggtgctgaaacatggatatgtatatatgagactgtaaaacctacattattgaggatttagggtgtttgctttgctgaatgaaggattagagaccagaaagcccaaaatgaccatccgtttgcagaaaacatagctggaggattacaactgtcagatgtgtgctcaaacccagggggccctattaaagctctccctaactccctagacccttaatctatcactaggctatgggaggacagatcaccagttccctacagagcccctgagtgttttcagccaggaagtcgtaatcagataaaaagcagtttttccagctccaggcatgggtgcagccacagaggcttgggagctaattgtctgggcagtaggcccaggacttcgatctttgggatctcagtgaaggaccaaccgtttcatgttttgatgagagcagtacccagggtttccagtggcctagctccatcatgttttctcaatatctaaggagggaggagctttgtccctaacactcaacatgctttctattcacgggtccatatttcctctctctcacttcccagaaatcctgccagactctttcttgtctcataaagccaacagggaaacgttcttcagtcccgccagcttcccacaatcagccaggaatctgccaggaagtatttgatgtgagttatctcttttcctatctggcataacacatagttcagaccacatgcaggttgggcaaaggacatcaatgtccagtaattccaagtgtctttcttcccaactttgccaccctgttggctccaggggaacagaaagaaagtcaccggcctgagtcatcttgaaatggaggagcgagatcttccaatatgttgaattacgcttctcaaacctttcagtatgcagcctttctttcagaatatgcctgaacaaaaaccactgttgtaagtctgaattcaccaacaagtgttatggtcttctcttcctcttccatccaaaaagtcgctgtaccccaaccccttgggtgatcacaaaaaggttctgaaggctgctgcccacaggagacccctctgcctctcccagtttttgacatttgcagcagcccctgcccaggtctcagtgtggcttctcaacagctcagccttctgcccggctcttctcccctgcagaaaaatccgtggtaggcacatggggaagggcagacagtagacagaagaatccgtggtaggcacatggggaagggcagacactagaagcgaaacactgaaacctcaggctggagaaaaccatgggaccataagcaggagctggcccttcatttctgtctttcccacacctatcaaaattcctggccatcggagctgctcagaattttgatgaatgaataaatggaatcagcacatccatgtggcaggactcctagcaccttttttctttcttccaaatcccaaaaggaaagggtaaggagtcctttctgcagatgctctactaatacccaaaggtctaggatgtctgcccatcacccaagccacggaggggagtttgggcaggaaattagacgactccatccatcatatttattgaacagccactctctggaagacgctagtgcaggaggtcactcacgcacatgaatcctcaaactccaagcagagagtgtcctttccgctccccatggctctctcctctctctccactctccagcctcacctgctgcacgtgttcctcaagcacaccaagcctcccgcaaacccctcaggtcgcctatcgctgtcctccttgctgggccaatattcccccgggttttggctcaaacatggcctcttcaaagagcctctccctgatcctaccctcccaggactctctccagctcttgaccctatttcttcccttcctgtatctcctccacctctgtttgttctgtgcatttgcccatctatggaccactagcatataatccctgagttgtgctctgacgatgagcctgagtcctggaactaggctgcctgcctcaaatgctggctatgtcacttactaggcatgtgaccttaattaaattacctaaatactacgccccagattcctgacctataaatggaaactataatcgaaacttgtcacaaacagtaccttgtaaataacaccttacatatgaaattagctaacgtgcatgaagacttggaacctaacctggtgcatacatataaatggcctaattgaagttaacactcctaattgctgttgtttactgcatgtctctggtgcccagcacagtgcctggcatatgactggagctcagtaaatattagctgaacacaggaaagcatgcacagatgggtaagagcctccagatgtgtccggataaagtgctatgggactgaggggaagagcagttcactgccagaggtgcctgagggtcgggagggctataggagacagcacaagccacagagctcaggttgggaaaggcttcagtgagactttggaggtgtgggctctgcagagtagttaggggatagtggggaggtcaaaaggcaatctgggttattttcacttctgcaagaggacaaagaacggtcccaggttagcctcagagatgctcccctaagtctgagggctctgctcctatcacctctcatccctccctcagccacagaggaaagaaggcaaaacaaaatgacatgactgaagtgttctaaagccatgtaactgcaccctttccctggaggcagagactggagagaagcaggagtcagcctttttgcaccagctcaggaaagatgccggcctggcttctgagaagagaggagggcagagggaaacctgttgaccacatgaccattttcaattttttatggacaaacaagggtgttcaagatccaaagctcagaccagaaacctaatgaaagggaagagttaaaaggtctcctcctctttctgtatctgggccatgaactccaccacccaaaacagcacatccacacacatccgtccaggagccactgtgggaacagttcagacacgcctgatagcatggctgggtccctggggagctcaccctgcctgccgaggcagagggcagctcttcctcctctcactccccctgctctctggcagcatctgggtgtgcccatgcatgtgcatgtgctgtcacccttgccagggcaatgacgggagaggacgggcaccttgtggggtgggattcctcactgaagaatcccactgggacctttccactcacatcagcaaaatcactgctatagattcctggtgaaggcaaggggagattggatggcccccaacaatcagactggctaagacgggtggggtgagggcctgggccccacaggccagggcggcaagcagcgcagctgcgttgcctctcttgggtggtagctaagaaggacggcacggctgaaaaggcagtatcattaggagtctggagcagaccaaaactcctgctgaaagagaggccagggcagacagaacccacgaggggaacaattaactgataagagtaaactaattgttattcatattaaattagggcacaggtgatttggagaaaacctacagaccatcccagatgttttgcaggttttgcattgcagatgacggttttacaggactcttctgggattcagattatgggaagtgggccaggatcagagcgggggcagggctcccgtcctgcttaactacacaataaacacataacggtttgtcccagaggacaaacccgggctttgcatactaaacatgctggtgctaggctttgggggcctctgagaagaggggctcactactggcagggaaggcagggggaggggaagatcaatcattcagggagaccttagaggtgctccagatgtttggagcaagggtcaagctgtgaggatgcaccaagtccagacatgggagggaaggatttccacagtcctgcagaggccaagcaggaagacaggggtgggagtgtggctgacccgggggatggtgtgtgtacacgtgtgtctgtgtgggtgcaggtgcttcaggtacatccgtgtgcaagcgtttacatgtgcacatgatgtatttcagagtgtgtgtgtgtgttcatgtgggtgaatctgcatgtgtagctgcctctatgagcatgttttgtgcctgcgtagatgtcagtacatttgtgtgtgtccatacacttgggatgttgccaaaacttcccaccaaaacgaatggcaggctgttgtctcttcactgagccttatcatgctaattttaatctcctattattgttttaaattggctctaaaaattaatactaaaaattctgtaaacagagcctggaactaagatgcaagacaggtcccttgaaagcggctttattatcacaattgttcctgccagaatgctgaggtaaagccgagaacccctgcagacagcatctccgagccacagcccagcaggacaagtcggaccacagcccacttagtccaaccctctgtttcattactgaaaccagccctgaggggaagtcttttgctagtgccttcagaatcggcctgaaacccaggcctcctcgtcgccatgtccctgagctctcttgagatcacccctcatgggtgtgtttccctgttggtaaaatgagggtctggaacgagacagtcttcacggtcatttctgtcctcccatttggtgattgtgtgactgcggctggctggcttagcagaggagggaggcaatgtgccctcctggacggcctggcccctccttggtgctctctggtacccccgcccatcctgcttctgcacctgcccttcccctcccttcagctggtgtggagtctaaggagaagcagagtatggagactaggaaaataccagagaacaccgacttaggaaaggtctcttagcagagtctaaaagagagggttgtagtaggggcagaagaaggcggagcaaggctggctgggattccactcattaagagaagggggaaatgctcctgtaccgcagcaggaggtactgaggttagattcagaggaagtttcttgccggcaaagggggctgttaagcacaacaatgaaagagcgcacgacaaggaggagcagttatccctagagatagtcactaaggacactttcacatgtctgtggcatgatacggacggtgaggtgccttcctcccctcaaaatcttgaccaaaggggctgattctggagtctctgccccctccccacctgcacatcctcagtgggaagagcagggcccggcttggtcctaacagggcaggaaagctgatggaaaagaggcccgtggtcctcagccccagcccatagcacgggggcacagctctggttaagcagtgcctagcagtggggctggaactggtttcccgggaaggagggagaccctagagaaagtaccgacagtccctggtcccgccgcgaaccccgccatgggaggtggccttctcctggggctgtgaagaggacacagcgggtgtggcccgaatacaggtgtccaagagcaccgggagatgccaacctctaaaacgagtgcaaggatggcttcaaagtctccgacaagctgaaggagtatctggaatatacagctccacagaggcaccctaccagtgcacccacatacgtccaagtgcgcgcccactcaytggcctccgtcccccgccgaccaacacaccgcggcagaggcccgggaaactcctggagatcccgctgcccccggcctccccgcgcccgtccgcccacgcaggcctcccgggcctctctccggaacgccgggtgcaccggcccggaaggggaggctggggtgaggctgacgcgcggcggctcgaggtgcccttccacggggcagcagaccccgtaccccggcacggcaccgtccgcccccaccggccacctcccatccggggtgcctggagccaaggaaggagccgcatcccccaccggcttcccagctcggcctctcggtcccagagcgccgccccccgccctcctgcagcagcccggccggaaacaatcaccctttgagagaggctgccaagctgggcgccaggagcagccaggatggaggcggggtggagtggggggtgcaggcgggggccgagctttaactctcgagagccgagatatgggggtgtggtgggtgcttggtggttgtttgggttttggaggtgcggtgggagtggtgttgtatgaggacggggttagaggtgggttgtgggaggtttggaggggttaagtgtatgggggtgggggtctttgaggggattagttttaggttggtaggtttgaggatggttgaggggtttaatgtttttttggggttgggtgggtgagtggggggtggttttggtgggagtttttaattttggnnnnnnnnnnnnnnnnnnnnnnnnnnnnnnnnnnnnnnnnnnnnnnnnnnnnnnnnnnnnnnntgctccgccgcctgaagcgggagccgcctccgcgggggacggtgccgggggagggtggggggcggtggggaggtgataccaatcccgggggggggtcccctcgccggcctccctcctcgcgcccccgcctaggctggcgaggttggtaccgaccattagcagctcgggtcccgccggcgctggcgcgggctcggggcgggggcggggcgggggcggagagcgggtgggggcggggcgggaggcgccggcagagccgcggcggcaccggcgcatccgccgccacctcggggactctgcgccggcccggtcggctcggctccggccgcgcgccccccctcgccctctcgccccggcgcccgctccccgctccccctccccgctccccctccccgccccccgccccccgcctccctgcccgcgccctccctcccgcgcgctcccagccttcggccgccgcctcgctgagcccagaacgagccgggccggggcggcggggccgggcggggcgggcgggcgcgcggaccccgcggctatgaagtggcccccgggggcccggagcccgacagtccccggggagggagccgcacgcggcccagggcagcggtctaggggcgccggggccggggcgtaggggccgttgcccgcgatggaccgcaccggagacgctccggactcgtcgccgcaggtcagtgctccccgcgcccccgcgggcgccccgccgcgcacagagcccctttctgcgtccccatcggtgcccacgccatgtcctcccgggcgcgcgctggggtgtgtgtgtgtgtgtgtgtgtgtgtgtgtgtgtgcgctgcgcgcgctgggggcagctggaaagggggccgagaaccgagctcgggctgggaggcgctgctgccgaggggctgcgaaacaaaacccggcacagcctgccctcgtcgaccgggattaggggaagagctggttctcagcagcttctaacaatcggcccgggctctcagtcgtcagttcccggccccctcagcaggtggtttctggtggccggatgaggagtcagggtcagtcgtcccccacctccccacccctgctgcccaacagcgctctctggatcgctctctggctcctgggcactgccaagttaactctcttgagggggcccgagctctgcggggcgcgctgagggacccaggggtagcaagggtggcaaagggcccttgggaccttcggtgtagcaaggaggaaggaggcgcgaccagttcaccaccctcccatctgcacctgggctcaggtctgaggtcccaatccctccaaagtcagagcacacaacttccagaaaaaggaggctgagagttgaggcaggaaatagagaaggaagccaccaggtccgacagtgccagggtaaggaggtgacagccccgtaccaagcagctaaggtcaagaaccacccccacatgcacacacatgggagccttggccaacttccctgtccccttcctcccccagccaggcctagctgcatggattcttgtagaakctggagctgaaggactctggacatacaggaaggggacctttactgacagttgctagcccagtgcatgggcacctgcataggtggggtgcccaayggggcctagagcttgggctgtgtagcacgcactgttgaaaatgttggggtacggatgtcgtagggcctagcactgtgcaatgcctggatgtgtttgtgtggaaatgggaggcacatcactccctaagttactagggctgtggggcatgtggctgcacaggactgttgttctagggttttctaagatttgtcttctgtgcttatgtygccctacctctgctggtagccactgcagagactgagacrtttcctcccagagtctgctcagttggtgaccattaatggccttactggaccaaacatcaagccttccctttcttcccatggggtgaagaccctttcccagggtcttcagacagacttctcactctgcccagtccatgcccagcactgccaaaggttccagagcttagagacattttccctcttccccttttcatggaagcagaaatacttgctaaggttaatgggactgggagagttaatgcatctgtgccccattcagcactggagccaggagctcgctgttcctgtttctgtgcctgaccccaggatgcttggggatcactccaggtccaggtgagctggaagcttgcaggcgctgtgttgaatatgtgtgtgtaggtttctggttgggcagttactcactgttccaccagaagcagggggcaggtaaatcactgaggagataagctccagcaacaggattggagcccgtggcggagaccaaggagcttcacaggaggatgccctggggcaagcccagttcctcagcttcggcttctggggagacctgaaggttctcttagtggtttctcggggataaggggaccaagtcagatatacttttcctaggtgtggagcacagggtgatgaggccggccaggagctgggagtgtgagatggggaagaggatgcaccaaccgaaaggctgagcggacaggagcatggtgctccattgtttctggaagagagggatgagtgttcctctctgatgagaatggagaggaggagaggaacgggctcaggaggaggaggaatccgagagagagcctgactgaggcagagaaagaggcagtgagacaagagacaaaggcacggaggcgcactggcggacagcagagggaggcacacaggcagaagtcagggcctccctgactgagtggtgagttgggrcaggctgggggcctccccctgttcccctacatcgacctcagcaattgtccacccctgcaggaggcccctcactagagcagttggacattctactgaggaaggtgctttcctgtggctctcaggaatgtgagggtcttttagacagaagcccaaaggcagagggaggccaggctatgaggtcaagcacatcaagagcttgcagggactttcagggacacccttcacccctgagcatctcacaatgctgagggctcctctccatcttctggccctgccccagccctcctggtcctggaatgcarggcagtggggaaggatgtggggtctggggaaacctggcactcaggagaagaagagaagtcatgcaccccctccccaggcccccaggcaaaaagacctttggggaccctactgaagactagccaggggacatggaagaagtgcagtggggacaggcccttggccaggctgtctgaggtccagtctcatctccatctgtggctagccgagtagactttgaaaaaaacagagctctctaagccccggcttcctggcagtctataaattgggaaactgtcatctcaccagtttttagaagaaatactagatgaattttaatttaatctatttattttatacaccctcacccccttgcttccaggatgaggatggctctagaatttggagtagcagcgtcaggccagccctggagccaatcccactggaatcggtgcaggctgtcccacctccctcctcaccccactggaataggtggaggctatcccacctccctcctcaccccactggaatcggtgcaggctgtcccacctccctcctcaccccactggaataggtgcaggctgtcccacctccctcctcaccccactggagtcggtgcaggctgtcccacctccctcctcaccccactggaataggtgcaggctgtcccacctccctcctcaccccactggaatcggtgcaggctgtcccacctccctcctcaccccactggaataggtgcaggctgtcccacctccctcctcaccccactggaatcggtgcaggctgtcccacctccctcctcaccccactggaatcggtgcaggctgtcccacctccctcttcaccccactagaatcggtgcaggctgtcccacctccctcctcaccccattggaatcggtgcaggctgtcccacctccctcctcaccccactggaatcggtgcaggctgtcccacctccctcctcacccgcttgagtcctcacacctccagactctgggctggacccacccttccttatcccaacccaaagaacccagagcccgccttggctcagagttcgtccttgccaaacacaaaataatactttcgtgtctaattattgttaaatgtaatccttccaatttatcagcaaatggtcgtctaaaaaaaaaaatcttgacaccaaaattccagatctgtgagcccttcttatccatgctgaaaggtgacagggtggtcagagagcccccaaaattcagttcacttgcaccaacactgaccaagcacttacggtgttggaggctctgcaccaggtgctgggaacgtgaaacatcaaataatccaaaagtccaaatctagtgttttctgtttagctttggaagggttatgtgggttgctttttttttttttgcagctacagcaaatttacttttctaatgaggtttagctccagccaatattaaaatgagcctgcgctccctgcgcacacaccagctgacagcagggcaggaggcagcctccgcgccaagtgcctggcagggattaaggctttacctctgataagcgcaaaagtggagagtatgagtctggatcaagagttgactggatttgaggactaaccttgcccagggggctgtggattccacggctcagtcttctgagccatggcaggagctctctcttctcatacgtgggaaatgtgagccagctctctgctcacaggaagaagacctagagggatgggggagtggagacatgacggcacggcgtggggagtgccaatggcactgtagttggaggcctggctctgcccgtcctctctggctggctatgtgggctggggtcctctccttcccctctgcccatcttgcttcctctgtctgtggcaggtgagcaatctggcctctgaggccatgagtctctctttgaaccctgggctactcatttgtccattgttcagaaactgttagagccccacactgggcatggggggctgcatccgtccccaccctgagcagctcctcagtcacaccagccacatttcaagtgggcaacagccacatgtggctagaggctgccatcttgggcggtacagatacagaacgttcccggcagcacggaaagttctagtgggcagagtgttgtggacctgagcctgcacaggtgttttgggcayggaaagttctagtgggcagagtgttgtggacctgagcctgcacaggtgttttgggcacggaaagttctagtgggcagagtgttgtggaccggagcctgcacaggtgttttggcagggtggctaagtgccaggtcctactggctggattcaggtcctagttctgccacttagtagctgtgtggcctcaggacgttgcttaacctctctgtgcctcagacttctcacttttaaaatgagggtaataataggatgtttctgaggaggaaatgagtcattacagttaatcatgctaatcactcagagcatgcaacagcaagagcttttttattttttatttgaaaatagaaagccatttttattattcatttatttaacaattcacttaaaggcttattgaaaagcccactctgccaggccgcccccccacccacccaatcaacacaagtcctggctacctctgtgacccttcctgagcctccacctcctcccctaggatgggattattcctgactgagtgctcactgaagcccagggagctagaatgagatgaggaaagcaaccttgctttgtgcagacgcagccagatagaggggctgatgctttttggaggtgagtgccactgaaattctgttttgtcactaaaaagcatctgctaagcccccacactttcagaataagagcagcaaaggaggcatggttagctgccaccagccagcaccatgtcgagcagggatggaggaagggatgtgagaggcccctgcctgggctcacccctccctggtctggagggcgagagcccagaggctgctgtgggcttagtggagggagcagagcctggaggtctcagaggccaactgtgctgccacgagccccccgggcgctggtcccagctgcgtctgcaactcactgtgccacagacactggtggggcctcagtttcctcgtctaagacaggagggacagggctgcatgagcgtttcctcacctggaaaaatcacttccacagagcgacccaagccggaggccagagggagggaccctgcccaccaagccaccaggggtggaaggtgagggctggcctgaggggcaggagctggccattggtagccaggctggtgcyggacaccccaggctacctggctgccagccttctcccagaagttggattgtgcaaccctgggctactcccttcttttcacagatgaggggacagacacccagagcagccctgctcctgtctaggggccacagagcaatttcacacaaggcagaggctgcatgccccagtgccctcccgggcagattgttggtactactggcaggcagatktgtggggctgggggctgccacccccggggtcggggcgcaacgctgagactcccagggcccctcacctcctctcttctccctcagacggctggacccaggaaaaccaacctcaactatccctgacagagccctggggaaggtcagctccttcaggccacaggcggcaaattaaaaatacagacaaactaatgaaacccgtgaattgctagcctgccagagtgtgtctacgcaccctgaccacaggacctcaccaggcgggtgaccatcagtggaccctccgtggcttcagacctgggtttggggctgcccggtgcctacctagcccggacctgaagccctctgggtccccgtagctgatggggggtccccttgggggcgtcttccgaagcctaaggaggtcaccactgctctgacacccttgaagataagtcctgacccccaaggagtgccggtgctgggtccctctgaggcagggctgtggcaaatgccacccccgtggagttgctggcaggccgtaggtgcatatcaacaatatcgtcacccccccagccctgcttgcctgccccagcccttcttcttccctcctcttccctcatccacagaccacagagtgggagagacggccgctcgtggcacggggaggacactgagcccagagaggccaagggaccggccagttgcacccacactgcagctgaccgacacaggcccggcccagctctgccagcctgcctgggctgaagtacagcctccgggcgagctgctttcctcacrgtcagagagtttctgcgtggtagctgaagtattactctcctaactcatcgccygtcgatattagcttcttctcccacacataaatcyctctctcagaacaagtgctccagcactgtgtctctgcggctccccaggcctgaggacagcgaggcggttgcaggctgtcagtggggcgtgcacactcttcygagtggcgtacctggagccttggaggggggcctcccgcaggcatacctggtgcctgtcaccccgtgattcccaggaaggtgcatgcttgagatcacacacagacacccaacccagccgtgaatgctcactgaagcccagggtgcaggctccgaggagtgtgctgtccttgactgtgtctaaacggatgttctggatgaatgacagactcgttttcattgttatttaaaaaacacataacataaaacttaccatcttagccattttcaagtgcacagttcagcagtgctgagtatatttacattgttgtgaaacagatctccagatctgtctcatctcggccattggaaactctgtacccattctggaaaccatcattctcagcaaactgtcgcaaggacaaaaaaccaaacaccgcatgttctcactcataggtgggaattgaacaatgagaacacttggacacaggaaggggaacatcacacaccggggcctgtcgtgggatagcgggagaggggagggatagcattaggagatattgctaatgctaaatgatgagttaatgrgtgcmrcacaccaacatggcacatgtatacatatgtaacaaacctgcacattgkgcacatgtaccctagaacttaacgtataataaatatatatatatatatatatatatatatatatatatatatatatatataaagaaagaaactctgtacccgttaaatgactcccattctccacaacatcccagcccccacaagccaccatcctagtttctgtctctatgaattytactactctggatacctcatagaaattgaatcctgtgatatttgtccttttaagactggcttatttcacttagcatagtgtcctcaagattcgtccatgtcagggcatgtgttaaaatgttctccctttttaaggctgaataatattccattgcatgtgtattccacattttctttattttctttatccagtcatctggttgacaggttatttgatgtcaggctgtggagcaaaagctcaataaatggcaattctccccacttgcccttcccactcaggagatgtctgagcagaggggccacccagcaaatacttctgcccagagggaagctatgtcacagtgtcatgggagcatcaagaaggaggcaccccattctacctggcatctggtctggcctctggggctcccttcctgcatccagggctgcccaggcaccctgtggtgcccagccctgagtgtgaagcccctgggctgagtgyacctggcctggtcctgggggccaagcaactcagcaagtggagggactatgagggagggaagcatgtcccaggcaaacgtaccggtgtgaagggatgccagcctcctgctctcatccctgctgccttcccgggaccccgagaaagaaatcggccgggtactcctagagtctacctggggatgggagcccaggagagcctggagatcccctcccccaggtatgtggaggcctgtcttgagcctgtgccttgggctacatgtcggtggtggaccgtggatccgtagccgccctggtgctcactgtgtgataggtagcctgggaaacccagagatagtatcagcacactccactgtcaggggcactgagactgaggaccgcgggatcatcgcacccacacctcctctgctgtgtagggcacacactgcccactctggttcacacatgtgctcagggggcaagtcccctacccaagccccttcgacttttttttttttttttgaaacagagtctcgctctgttgcccaggctggagtgcagtgacgcaatctcagctcactgcaaactccacctcccgggctcaagttattctcctgcctcagcctccccagtagctgggattataggcacctgccacaacacctggctaatttttgtattttcagtagagacagggtttccccatgttggccaggctggtctccaactcctgacctcaagtgatccacccacctcagcctcccaatgtgctggggttacaggcatgagtcactgtgcctgacccagttcaacattttatgttaattgtttcttcttcaggcaggggggttagctgacaccccagaggagggagggaycttaggggcagggcaggtgtaacagagggaggtgggggagccctggaagtaggaggtggtgaaaggaaagttctccaggagcctgagcctgcatcctggggagacggggcagggagtgacagtgcccagggctcgctggccctagagccccatggacaagtcagttctctgacagctctggaggcaggagaagagaagagggatggggaatctctgaaatcaccggtccttcctgagtgcctttctgggaagctgggcagagacacaggaccagactgggcagggtgacgggagggaagcagcaaccgcacactggggcatacccgcgacttgactctagctcagtgtgtcagttccaaacctcagtctccccacctgaagaagcagggtgacaggatgggtgcccacctcatctcaggtggctgcaccgaggctacagcaggaaaaggcatgagaaagtgccttgtcgcctggtccacctgtgcaggggcacgtcctccaagcaggaacagagggagccagggccacagcgccaggttccaggggccccgcctcccgacagtggtcaggctgccccccccccccgccccaggccacacccttttgtcacaactgcatgctggtgtgcccagtttccattgagcycaagccacagcaccgcctcgtgctggggagagargaatgtgctggaaaggctgcccgaaggctggtcgccactgagccatgaggaaggggccaaggtgcctccttcctctgcccttcctctcccaggcacttggattcarctgagttttacttttttttwaattttttataaattcagcatttattttagattcagtggtacatgtgcaggtttgttacccgggtatattatgtgatgctgagatttgaggcataactgatcctcttacccaggtactgagcatggtaaccagtaggtagtttttcaacccttcccccctcccttcttcctccctctaggactccacagtgtctattgttcccatctctatgtccaagagtacccaatgtttagctgccatttataagtgagcagtatttggttttctgttcctgtgttacttcacttaggataatggcctccagctgcaaccatgttgctgcaaaaaaagcattatttaattcttctttatggctacgtagtattccatggtgtatgtgtaccacgtcttcgtcatccagtctactgctgatgggcaccaagcttgattccatcagttccctgttatgaatagtgctgcgataaacatgagtgtatgtgtcttcacggtaaaacgacttatattcctttgtgtagacactcaataatgggattgctgggtcaaatgttttaagttctttgaaaacctccaaaccacattccacagtggctgaactcatctacattcccaccaacaatgtacgagtgttcccttttctccacagcctggccagcatctgttgttttttggctttttagtaatagccattcggactggtgtgagatggtgtctcgtgactttgatttgcatctctctaatgatcactaatcttgagcattttttcatatttgttggccacttgtacgtcttcatttgagaagtgtctgttcatgtgttttgcccactttttaatgtgggtatttgttctttgcatttaaatggtctaaattcctggtaggttctggatgttagacctttgttggatgcagatctgtaggttgtccgttcactctgttaagagcttcttttgctgcacagaagctctttagtttaattaggtcctacttgttgatttttgtttgtattttgcagttgcttttgaggacttagccataagaattttcccaaggctgatgtccaaaatggtgttccttaggttttcttctaggattcttagatagtttgaagtcttacaacatttaaatctttggtccatcttgagttcattttcacatatggtgagaggcagaggtccagtttcattcttctgcacatggctagccatccgctgaatcttaaaacaaggtggaggtggtggtgtttgtattcaccactgtgttctatatgatctaacattcatagtgccaattgtgtgccaggccttatgctaggtgttttccgttgattccctcatttgatctgaaagtagccctgtgagagttaaaggtgaggaaactgagtcacagggatattggcatagctcctgctttgggttgggctctgggccctggtgtgggaatgcagaggtgagtaagaccaggcgcccccggaggagcttctggctcggggctagggtgcaaatgtgaaaaccggcaagcaaaaggcagggcccagggcaggaagtcccacagtgtgtgcaccttgagtgagcagaycggggcaggggcagggccagggaaggcttcagagtgggagagggaatgccaaaggcacagagcccaggagagtctcccctcgccagcacctcacccagaaccacagagacaacagcgccaagggaaactgagcagcctagggcagcatgacagcaggaaggcagtactgtggggcagttggctgctcacatcctccctctgggatgtccccaccttgctcacagcctgagaggttctgcagggctgtttcagctaacccaagccttggacactcagttccagggccagacccacctgctcacctggcttgcttatgtccaggctgtgctgggctccagcaggtaccaagtcagtcaccatgacctgtgccaggctccatgctgtggatggacacactcatccagcccatcacgagagacccttgctgcaaccrgcactcagcatcccaagcagtgcaaccttgggctgggcctcctctgtagagagggtcagatgaggcgagggtcacagccctcctagcttccagggtccaggattctagggcatcccagcctttctgggttctggactgccctctgccactgctgggcagcctggcaaaaggggaggtcagtgctattagcagcagcagcttcgacggcttgcccctggaccctgccgttcactgggtagcagaatgtgcctcacactctggggccctacgggcctggcccccactgagcaggcgccctgtggtgggtgtgcgcccactggaggcagcattccacccatgggtgtcctgagcaaaccacaggcctctcctagggtgcatacattgctggctgactggggagtctctcagaacgggagcaggttggttggtgtgttaagagcgttttgctggaaccagggtccaagggcaggacccaaatcctggcgtggtctattcatagagctggaatgatgtgcacggctgattctaccccacctgtctccaacaggtgaggtgaggctggaggcgggtagggatgtggggaaacctctgaacaggagcaagtgagaacccctttgctcccatcatgcaggcgagaggagccattctggggtcaccagctcatgaaggctgcagtgagcccccccggggagggagcaaagcagagaaaccatccagcctgcaagcaggtagcagtgggctctggttggagaacccaccacccaccgcacccagaacagacctgcagttgatccattatcatatcagctcatcgccttttcaaaagcatcctggtttggatcaggaagtgtaaggtcacactagctctgatgaacaagggcagggaagtctcagctgccagccgggtgtgcagctgcagcacagaggcctgcccggagcacacagctaggaagaaacccgtatgtccccagaggccgggggccagctggccataggcaggagrgggcccgggagggagccagcagtggacccagggccaggagaggtgggacagaggcacggcaaggacccctgcctggccactgctgcccagaggagtgcaaggggatggctgctttctatctggacctgggacacttgagacagtcactcaaccccctcatgcctcagtttcttcatctgtraaacatgaacaaacctttgggattacaagggtttaaacattraatgagataaccaacgtgcagtccttttggaagccataaatcagtactgcgtgtgagctgttgtgtttagtaggtttaggagcagcagcccccgcaaaccccagggctgcagagagagtagaactggcctcttggcctcaccccatctatgttccaggatccgaagccactgggtgccaaggacaggcacgtgagctactctcttatttgaacagggacccaattgtggatttgtcaacagggcacagagcaacactgatacccagctaagagcgtgcagacacgtgcctgtgaatacacgtgtgctgactcacggggtgccggccatgatcacacatgcacacacgcatgcacatgggtgtcaagcagcaggccagctgccctgtgaagtcactcaggcgggcagttctgtggtggccagcacagcctcgatgccctgtcagaacagaatactcaaccccaggggttttcttgagtcgaattccaagcaacgcattgaggaggacagggagcaggcagggagcaggcacctgagtcgctgtggtcagactggcgtctccccaaatcatcagcctcaagagagtgctgggcaagggggaggggacaccgggaccaaacccatgcttgctgttcctcactgcggggccccctaactgccactcaggcccaggtatacccccacacgcactgtaccctggccaagtcctggcagagaggagcaggcagggcatggaggcccaggcaagggagcagttgacagctggaaggaaacgagacaggtgctggtttgcaatggccaggcctggtttgcgcttgggcatcttgactcaacttgagaaccctctccctggctctggaccccccgcggctctgggtgggaatggggcactgccctctggcatgggaatggggcactgccctctgggtgggaatggggcactgccctctgggtgggaatggggcactgccctctggccccccctgtggctctgggtgggaatggggcactgccctctggcatgggccacgttgcatctcaccacaggacgaggaaaagcatgccatgttggaatttcagggacggaagctggcggggcagagatggccagggaacaggagagaacaggagggacatggtgggagtggtgggcgggcgcagggcaggcatccctgagtgccaggctgggtacgttgcagtcaggagtgcacaggaggatctgagcaggtcgcaggctggggttggagggtctgacagtgtgtggactctgaattgaggaggaaaggcaggcgtcagagagatcaccataagggccattgygggtaaaaacttgacctggcccaggattaggggatggagccctaggccggggcagcagtggaaggagctgaggccccgctgatgcagggagaaggtggagtcaagggcagccctgaggttttcatgccgggaccatgacagaaagaagggggcttggatgagagctgcttccagaggaaagatggtggttggatctgaggttgtgtgttaggtcacaatgggacatgccagacaacaagaggtgtagcagctccgtgtgagagatggggaagctgaggccaagggaaatcaaaggacrccgtcaggggcctcgtgctggtgttttctcctctgacgatcccagaccctctcctctccacctgcctcttctttggaggtgacgtggggctttcaggtccgtggcttccatctgccctccagcaagcagcccggagtttggttggaaggaggcagcaggaagccaggccgagcagacccgtttcctggcccttccaggctgcaaggtcagcagtgacagcagctgctctttattggcccaactatgtggcagacggtttgcctgatttttttttttctagttatcctgacagcctagtggtaggagcagtatttttattcccgttttacakatgggaaaatgaaggcccagagaggttacctcaccagaatcccgtagcagaggcagaaagaggctggcaggtgcacagggtcgtctggctgyggggttcagaacctttctgcatcgcagggcccctccatgcatggctcttccaggacagaggagagcaaagaggtggtggcaggggggtggcagaaggctatgactgtggctgggttctgccgtcaccctcagtagctatgggactaggcagggtctgaggagctgagggccagacatggcccatctgccttggtgtgggggacagactctcaggtatccttggaagccccaccccccggtgctcatgccttcgtgcagtcctcacctttggtgtggatggcattcgtgaccagctcctagccagcagactgtgcaaaagcattgggccatcactcccaggattacactgtgctctgtaagattccatctgctagcagattggctctagatcccttccttgctggattgacgaagtaagtggccatgttggagaaaccgatgtggcaaggatctgcaagcagcccccaggagctgagggcagtcccagctaacagccagcaggaagccatggcccgcattcccaccaccacccaagtgagcttggaagcagagtcttcctcagtcagccctccagatgaggacacagccctgccaatacttcgcagccttctgagaccctggactcctgacccttaggaactgaagagagccaatgggggctgtcctctgccaagtgtgtaggaattggttagatagcaataggataggaaatgaatatacttgtcttgggagtggggacatttccttccaaaagtgggcctggcttttagaatgggcctagggcaaggatggaaaggtagcaaggaaggagggcaaaggaggttggggagcgagsacctttcaataccagacttctcccccaatcccaggctgggctccagggttctgtacaaggactacttgccagtcccacaaatcccaaagatagcatgaccctcagtaatccctatcacgcaggcaggggtcaagtggccaagtggtgctctgtgcaccatcgtccggtcatggttagcacattcctgccgaacgccttcctccactcggccaagcagaagcrcccccactcccatcacccatcatgacctgctgtgggatggctcctctctggggtcttccaygggcctggctcaccattgtccagcgtcccacaatcctttatcaggtttgcttccttcagctagccttctctccagctgccgctccctctccggctgtccgtccccctgcagagcatctgtgtgcccatccccgcttccccacccgcccccgggcgtgccccagcagagagcagcagcaagtgatgtcgtcacacggtgaagccccaattcttgcttcagggcctcctgcatggaggctctggggtgagtggatgaactgctgcctgaagaccactagctacatgattcagggaacttcagtgacaccagccggggccaacagtgtattcggttgagattcctgcagttagccagaatggactttgacttgcagagtactatactaagccaaaccccagtttccattttttactgaatcataatcaaaatcaaagccaaagactatttctgaaaaaaagaaaaacaaaggaactacctaaaaaaagtcagtgaattacatttctgatgctggaagaaaaccaaagcgtgaaaatattctctgcaccaaatcagaacaaaactaatacttccttctgcccaagtccttggctgggttttcccagttagaagggaacaagatggtttgagctctggaattcacgctgcccttccatcagcagtcccaagcgtgagcctgcagtgacccaggctgggaagcagagtgcagacatcccagggcccaagcttgccactcttcctccatgagcaaggcgagggcagggtggggggagagcagcagtgccttcctgggggcactcggcccgaccactgaggtaggccatgcaggggatgaaaggtcagggggctctggccctggagcagggttgcccagtgggtgggcacgagggtgggccaggggagggtctgcagggggacgtggtgtgggcacgggtggcactggacacagaggccaaggcccgagtttgagcagctctgctgacacctaacgcagtgaccttaggccgatcactcaggttctctgagctttggtgtcctcacatgcaaaatggggacgagatctgtgtgtctgcctcatgctgtggctgctctgaacatcgagggactgggctttatggaaaagggagtcttactgtttcaatgtaagattcagagtggaatctgctatggggcccctccccagccctctgcagtcggtgaccagggcaaaggaggagcaggggcctgggaaagtggctcctatatggtgtgaggtcagtgcctgtgtcctgccccccagcagggctgtggtgggcccgggaggcggtggtgctgggggcaggagggccggggttaggttaatgaagtatggattgactgggctgggagctgattagctgtggcatcaggcgtttcctgagcagcgcctgcagaatcaatactaatccgctgatcccattaggggcacctggagatctgtgggacaaagcctgtccctccctctctttgggggcactggggttcctgggtgacagagatgatatgaacagcagctgtcttaaccagcaggttggtgtcctgcacccggtccgcacagcacactgaccggcgccgtgtgatgcctggggctccctctgctgtcaccactgagcccacgccctcaagagtcagtgacgccggttcccagcctgttcacagcactcaccgtctcgcttgctactgtcatcacagaatgtcatgtaaactgttgaaatagcgtgttgaagtaaatgtgttgtttctatgaaaatttcataaggtgagtccagaaaaaagttctccaagttaggtaaaggctggcagggaaaagtcatattctaaagggtgctacactcagactgctcaccaagtgctcctcagcccttgaatcactttgaagaaatcaaaacgagatcgcagcgggatgctgcgatgtggctgatgtcagacggtcagcacagacctccctgaccccgtgtcggctgagcggaagtgctgagagccagcaaggatgggtcgttcggatttgggaaaaattagcatgcattgtgcagtcctggggaaacatcatctatgggacaactggctctgcgagttacttacattgaaatgtatggcatgtatgtatcatttggaaagattcttcgccttaatggacttttttgatgaaccacttaactactgttcccatcttactgggtaaaaaggcctttctcgtcctccagggatgagtacctcggacagtgtctgagcttgtttgtaacctaccacgcacacgcatgcaggcctttgggaacattttgcgttcacacgtcacctgcactggagcgagctgtgtcgtctcttccgctctggactgagcaaagcttccccaccctggattgcccacagaatccaacacagtgctttgcctgctacagatgctcaattaatatttgttgagtgaaattaaataagctcctctcctcagggcctgaggcattgctgaggccttcgtttgaacacctgcaggctcagaagaaaacctttccatgcttttacaattggccagccttgaaccacccctgcacatgctccagcctcacatgttctgccccagcctgggtcaatcagagccttcccatctgagtcccagacaccccctagtccttattcacagcgcacagcaccctaaaacccatagacaaattcctctctggaggtgccatggctcatacctgtaatctcagcactttgggaagccaaagcaggaggatctgttgagcccagtaggttgagaccagctggacagcatagtgacaccctgtctctacaaaaaagaattttaaattagctggacatggtggcaggtacctgtggtcccagctacttgggaggctaaggcaggaggatcacttgagttccggaactcaagcctgcagtgagctgtgatcatggcactgtactccagcctgggtgacagagtgagaccctgtctctcaaaacaaaaccaaatgccacaaattcctgcagagaggtgttcccagtatggccgatctccataggcatactggcccttaagtcaggactcagttccacgggcccttaagtcaggactcagttccatgggtgctggcccttaagtcaggactcagttccacgggtgctggcccttaagtcaggactcagttccacggaggctgttttgttggcgctcttgcctcgcctctggccctaggtgcccactgagctacactttcctcacataggacatcccttcatcttcgcagagccctatggtaacctccagttgctaaaatggcaggatcgttgaaacttccagctcaacctccctattgtaaagacgaggtcaaggagggcaatcagcatgacccaggtccccgtggagcacctgccggacacgtccaggccgccaccctcccactcccatgtgctgccccagcttctgctccccatctgggaaccaccctccactctcccacagggaagtgcttgcttccctctgaggctctgagggcacccggggagggcagggcacagccttttgtgtctctacttgccgagacgcctgagatctgaggttggtcacagatatggtgcaagtgtcaggatgggagttgtgaccacggcaggcctgggccctacactcacacacactgcccacgccgcgtcctgcctctccacgaagtcccccttgtgcctccacccatctcctcctccagcaccccattcttccccgtgcttgcctccatctcctgggctctcctgggtgtggccaagccactcctgcacctttgtgctgattcttctgcctgacccaaggtcctagaagccattctggggtccttgttagagacagcctgcgaccacagacaaacaccgccctcctccaagccccaggcagaagcagcaggctgcgagaggggaccagtgctggccaaccttgcagccccgtctcagactggggcccagagctgggggcaggtgcagcccacccgctgcctggccccaagcccctgcccagcccaggcatcacatcccacgacctgccccctgccggccagctggcgttctccaggctgggggctctctgtgttctgcttgataactgcctggtaattagctccacgattttgctactatgcttataatagcctccattaaagttatggggttttcaagccataatggcttccagagtaattaatgcacaactgggtttattgctgagtttatttttagaggttttctccctctctccccctcccttttctctcatagatgttttgaccaaaaagactggatgggagcagaaggcaccccacggcacccttgcccacaggccccatcctcccctctcttcccttcccgcccctccttcctgcttcagcctccaagcaggtgctagggccctgcagtgggggcagccattgcagaggagggtggctgtggtccaggccagaggaagcatttggcctgtgtgtgccccttacccaccctgcgcctggcccaggttcgagaggcttggaggcctgggacctcttatcctatgcccccgatgacagcatagagccagatggcctggactcaattccagctccaccatttcctaatggttgacctcaggcaagttactccccttctctggcctcgatgaacccacagggaccacagccatgcctactgcacagggctgctgtgacgttgcaggagcaggtgcatgtgaagagctgagcctcatcttcggacatctctcatgctatagggaagtttgtataaacaacagtgcaagcgggggctgagaggctgccccaaaggaaaggcagtggcccacagggactgagctggcaggacactcatcttctctccttggctttctccatcctggtattagaacctgcaccaacaccaggagcacttgagaaagctccttcgagagtctctgagaacacagaagaaatcttcctggacatttctgaagccccagccaggcccagcctccccatccttcatcagatgtggcctaagatccaaacgtgtcttggccaaagaaccaaaacgtgtcttgacacgcagccccaygcagccccagcagtggcctgggtgtggagggacaggctaaatctgggggatgtggcatgaagtcacttgcatctcagaccacaagacccagcaggcatcccgtgtgggkttctaggctctgtccctcactgggccagcaaagaggagtttacgggcggacacagacacacacggcctagaatgtccactaggggaactacgtgcctgtgacgttgaaccccagtgggtcttccactccccggggaatgggtgggggagactctctggatggagtgggcctctgatggcggggtgtgggcaggggatgccggccgtcctgggaaaccacagtgctccttaatggaggggatgccggccgtcccgggaaaccacagtgctccttaatggaagacaaatcctggtcttccacaggcgtcagaactatttggagagaggacccggtgaggagaggaaaacacgctattttggaaactcaggggctaaaaaccctcctcggccatagcactcgactctgcctgaaatggtgagcacacgtgagctggggcaggagcaggcagcatggcccccaggtgaggtactgtccgtatccaacactgggcactgggacgggtgggcacagcgaggctggctgggctgcccgaggctgcctgccctccccaccacccccacgggtccctgctgcatcatgcatggtgctcagcacagaagtgaaaagggaggagaagaggatgtgacagtttccaaggcggtcaggaggtctcttcgcccagtgtccttgccatgtgagagaacggttcccagagatgctaccagtggaccctctgcaggactgaggaatcccagtggctcattctcctcacttgggccccctgctgttctcattttggaggactgtctcccctcaatgtggcagcccctgcggggacccctcttcttgctgctgcccagcccagcacctggtgctctgtcctgcacagagcggtgctccacaaggatgtcctattgacacggaagaggaaggcactctcgtacttccccccagggaccatcccagaaacatctcttctttgtcctcaaaagactgtcaccaaaatgcaaattgaaaccacagtgagatactatctcacaccagtcagaatggctattactaaaaagccaaaaaatattagatgctgatgaggctgcagagaaaaggcaacacgtatactctgttggtgggaatgtaaattagttcagccactatggaaagcaatttggagatctctcaagaacttaaaacagagctgccattctagccagcagtcccattactgggtatgtatccaaaggaaaataaagtgtttcacaaaaaaaacacctgcacctgtatgttcatcgcagcactattcccaatagcaaaggcatggaatcaatctaggtgcccatcagtggtgaactgggtaaagaaaacatggtgcatatacagcaaggaatactacacagccataaaaaaggacaaaatcatggcctttgcagcagcctggatgcagctggaggccattatcctgagcaaattgacacaggaacagaaaaccaaacacgatgcattctcacttatgagtgagagctaaacactgggtactcatgactgtaaacatgagaagaatacacactgaggactctcaaaggaagaacggctgaaaaacgccctgttgggtactatgctcatacctgggcagcgggattcatcatactccagatctcagcatcacatgcaatatgmcccataacaaacctgcacatgtgcccccaaatctaaaatgttgaaattatttttaatataataattcgtggtccatatatggttaaaaaaaagaaaaaagagagagagaaaataaaacctctcacccctttatccaggctttgataagtagctggcattttagggctgcacgggagttaccctgtttaattctgagaatgaccttatgaggtagggatccacagtgccccattttatagatgggaaaactgtggcatggagaacggaaatgacktggcaaaggtcttacagcctgtgggtggcacagttgggatttaaacctggtgtctctgcagtctgtgcttctgacccctgcaccctactgactttcataaatggagcagagccatggccctgtgcctgtgggaaggacagagcccattccactctaacaggcagacaaaagaggtcctcaggtgatggacagttgaggctccattgtggaacccccgatgctgtgtgtcccagagcagggcccagccttgctggcatccattcctatacctgggtctctggctatccgcttctgctctctcttgcaggtgtccaccccccagggttcctgacccctgcccctggacagcgaccccttctcagactccagttgggccggactctccaaacctgcttccgcaatgggtgggttgtgagtgctggtaagacctgctagccaacattcagctgctctgtcctctccatgcctggccggcccggcccatgcctgttcttttctcccctgtgctgccgccgcccgtggccgcccctctcctgaacttaccgccactcaggtaatgaggagccgtgggtgcagccagccttggagatgccgaagagacgggacatcctagcgatcgtcctcatcgtgctgccctggactctgctcatcactgtctggcaccagagcaccctcgcacccctgctcgcggtacataagggtgagcacgcacgcatgccctgcctgcccagctgggccttggtagtgacagtgaccacagctgacacgcagggttcttgcttgcactcacttagcagctaggaggaaccacgggatcatctaggccccttcatgagtcttgcacccctttgggaatgggaagctaatggaagctacccacacagttttaagatgcctgggatggtaggttggcagacaccaagacagttgccttgaaagaagagcttgttactctcagcacccaagaggagggggcacgccctgccccctggggaagtgctgaggtcggaggtgggaagtgaagggagggggaggtgggaagtggagggagtgggagtctttagtgtggttttggtaggaaggaaagtggttttcataggaagggaagggcgaagcactgtcggcagctgagctggcccagaattgcatagtctgaagaaagtcagtgggtttaggatatgggtgtggtttctaattgtctggtatcgccctggggtggtttagggcagcggaagattggcttgggtgggagagctccataaaggtggtagtgggtatgagctctagatcaggtagtttgcatatgaaaagtgtgtttgcaggcaaggtgtgtactgtcactaggaattagctagtcccgsgaggggcagtccctccccatatctgcaagtcccccaagatgtcgacgcatcttaaaatacagaaaaacttaaaaaacaaacatcattaatacacacacatacacagaaagacacgcatgtacaacttcacatgccatttcatgacatgcaaggaaagcgaccattctgaagtggatggtgggggaggaataggatttctggcctgcagtgtgttttaaaccctttcacagagagtatattgtttgcctctcttcttttcctgtgtaggaaaccctgatctagtgctacctggtggaaatagggctggagagaggaaaagtcccgtgaagaactagtggaagaactaggggtagaactcctttcccctggctctgggtcctgggtcgcctttccctctcactcccaaacctgccacgcaccccacagctggctgccccagctcttcagcactttgtctcgtgcttttctgccccctcccccacttacatgcacaggctcacgtggggtcaggcagctgttcgtttgcagcgtgcatgataccacctggcagtgtgataaacaagaaggcagcaccaagcccatgcagagagaggtggtgagtgcctgtaaccccaagatgcaggcagtgtccaaaaatcacagcctgaagtcgtgctgctcctcacagtcaaataccaagtcctgcaaacccatagctgttcctgaagcttccatgaggaagggccaagctcaacattgcggcagcccactgcccgtggctggcacttggcgcctgtcttcctgacatcatcctctcctcccgaccctagggcctcttctctgtgcttgtcagttcagaatcattgttatcttgcaaatacatcactccagaggggttaaaactactatatataaagcgacatgatatcgtgtcgattgcgttcttggcagagctccagcgctggagacgtcaggctgtttgctaagcactgatggtgctgcctgaggctggggacttggcattctgtctccccagagcatgccaagagcaagcgaatgaaagctgcagctgagtgaagttagggtcaccaggaggcctttaggacccaraattgcagacgccctgaagccaatgggaagggcgaagcccaggagcacacgcagtagccgtgccctaatgtatggggactgtccaagggcacaggtcctctgcggccttgggatgatttgggtggcagagaggtggacaaagtggctccaaacttcctctcaaggcctcagtttccaaaacttgactgcccataggatgaattaagtcctctgtctaggtcagaaccstagacacccatcccrctttcttccacgttgctcttctcacagtttgaccccagactcctctaagcagccccctstgagcgactgcgtgtgtgctggtttcctcccccgaccctcagcaattgctgtgtgcctggtgccatttgcccatgagaactcctgaagagccacgagcaggcctcctgggtccgttcagatgagctccacgctagcgtgccacacrccccacatgctgccgatgacagtggccggagggaggcagcagaagagctgatgcccggggtcctcccctttggtgtgacttgctggttctgtccccaccgattgcctgaagccagaaggaagcagagttggccactgcccttccgcaagagaggaaactgtgcctggcggtgctctcagcccttgtggactcattaatccacataataactcgataagttcgatgctattattagctccattttacagttgctgaaattgaggcgccagaagctaagcagcttgctcaagggcacagggttcgtaacggcagaagtgggcagggtctcagcccaggcaccgggatttcttacctttaccacccgacggtaagctaggacaggagggccacaccgtcattggtgcgtgagcccttccgatggaaggacagaatttggagagaagggacrcatggaaaacaagaatcccaatggccctgatttctcctcttgctaggactgctagatctacatataccttggcaactatgggcaaaacccacgagaataaaatgcggtgaaataggaagttctgcaccgagattcagagaatgccttacgtaaggccaggagggaagaggccccgcttgactggagggcttgagaactccgggagctgcctcaggctcctgcgggcccacagtgggccctggttgctgccgcagtgctgcggccctggggctttgtggcgtccacaccacagcggggcagtgccacgtgctctgctagcccagccctgcacagggcagtgtggccagctccctccagatgagtagggctagggaggggagggtcgggacgccttttcataggaaagtcagcacattcaggaactgaggatgcaatcttggaatatgggcaactgcgctcaaatagctagagggctgcaaaggtgggaaggaagaggttatgtctgtgtcatcagagctaggaccctcccagagaggattccagggctgcagatttcaaccttagagctaacaggtcaggcaaggcgggggtctgagcagcccctgcagcgggggaggaggagggtgccctggcagggtgggtggcgtcccgctctgaatccagggccgtagccggcgctctcctcccacatcgccggtctcccgactccgcagatgagggcagtgacccccgacgcgaaacgccgcccggcgccgaccccagggagtactgcacgtctgaccgcgacatcgtggaggtggtgcgcaccgagtacgtgtacacgcggcccccgccatggtccgacacgctgcccaccatccacgtggtgacgcccacctacagccgcccggtgcagaaggccgagctgacgcgcatggccaacacgctgctgcacgtgcccaacctccactggctggtggtggaggatgcgccgcgccggacgccgctgaccrcgcgcctgctgcgcgacaccggcctcaactacacgcacctgcacgtggagacgccccgcaactacaagctgcgcggagacgcccgcgacccacgcatcccgcggggcaccatgcagcgcaacctggccctgcgctggctgcgcgagaccttcccgcgcaactccagccagcctggcgtggtctacttcgccgacgacgacaacacctacagcctggagctcttcgaagaggtgagggagggcccgacagtgagcagcgggacctccggctgcggggagtggaggggcttcccgagaagggggtgtgggtgcggaggcgcgcgcagggggawcccgggaagccgggctgggagcggggcaggcagcagagagccagggaaagggatggaactgcgggctaaagcatcccccacaagttagggggaagacaggtggctctggagcccctaaaccatattcctggccctagaggtatctcctgaatgggtttgtgagtaggtcattctgcgtgactaccagaaacctcttaggtggaacagttggagctcgcctgagtatatgggctgtgttagtctcggggacaaggggagtcacttcacactctagagcggggagactgaaaggttttagacaagggagaaaacagcagcagggccacgctgagaaggggaagaccaggccgtctgagaggtcaggtgtccccggcagcccagggcaggttcttctcaggtgcccaacccatgggatgggtcctgggggcagggctgtactggacaccccctaggtggccgcggctggccatgggcatagatagaggtggctgaaggatgtcgcctcccttgggcacgcgcggccgtcctcatctgcagtgccggcgccctgactctggaccccccccttgtagatgcgcagcaccaggagggtgtccgtgtggcccgtcgccttcgtgggtggcctgcggtacgaggccccacgggtgaacggggcagggaaggtggtcggctggaagacggtgtttgacccccaccggccatttgcaatagacatggctggatttgccgtcaacctgcggctcattctgcagcgaagccaggcctacttcaagctgcgaggtgtgaagggaggctaccaggaaagcagcctccttcgagaacttgtcaccctcaacgacctggagcccaaggcagccaactgcaccaaggtgagaccctccgcagaactgacagctgtgatgcaatgtctcaagtacatccagaccctccctacagatcgggagaaggaaacagaggcctcaaaatagcctgggctttctggaaccccctcccaggaaggcagtgtatcacctgtaaggcagcgacactgcggacaggcagggaaagggagagcaatggccactggggagttataacctcccacagaacagccgtgctccagcacctccctgctgagcactcatgcacacacacatgcctacgcgtgcacacatgtgcgcacacacmtgcagatgcacacacatgcacacatatatgcaggtgaacatgcacagrcatgcacatatacacatatgcacatgaacatgcatacgtatgcacacacacacacacacttgggaagtcttggggcttctcttttctgtagttctagacttcccatttccagcaggtattccgaaggcatcacatgtaaaaacagcaaaaatgagggggtagtcgagagccacagaaaataaataaaaaacaattgagaaaatcttgatggaacaattgaaaaactctcgaaggaaaaggaggggcaggagaaatgtttacacagtgtgggagggagcagggaggcagcagagtgaggtcaggggcctgtcccaccatgttttgcatctctgggcacacagatcctggtgtggcacacacggacagagaagccagtgctggtgaatgagggcaagaagggcttcactgacccctcggtggagatctgagcctcaggatgcaggtatgggcatgacgagggtgggccacacactgggcagggckgcaccaggttgggccgaatcaactgtctcattcttttcctcttgggctttcactgtggaggacagggcagatgtgggcaggagtggagggcgtcgtcaccacagtccccttcccactgggccacctgaaagtatccaggcattaactttcacccacgcagctgggtccttctgccaccagactcttcagagggtgtcaccttccaaacatcttgctgatttttctgctggcagtgacgcctgcaccccacaaggcactgccattcagactctcgctgrccagcgtctgtccccccaagtctgcctcttcccctgtggattccttcaccacgtggccatggtgaggactcacggactcgctgctccacagcaatgagcccacggctgtcatagtgagaggtagcgcagagtgacagcacggacccagagcccacctcagctcccaggacccctgctcttcactgtttgacctgacttgacttttctgggcctcagtttcttcatctgtgaagtaggttgctgagarcacctagaacagttcatggcacttaaatctcatcagtgtggctatttttattcaagtctttaaagccctctctggaagtaggccacaggatccacctacacttcagaagcaaagaaatgatgttgagagaagctaaatgaatgttccaaggtgacacactggcacgagtgaattgtgctgggtggttggcaaagccaggcattttcaggggcttttctgtgatcttatcctgtctcttaaaagcagctggtactcctgactccctactctaggttatgccaaacagaggttgaggcctgagacagacatttgtcctcttgccctggagctaagcaatagcttctgtattgtgtttgcccgcagaggaccacagggtgtcactcagtcaccttggccagcgccacttagaatgcatctgtaccgagcctcacttmtgcctcctgccctcactgccctcactggaagcaccttccccacctgcccctcagaaaggcccccacaggacctgggggcctgggctttgcagaggtcctggtggccctgcctggccattccctccccggccccaccctcagccgacacctcactcattcctcctctcccctcacaggagcctcctcctcagaccctgttcttggccttccatcctctccccacggctgatggtccctccaaggccgactcctaaggaatcaccatcaccctcctttctattctgggggcttctgagagagcccagcctgatgccagaacaaaggacagagaatttaagcacagaaatcccagacctgttgttctctccatcyagcgtgaccagggcccgagagacctgatggccagggtggggtgtccagcaccagccaagctggtgctccagcgcacctccccagagctccccgcactgacggggctgcaggagcaggtgcagtgggcgcccacactggccctgcagtgatgcagggcgggagggagataagaagaccccgcagtcaagtggagcatggccctccctggctccctgtccctgggctcagcacgaccacacaggacacccagccagggaattctgaagaccagagagcagcccacgggcatcacgagcgctctgctcctctcctgggcccctgctcttcccgagagctgcccccaaatcagacatacctctgtggctctcctctggttcacgtttacagagcataaggctgtcttggatcccaacaggcacccagccctgcatggggggagcctgggcctaataggcaccccctgtacctcaggctgtggcgggagcagagtccccccctccggcccctcttcctttaccccttctcctccagcagtggcaaaggggtaggctctagagccagcacaggtcactgcctgacctggactaagaaccccacggccccactgtccacacactgcctccccaccgcccacctcggctgctaggcccctcgcctggactggactggggagggaaagcgccttttcctgcagctcttcagagccacagacctcagggtggagtgagcccatggtgggcagtgggcaaggcggtgggtggtgggcaaggtgggacctcctgcagcctggaaagaggagggaggccaaggccattccctaactccctcctgcccctggtytgaggaggagggactctggagtagcagaggggctgggaaagagggggcaggggctgctgggacactgagcaggagggaggcctgagcacactgctttggaaattattctaaacacaaaaaagggaaagaaaatgttatttctccctaagtcaggagcatgcagagctagcccacctcatgtccagctgtccactttccatcctggagaaagaacagtgtgcctcaaactcctgccctccccaggcctctggggcccrctggaaagggctctgaccccctggcccrgccgggctctctagtggtgatccggctcattctcctgcaagttggaagcacaattttccccccaagtggaggaaaaggaaagggccccagcctactgaagaggtgtttattttttaactaacagcctcccaccccattaagactcaccaggagaggtctgagggccattcagaacccactcctgagtgggtgggtgggtgggactcagtccagagacctaacattcagaatatagcattggttgcctattttgagatggatttaatctcccacagtattcatgagaccatctgatggaatcagatccctgagccaccttgcaggacgttttccccaacctcttacaccctggatgtcactttggaaaccaagcccttggaagcaagtggggtggcatgggagagaagggaggaggtgggcacaggtggtgagcttatgtgtgggcactctactgcctcacagaagccagccaagtgccaaggtcagcttggctggtctgaggccaccttcttagccaaaaacctagggttcattttcaggactttgataatgaacaacaaaatggggacttctttgggcagatgctaggtcagttgttttcacctaatatcctcttttagctgcatgtatatttatttataattataaccctggtggactgcagccttcatctttattgggaatgagtttgttataaatcagaaatgggtccatgatgaccactgttttccaaacccagtctgttccctgctccctcgctggcaagccccaccacacaggagtgaggccaggggctaggagttctaagaacagaggctggggtgagggtggcacccaggcagctgcatctggtctgttttaatttaactgtatttaatttgctttcaaaattaaaagtcaaatacagtttttaacagtcctaatcctcttcagccctgccttattttgttctcatttattaatttagctacccaacaagtatgtatcaggtgcctgttatgaacaggcatcattctaggagccgacacacagcagtgagaaaacaaggctctcattttcaaagaactgacccactgacgagaggagacaggcaataacgaatgcatattatttcagatgcaatctgttgtatggaggatgagggtgagtcggggagacagaggtagcagtggagagggtcagtgctctgtagggtgaccacagaggcctccgtgataagtgacccttgagcgaagcagcaacaccctgacatgcagctccccgggcccaagaagaacgaactctccaccaggcggaacaagcgttgctcagcctgcttacagatcagcaggaaggccatcgggctcaactgacggggcgggggctgctgggggcaacagcagtgagggatgtggtgggcgtgggagaagggagtccccaggcaccgggtgaaaccagaaggcaatagggggtccagtacggaggactaacataatctatccatctctaagaagaactgccctgctcctccacggaggataaatggagagggcaagggcaggtggagacgtggctcctggaatcatccaggccaagatgcagtgggctgagtgggggcatggggttggggcagagagaagcagtcaaattttggccaagtttaggaggcagagccaggaggatctgctgctggattggatgtgggagataaagagaggggtccaaaatagcccgagacacagaacagcactgccatttccagatacagggctgcgtgcaggaggggtaatgtggggaaatggagctctgtgtcaggtgcctgttagacacatgcagaagaaaatgcgcccccacacacctggagctcaggtgcagcccagcatcggcgggcgcgggtgtccaacctgtttacaaaccacaggtgcacgggtgagaccctatgcagtgagtgtggacagaggaaagaaacagcccaaggagtgggccagagacccccagcattcagaggctggatatgaagagggatcctccaaagagacctagatgaggccataccgtgtggaagataatggaaacatctttagtcaacgctggagaataagctctgccaagaggtactttgatagagaagctgagcaattaactggcagaaaagaagggtgagaataagaagctggtgtaggaagacctcaccttaggaaaccacagtgtgtcctgctcaggtctgcgtggaagtgtgatccaaggggcttctccaccttacaggaggatttgcaggaaggttcccttccattccatcactttctgacggaaccagctcatacacagctctgcagaagcacacactcaggtaaagcggggcagaagaccctgcaggtggctcaggccacacccaagtagcccgagtctcatccacatcttagccccatgcttgtcgttccaaggcagttccagaagaactggtgagtttgggcaaaaccagggactctgccccatgttgttcccaagccactgtccacaagctttcctttaataagctccatttaataagcccttgacccggctcagctgctgggctgcacaccacgaatgtcccctgcactccccctgggcagccacacacgggcagcaagcctgctggcctcagtgagctccacggctcaccatcccccagcccaccttcacggggctcccagagctctcgctgtgccggggatgtgtgtgctacttgactttctgactcttactggagataatttggttttggcagtagatgccagatgtagtttgtgaagcaaaactcaaccccgcagttaactcatatggagcgcccttgactgcctggcagattcttacccccgcccaccagcatgagaatgaatttgcatttgaactgtcctctccagggcacttccaatccagagacatttgaagggaagtcggggtcaggaggggaatatgaggccaggatcatggcccacccaccccagggacggtccccatctggacccccaggcggcaagtggggcccaatgggaacctgaccaagaaaaccaagctctcagacagccttcccttctggcaagagtggcacacatgaccagagactatcaccagagggggtgtgattcaaggttatagctttactgcaactcaggacagtgagcccaagccaggtgttgggctgggccccagaacaaggctcaaatgcggacttggacacacttcgaaggagggctgctctgcccctgctgttcgggcgtggggggtggggggcgggggccactgagctgggccttctgtcctcctccctggatgtgcagacatgggccatggcttctgccaggactcacatgtgagctgggccttctgtcctcctcccctggatgtgcagacatgggccatggcttctgccaggactcacatgtgagctgggccttctgtcctcctccctggatgtgcagacatgggccatggcttctgccaggactcacatgtcctcctcactgaacaccagagacacctgctaacttgggaagacgcagggtgaggatttctgtttctccagcccagcctgtcaccctgtgggaagcagcgagtgggaagggaaaggggaagtcacatgtttctcacgccgagttccttccagaatcccaaagaaggctcagaaggttgtgaaggaagaacaaagtcagctcaggtgagacaccccttccccaccctctacactggtgacacacccaggatttcggggataaaatggggccatgagggatgtggccaagcctcccaggaaccagcaaagagcacgcctgagtccagcagatgctcgcagggctgtgacgtccagtgcaagggcacgtttcagcactttttctgagggccaaaggctgggcgatctgattagctgctcccaccctagagacagcccgacagcctcggcacaagagcagggctgtaggaaagccatcatcaacaaagccaggcccagagccatcccacctttccctgcaggcttagggttttgagctgagacaggggcagactgtagcccccagtccctgaggttgctacttaaggagatgcttttgcagtgaggggtggggcagcagccaccaggcttcaggtcaagaggaggcggcagtctcccactggcaccagcaggagggggtgccaccgctcacttaatgtactggttcctgcccaggtggggggtttccgtgaactgtaatgcagggccckccatcgtctcctcaaaaacgatgacctgtggagagagggcccggctgggagggcagctgacgtctgtcctggagccaggggaggtgctgagaggtggcagggtcagaaggaaagggtttgggaaccaggctggaagggacagggaccaacaactcgtctgcagcgaggaggagggaggaagaacccgctgacacgcccctccaccctgaccgaaggctccctgggacggcaggtgggcagggcgtcatggggaacaggarggggctggaagctcccacctggttgattccgctgctcaaccagggacctgggaggtaaagcgtcttctggggtccaatgttccagtaacgtccaaggttctggccattgatgaatacaacccccttctcccagcccttgaaacagaggggaagggtgttcatctaccacgagagccacagcaaaagtggagggagacatgcatgcgtgcttctctcaggtccaggagaccaaagcgagctgtgtctggacagccatgagggtgggcaggtgggatgctctatttcctgtccccctagtgcatgaggtgtttcttctgctgggaacccactcctctggcccagggaggccccagcggccctctcagaccctctgggcacagaagccaccaacgactctcgccaagctcgtggctttggctcagagccctccaaggcgggaggcaggtgggagaaactggcagggaaaagggcgttaccaacctccagcttcagaaaggtgtcacaaggsgtggagctgatggacaagctacccaagaagaaagcaggtaatgtgggtgtttctgggagggaactccatttgtccaggccgaacctaaggacagaacacagagaaggagagggaggaggcccttctcaatccaccagcacaataaagcaaaataaaaggccctgacaccgtttccccatccaaggccccccgcctcttaaccaggacacagaatggcagcacggtaggatgctgggaattcctagtctgcaaatgcggcttctagtgcgggtgccacccctcacctcggccagccgatctggcccctggaggcgttcacacctgggtgcgggccaggccacggtgcaccagggacccctgggccccaccacacagcactatacctgtgagtgcaagggctggtgctgggcagggacccacctctgaaagaagctcttcttcatatccaggctatagattctgaagtttttcaggggtgaatcattcagatagagatttccaattaagcctgtgggagggaggcaggacacgtgggtagcccaaaggcaggggccgagtcagctgggccggggccacgaggggaagccctgggaagctggggtgaggggtgctgaagtgtacgctccctgagaagctggggtgaggggtactgaagtgtacgctccctgggaagccrttcgcttgcaagcaaagctccctagcaattctgtgggggacgggaaggaggaagaccctaagatttgccatgggaaggatatagagctgaggtgttacagggcgagaacaacctctggcctctctctgaaggaagttccagatgaccgagagggttctggcctagctgcagggccagtttcagtggggcccaagctacacagacctaataactcagccagaatcatctctgccacctaggattaaagctgtgcattaggagtgtttggactgtgagcagatggcaccctccctcgggcatccaacagggaagagatgtgtcctcttgaggagccactcatcagtgtcccggggccgggccagccctgccagtctcagattacagagctgctgagtggctagcttgggaatttggaggccgaggactgtggagaggctttgcagggcctacagactccgaaatggcaggtgcgggtctatgtgggcacgcgcatttctcaagggaggtctgtgacttataaacattgaactgtgatccagaggacaggactccacagtgtgggcccaggggaccctcaacaagggctcagggaagcaaagttaggaacaatggtcaggctggtgctccttccaactcccaggagaacaacagaagtgaggacaggcccagagagggagctgtctagggtaaaggagtgtgggcctgggtggtgctagatgccgctctgaggcccatctagaagggccctgatccccaggatccaggccccagtgtctgggccacgtggctttcctggcaggccaccagacggctctcggaggaaatgtggaccaataagagctcttcaagtttcctccgtcacaaacgcagacaccgtgagagagctgggaggtcaccggtgctgctcaccacagtctcattcattttgttctgagttctttttttataacttacctgaaaccacccacatttagctagattttttttaaaaaggaagggctaaatttgggcacggtggcgggcgcctgtagtcccagctactcgggaggctgaggcaggagaatggcatgaacccgggaggtggagcatgcagtgagccgagattgcaccactgcagtccggcctgggtgaaagagcgagactccgtctcaaaaaaaaaaggaagggctaaattaaagcataaaagatttagtaggccaggaaacataaagcaaattggcggcctattcccagaggggtacgctaccaacaggtgttttgtttgc

SEQ ID NO: 95692 - DNA, 96428 bp, Homo sapiens
  misc_feature (1)...(96428): n = A,T,C or G
acagagagtggaagagctgagacagggagacacagaaaaagagaaattgacttgagctcttcattccaagcatttcgaaatctatccttgcactttttagttctgggaaccattaaattctcctcccccaccattttatttatctgatttgaattggatttttgcctagttcaacagaaatagttctgagcaaactcagaattttaatgttttttggaatttttcgtggtgaaattactcaggaaagagggatgtgagaacaagacaggggaaaaggggtaggttcacatgaaaaacagcttccagtgaaatgttcttttccttattagagacactgtggttcccaccgccagctccctaactccataatccaggctggagaattaggactatgtgtggtaaactgaccactttctaggacataaatgatggggacacatggatcactcagtgcctattaggagaactcagccatgttttcattcttgtattggttctttgggaaaaaaaaaaaaaaggctgggcatggtggctcatacctataatcccagcactttgggaagccaaggtaggaggatcccctgagcccaggagtttgagaccagcctaggcaacatagtgagaccccatctctgcaaaaaaaaaataataaaaaatttagctgtacatggtagtgcattcttgtagtcccagctacttggaaggctggggcagaaggattgctttagcctgggaggtcaaggctacagtgagctctaatcatgccactgcactatagcctgggtgacaaagtgagacttggtctctatcaaaaacaaacgaacaaacaaattcattccttaaagtgattgtttagcctggttggtttattagtaggtaacacacagcttggttttccaattttatgttttgttttgtgtcctggtggcatttagctgcttcatcttaagtcctaaaacttatattctattcccacccagatcagggcctttcccccatttatgcctggagtcaacactccacctccagccccagcctttctgtgggtagctccttctcatcttaaacctaaatgtcacctgcttatagcagttttctctggccactctatctgaagtagccccctttattttctgctagtcctttgttttcttctattcaaaacgctttaaattttgtttacctggcttttttctctcttgcaactagctggaaactccacaagagtagggatctctatgtctgtatcattcctaattttgttccaagagtccaacactgtgctcagcttttacagtaggaactcataagaaatttgctgtatacacttaatgaatatttttaaagcagctgtgaggaacatcactgttcatttgtggacaacttgtcttagatatactttttcaaagtaaatttttattgaaacgtaatgtataaaagtgcatatttcattaacattttcagattttgaagtatatcttattccctacaggagaatttagggaaggggaaagtgaaagtatttcccaaaggaagtggagggaggaggaggggatgttatcactgggattagctgggctgaagactggctctaaaacatcctgccttctacaaatgtttctcctagctaaaggcaaagacactgtttctttgctgggcttcatatagcctggaacctctaatccctcaaggttgggaagagaaggaaaatcaattgtgagttacaggaaaagtagataacataggtcaaggtgtagattttactcacctccacactccaaaaactagaaagatatttagtttactaagctttttaaacaaatctgtatctgatttaatggagaaatttttgatgctctctctctctctctctcagattagatacaggaaaaggatactcaatatcactgctactcttccacttggtactggaaatctattccaacccaacaagaaaagacagttaaatgtataaagattagaaatgaagatacaaaactgttacttgcagatagtctgatcatttacatgaaatttattataaaccaggaaccatctaatgtgtttaatattcacataatctgtatttcacaaataaggaaaataaggctctgagaggctgtatttacccaagatcgttcagcagtcggattcagaggctgaatttaagtccacgtaatcagaaggaaaaatgggaacattcagagtcagagtgtgaaagcgaaagccaggaagccccatccatccatcccttcaacagtgaacaaaatatggttccatccatttattcattcaatagtagaaaacatagtgtgttaatttgcacctgctctcttccctgcacagtgctcagcgcgagggacaccaaaatgaagactcaagccgtgagcacagtccagtgaaagaatgataaccacgcaaggagacagagctgttatcactgagcttgcatagcagataatgggtgctgaagaaattgggggtgtcagaaatcacttccccagtggtgacgcctgagccaagtcttaagcgtagatgtaggttttctgaggaaggagctaggcacttcaggtaagggcaaagacctgcaatgctgtgaaaggtgggacagggcagctgaaatgaagaacattgcctgagactggagaagtaggaacggacccagaatgccattgtgaaccatgctgaggagtgtggatagtggacacagtatcacggtaatgacatacagactctctataccagtagatagactaaaagtaaatgactccatccctgtaggctgaatgaggcagtaaactgctttgttttcttttactgtgtctacactcagtagtctcagtttcatttccattggcatgctaattttcttataacgtaccaccagtcacagctttttaagtggtgtcaccaaaactttctcctattctcaataaaactgctttggcatctaactgacttgactagcacgccccacctactcgtcttttctctggaagcattgtggcttcatcaccaggtttattgtttctgatcaactaaggagatatggcttcagtgaaggagaaaagataaatctatttattcaatacatatttatggagcatttacagtgctaggaatacaatagtgaataaaatatggtttctcctctcaaagagcttatagactcgagttgaccaaacaggtaataataatatttagtgccagaatcagaatctcagatattctggtatttgctgattctaatactgtgtgctaaaccttgttcaatatgctttgtatatgaaccctttagtcattcaatactcttgacaaccttatgaggcaggtactattgttaccaccctcacccaatttaccttccttccccatttcatcttctagttggctcagaacccaaacagtgtagctccagtgtctgtgctctgaccttcttcacgttaatttcttaatgacaatctaatgtgataaatgacctgatatagacacactacattagaaaaatgtccagggtgctactggcacctaccatagtcttaggggccaggaaacattttctgacaaagtttctagctgagcctggaagggggaggagttggccaggtacagaggaaggagggaagtgatttgggatcaaaggaatcttaagtataaagatcctgagcctagaaacaacttgtcactcagaagatctacagagcattttggaaggccaaaatgggtccaggatgagggggtgagggtgagggtgggaaggagtaaaaataaagttggctgttttagatcttaacattttactgctagaagaaattgcatagacaaggcaataaagccaagttccagaaaatcctgaatttaaatattacatcccttttaaggcatgctggtctttttcttcaaaccaaaatcagaatcattttttggacttgtggacttacttaggtaataagtctcagaaaagtagctcttattaattacatggaatttgatatttaaccattcacctttgttgaaagaaataaaagtacattaaattatataaaattaccccataaatcagttgatacagtgattgaactgtcattcttatattcaacatatatttttactgagcactgctatatatcaggcctagtgtatgacactgtaggatacatcagtgaagaagaagaagacaggtgcttgggcttgcagtatgcatatttcagcaaatcctaagtatctcgatctgaaaagcatgctatccatgctatctagaatacataagggttttaatccaaacatctaattttacaaatgaagaaactgaagaggttaagtgatttacccaaattcacgcatttcagtttagtacggtgctggagacttgacctagtgtcacacactggcaagccattgctctctccaataacaccccatgccctcatatattatgaaccatggatttaagagagttgtttgacaagaagtcaaggagtcttgtaagacaggattctccttgcaatatttctttaataatctcatattctccttcactagtgaaataatagcctacagatgtccaacatcgtcctctttgcaaaaatgttttcacattcattatttcatttgagctttgagtggccctatgaagtagattctgtagatattaatatccacattttacagatgcgaaaaatgagtttagagagtttcagtgacatgagcatggttacaaagtgaggaccagactaagggcagactcagctgccccaggcctcaattcatggatgcactaaaatattactggaattaatcagagattcagtcctatttaactcaagtttttaccaacactacaacacaagtgatgaaatgtaaattagtttttactcccacttaagaaggaagtgtgtttggatagaaatgtaaaaacactcctagggctgcagatttatctgcgatatatacatgcatgtttcttggtgtaattagagtcctatcccaatcctaagaagatcagaagctagcagttgaattctgaaactgaacaatgtgtggcatagcacagggaataagatattttttagactattaattttaattcatttagtatatctcccattgagattatctaattggacaattgaaatgaaaactggagaacaaaaactatagaaatgtggcaaatgttttattggtatgagagccaataaataaataactaatacaggagaaactttaaaaacatattcctgtgtatagattctgcaagtgatgtgtgaatacatttttgctatgaaggaattaccattaagcatttagattaaaaagtaaagttcacttttcgtatgccaccagtggtctcgctatcctcatagcactttcagaaaaaatattttgaccaagcctgtgtaactacaccaagcaagttatctttgccctttgtgagcgtgagtgaataatgctttctagttatgaacactagaaaaattgtgaagcaaagaacaattccaaataagtagaatattctgctctagttagtgcatatagcaaatcccctatttgagcataaagagatattttattttattaatgagaataatcatcaactttcacatctcttgctgcaaaaggatattaatttggagggacaccaaattatctagggactggatctcactcttaagacttctattcagtggctggggctcagctttccattttacaggttttttttctctctctaaattcccctttccctactatatattcctccccccaatgaatgcctatcattctgataaactggaccacaaaatactcgtttcattttatactgttttaattggctcttgggatgtttcatgcaatctattggttctgtctccccagtttgaagctctttggcacagggatgttgcctcatgctttgcctgtcccaccgagtgcttccagctgtgctgcacacagagcagttcaggagtccctccaggaatgtagccctccccctctctcttctacaaaactcagagggactcttcaggagccacatgctctcatcaagcagaaactttttaagaggtrgacaacaacccagagtggacacagagctggtgctcttccagtagaggtaagtcttggccagctctcagtgccctggctctgtaagcctccctcccaacaacctcactgagcctcttgctgggcctgatccccgaagtagactttcccttgtcgtgtagttagtactccagctgcactcacttcccagcttaacttcctgactcttctcaaccagaaatcttttctggktcacaactttaactatattagctctcttatttttcaaactttgtatccctttcctactgtaggactcactatgatagcttcagtttctcttggctgcttctggaggcacttcatccattagcaatggattctttaatagttgctttaattatcaacacttacagttatgtacagagatttcccagattaggctataaaatgtttccctccatccatgtccatgcaatggggacttttgtcctgtataattgtgtcttatgggcttaaattataccagtatgttctccattcacgtttttcccctgtgagattttattcatggcaatttgtttcagctgttgatatagagaamccagtttaacagcttcaaaaggtcaactgaaaaaggaaccagtcatcctgtgtactcattaaaaataaatggaagcattatggagagttattatatatcttaagacttttttggaggggaaatggaatgcagggccaggtgggagacggatgattacctgggattatattcttagctacatctgttaggatatttgggattcctccatgtgaagaggctagaaaaccagaacgacagtttataccaggctgggatctctagagataaggattatgtgacaggctttgtaagcacagaatccaggggagtaactattgtaagagttcagacagctattaagaacaatgttgaaaaattagaccaagtggaaagagaaagagatacgagctgtcaagccagagttcagctaagcaagctggttaatggttaataccagtagcttctctatctgtgtgttgcttacgtcaaccccaattcctcatcctattgtagagttggtacttaaatctgaaaactcaggtgtgccctgaactgataaccagctgagaaagtatagggaagaaaggaatgggtgggcagggctaaaggtaacagtagagcaaagcagaggtactgggttctctagaaggtggcagatattgttatcaaagagagtttacccaagagaccctgagacattgcattagcagaccaggacacatgactgtttcttaattctatctccagtttagaactacatgtcaggtagagttgacagaagccaaagaaaaagaacaaaacaaaacaaacaaaaaaaccctaaagttagagaaggaaccacatgtctgctataagtagtgtttagagagcagggaaagagatgaaatttgttttcctgcttctcacgtctcattaaaatatagatgctgtaggtagggtattcatcatccccttctttggtaagccctcagattgcaatgggccaccttgtagtagtgttgtttgatgacacagtcaggaaggatggttaatgcacagcagtaggtggacagagttcagttggtcttaaatatttagatctggtgcccatctagggatggtgctatggaaaaataatagctggtaattattaagagtgtaatatattccagagactgarctaaaagtcttaagggtatttcctcatttgcttctcccatcaacccaattaggcagttattactttctttattgtacatatgaggacactgaagcttagagaggttcagtaacttgcccaaggtacacagccaataaatagcagagattttccaacccaggcctgcctccagatctcatggtggaaatcactttgctgtcctaggaaaggcactgttagctcacatggctgaaaggaaagctaatgctacattttttttttttaccctgcaggttaaagagttaaaaatagaggtgagatgcttatttccttacactttttcctgcatttttcttcatttcatcacgcattataccccacatccaggtgctggtcttgtgctttcggttacatgttgagttgtgtggaagggcaagccaggtttatttcaatggaagagtgttcattcatcaaattgacctaccattatacaacaccaatgcagatgacacactctaccagggtgtggagaggagtgtgcacagtcctcacactcaggaaatttacagcctcctttggaagataagacatgcctgtaaaaagataatcgaaggcagcatatgatcagcactaaaccaccaggaagaataactgctcttcatgtcagaagagggagagagagcacttctcagcgggtggtcaaggtaggattcctggaagaaggccggttctgaaaactgagagagctgtttatttttgggtagtggaatcatgaaatgaatcacagagagaggaagtgaaaggtgtgtttgggaacagcaacagcaccaggttgactttagctaggcccactaggggaggagtaggagatggggcaggaaagtcaagctgaaattggattgtgcagatccttgaaaacaatgcacagcagtttgaattcattaaaataaataagattcaacgtaaaacaccaggcctacataggcacttaataaactggggaggtttgtgtgcaacaatagcagaaagagtgagagctttggaaataaggtcagcctgagtcaaattctagctctgccatttattagcagtgtgactttgggctacttaatttctctgagtttcagtttattcatccctaaaatgtaaatacttcccatctcacacagctatagagcagggatcagcaaaccttttctgtaatgagccagattgtaaagattttagtctatggaccatgcagtctctgccattgtatggtgaaagcacattgacaatacgtcaacaaaaattagcaagcctgtgttccaataagactttatttacaaaaagtcagctagctgaatttgatctttgggccacagtttaccaatctctgttacagaagattaaattaaacatctataaaacacctagcacaaaatagattttccataagcattccaacctttgacaatttcttttgtcccctcatgaagtggcttctatctccattcccacactctgttgtagttgagacttatgcatgtattatcacttgtttgtctgtggtgcggccataatattgccccataaaaatggatttcaaaactgacagagtttttgaggttcttaagaggattatttgctaaaggcatacagaaaaaggacctttgctagtcataatcttaagtgagaaccatgtccaatttctgggctgaggggatatgaggcaacgtgctctgttccatcccttcacttaaggctataagaaaaaagcactgaactccacacactgaatttggaatgaaagggagccccctcatggaggtttacgaaacacagttgaattctgtttcactactccaactaggattaaccaagatgaatttaacttgtgagcagttggaaagagttaacttactctttccaagcctctcatgctacctctctctctctctctctctttttttttttttttttttttttttttttggagacagggtctcattctgtcctccaggatgaagtgcaatggcatgatcatggctcactgcagccttgaactcctgggctcaattgatcctcctgcctcagcctcctgagtagctgggactacaggtgtgcaccactatgcctarataaatttttatttttagtagagacgaartctcgctgtgttgcccargctggtctccaactcctgacctcaagcatccttccatyttggcctcccaaagtgttaggattataggcatgagccaccatgcctggttgtgttacctcatttggtcaacaactgcattgtgagataattttgctcctgaggaaattgaaaaagaagtagttacaaattgggccaagtctgcacttcataagtcaaagcaatttagagagagcaggctaggtgttggaggtgggacacagtggagaaggcttaccagggccaatagtgggatgctttgccaggccccacaattttatgtaggacctgttgtcaacaccatatcacgctgaaatacagtaagatatcatcagcctttctcactgaagcctctcccactgcaaaagagttgtaactgagcttgctaagctctaggcacagcagccctccagctggtaagccaagctagccaacaggatgaccttcatggctctttaccaacaacatcgtcctttagagtcacaggacactcatttgcaactggctcttcttcatcccctctccccccgccaataaatcacctccttagttgctgaatgakgcttgttggctgtgggaccacatccctgggctctgcattgcagcaagtatacacagtcacccaggagccctctgtcatcgcctgcgaatactagaagcatgagaataagaagtaagcccgaccatgttgaggaaggggaaactagcttttgttccacagagtgaaacctcaataaattggccatctgattcctccttgaactgtataaataatagaatttgtaaggtaaattaagagcaccaagrctgtrgtaggaagtattctattagcttaagaaaacagacagatctgaagcaaacccaagtacaactcctaaggagtcttgttccttaaagcagtagttctcaaactcagcctctacttattctgtaaaccataatttttttaactgaatttgaatcaaataatggcatttctccagggaaaaaaaagttaatgggaaaattttctcagttctatctataattgtttaccatttacttatactaaatctagtgtgagcactaatatattcttttagtgaacatttaacatagcagtattttatcawatttttattttgttttatttttggtgaagagcactttcacctcagcctatttttcacctgaacatgtttaaggaccattaagatcaacactactcacagagtgttatctaagaacaacgggctagctagtatttcattattcttctgctttaatgacaaaacaaatttccaacttgaatgcaattttactggatcaatctcttatttacttcactctgcagcccattagaatgagaattttctctccttggttgacacccattctaaagaattgggctctctccttgatggatctccaggatattcagtgtccagttgcctccctctgttgctgatctctgataatccttatcatagggctgacttccctgtgagccttgtctttatgtaaggacctaactggaaagccagaagacaagaactggctagaaatgttagatgtgttggctaaatatgttgaccaggaagaattaggtttgccacatttaggttagaatcttcaactgattgtgggtccaagttcatttttttttttttttctaattctcagtttcttaatttgcttgtccaggccttaccaatagacttgcatgtggacatgagcaacactgttcctgaaggtcctgtgtgtgmtctgggcacataagcctcctaactgccatggagatttgggaaaaatgaagtagatgtccagctgtctctggtggggcccattctgggacccagaaaccagattagtagggtgaccaatcatcctgatttgcttgggactgaggggctcgtgggactttgagttccaaaactggtaaagtccyggatacaagaggctcaggtgatgtatttgctggttagaaaggactagagccttgtctgtaattgaggttcagaggtctactgagctatctaaagaactggagaaccctgaaggatgcaggacactagggactctcaactggtcccccgagagcagatgaccaggaataaagaaaygtatctagagcaggtcaactgagcagtagcktctggagtcagaggagcaggagctccaggcataatgcccagtggtacttgctacccttccatgcagtccccctttggtcccaggctacctgtgagctctgggagggtaaggcagtggtagaaatgctagaattgtatctaagagctcacatggcagagctgagggagtcctctctgaaagaactggacatgtggatatactggccagagagaagagggcacgggagactgggagagagaaagagatgtcaagagaaggacagcagtggcaaggccagcacgggaaatgatgaaagtaacagtggacaacagaggagatggtccacagagcccctgattatacatgacgaagagatcaccaaaaactgatggttccccaaaattatgtattttctgggaattctcagatatagctggagaattgaacactgaaaaaataaaagcctactgatcagcagttatgggcagcatgaaggattgagatttggattattattgcaaatatgatcctgggctataattacataaaactgcctagtaaacatacagactataattacattaaaccattttatgtaaattttctattgaagtaaaagtacatagagaaaagcacactaatcacaggtgcacggctcgctgaattttcccaaagagaacatacccatgtacccaaaatctagatgaagaaacagaacatgaatatcatcccagaggcccacctaatgcccttcccagtcactgccccctcccaagggtaacaagtatcctgatttataacaccatacactagttgttgtatttgtctgtttttcaattttatataaatggcaacatatataactccttcatttgccttttttcactcaacattgtgagattcatttttattgttacatgagattgtagtttattttttgttattgttgtatggaatcccattatgaaaataccactatctatttatccattctacttctgttgaacatttgtgttatttctagttcgaggcttttttgaatagtgctgccatggactttctactatgtgaaatttggtaamtatatggtgcatttctgctaggcatatacctaagagtggaaatgctatgtcatagggcctatgtatgctcagctttggaagatactgcctaacagttttctgaagtggtcatacaatttatattgycccaataatgtttgagagtttcagttgccttacaccttcttcaacactttcattttggctattcyagtgggtgtgaattatatataaaactttaagttttggccaagcgcagtgggtcacaccagtaatcctaacaatttgggaggccaaggcaggagaattgcctgagcccaggagttcgagacaagcctgggcaacatggtgaaacctcatctctgcaaaaaatacaaaaattagttgggcgtggtggcacactcctgtagtcccagctaattggcatgctgaggtgggaggatgacctgagcctgggagcttgaggctgcagtgagctgtgaccgtaggctcacaactatagctgtggaagtgtagctatacaagaacatttccttttcttcctgagctggttctttttttttttttttgagacaaggtctcactctgtcacccagattggcgtgcagtggcccaatctcggctcactgcaacctctacctcccaggctcaagcagtcgtcccacctcagcctcctgagtagctgggattacagtctgtgccaccatgcctggctaattttttgtatttttggtagagacagggtttcactatgttgcccaggctgatcttgaactcctgaactcaagtgatctgtccacctcagcctcccaaagtgctgggattacaggcatgagccgccaagcctggacttccttagctggttctttaatacgctacagtaaggcttgctgcttataccctttctaatagatgcatgttgtctctttagatgtctggccacactaccataacataagaacctttcatttaatctacacatcccaaagtagagaatataattgctggagacctgcaggcactattagcagggggactgcaaggcttttcatatatttactctcacaaaggaagactgttttctcatagaccatttctctaggggccactgtgtgactataagtggaagaaatctatcataaccaaattgtagaccataaaacaaatctggagtggcacgggagtttctttgatttctaccctagagatcaatgtgtaaaatatgcatgattggttttctctgtttaatgtcatccttggcctagggattttgaattctgcagagtcatttttgcctttaaatgaatcattgacctagctgtccccaacgtgttaccatacttgcattgaaaagattgaaagggaatgagggagtctcaaattctttcagtaactttctctgttctacacacttactggtctcagttggcttgaaggaaagaatctcccctactggcctgaaaataactttaaaaaaaaagctaaaacgaaattgtgctgttgtgcaaaatgggcttcattcttcagggctgataacaaggacagttaagaaaccacaggccgggcgcggtggctcacgcctgtaatcccagcacttgggaggccgaggcgggtggatcatgaggtcaggagatcgagaccatcctggctaacaaggtgaaaccccgtctctactaaaaatacaaaaaattagccgggcgcggtggcgggcgcctgtagtcccagctactcgggaggctgaggcaggagaatggcgtgaacccgggaagcggagcttgcagtgagtcgagattgcgccactgcagtccgcagtccggcctgggygacagagcgagactccgtctcaaaaaaaaaaaaaaaaagaaaagaaaccacagagccaggtgcagtattgcacacctgtaatcccagcgactctggaggctgagatgggaggatcctttaagcccaggagttcaaggctatagtgtaccatgatggtgtctgtgtactccagcctgggtgacatagtgagaccatgtttctttttttgtttttgtttttgtttttgttttgttttcttttttttcttttcttttcttttcttttttttttttttagatggagtttcactcttgatgccaggctggggtacaatggtgtgatctcggctcactgcaaactccgcctcccaggttcaagcaattctcctgcctcagcctcccaagtagctgggattacaaatgcccaccaccacacctggctaattttttttattttttatttttagtagagacggggtttcaccatgttggccaagctgatctcgaactcctgacctcaagtgatccaccctcctyggcctcccaaagtgctggaatcacaggcgtgagccaccgtgcccaaccagtgaggccacgtttcgaaaagaagaaagaaacgacaaactaaaatacatgactgtgtagatgaggaaggacatgaaatgaaacaggaaaaaggtgacctgaaaacttttaagaattttatgttatcattggtattttcctcaaaatcacttaagtatcataaagctttgcaggaaacttttggtttggctgcaaggagagaattcaggacatactcatccagttgttatctgagggacttcctcttaacagctcttaatttcaaagattatgtatcatatccttgttcttcaaccagactgtaatcctctggagggcaggggccattgattcactcaaacatttttgttaggcacctgctagatgctggggatggtaagttgatacttcctgccatcacatcttcctacgccagccacctgcctgcatccctgacaagcgcctgtttgccacctcctgggaactacaccctcctcttctagagacaccctgtacttttggctcagccctcatgatgccaactatttgtttggatcagcacctgttgtttgcctgaacatatgttctgcctaacagacctttctcctggtccttggatccagtctaccgcccccacttccaactgcccctctctattggtgtgtctccttcaaggttctagaccctcttaggctttccatccaagtcttttctgggctacagtacttcacttataaagattttcattccacaaatgttcattgagcttccccttagtgccaggagctgtgccagttgataaagacacatgttaatggttatcaggctgctaagaaaaacataggcatgtgaatacgaatgtataagaaaatgctacaaatgcctcaagagatgtgtgaatgagatagaggggcaccaaaacacaggtgatcaatttttccatgaggttagggctaggcaggtaagatttcatgagtaaacattagatagagtagcttcaactagatctctgcttctataacagctcttgacattctcacttgaccacactgcattgctggtcagagatctggcagcactggacagaagagagggcaagacaggctatctaagggaatctaggtctcatctccaaattgggttatttattcttgtattgtcgagtagtaagggttcattatgtgctatggatacacttaatgaactattatttcattatatgttttcctctaaattagccttcttttttttttagacgggtctcactctgttgcccaggctggagtgcagygatgtgatcatggcttactgcagcctcaacctcccagtctcaagacatcctcctgcttcagcctcccaagtagttgggattacaggtgtgctccagcacaggtggctaatttttgtatttttagtagagacagaacttcaccatgttgcccaggctggtcttaaactcctggggtcaagcaatctaccctactcagcctcctaaagtagtgggattacaggcatgagccaccatgccagggccttctaatttagtcttgacatctctcttaggatagagactatataaactctakccctgggctgtagggaatttggtcatggctgcttacagtgtcctttcatgagatacttctttatcctggcagatgcttttgttgctgtctgatctgtgtccagtttattcctaccaagatggccactgtctaggagatccctggctagtaaaaaagttagatttgggtgtgtcagtcaggtgagccatgtaagaggcagcacaacaaaatgcatgaagtagcagaagcagcgtattactcacaggtcctagagggaggagggcagcacaccaataggaattgagagccacctggtacaaaaaagcccaactagtatttaaaatggatgccgagacaacataaaatgacaakaattcactaccatcccttacaaactatgatttgtaaatattttctcccattacctaagctatctttttactttcttgatgatattctttgaaacacaaaattttttatttaaagaagtctaatttatttttattgttgttgttgcttatatcttgagtgttgtatgtaagaagggtttgcctacaccaaagtcacaaagatttactcctatattttctcctaagagttttatagttttagctcttaaatttagatctctggtccgttttaataaatttttataaatggtatgaggaagggtccaactttgttcttttacacgtaggtacccagcagttccagcatcaatttttgaaaagmttattctttctctcattgaattgtcttgactcccttattgaaaatcaattgaccataattataagggkttatatctggattctcgattctgaactattgatttataagtctatctttatgccagcaccacactgtcttaattactatagttctgtagtacattttaaaatcaggaagtggggatcctataactttttcctttttttcaagattattttggctattctggatgcctcacatttgtacatgaattttgtgtttagtttctcaatttttgcatacaagccagctgggatttttagggattgtgttggatctgtacatcaatttagggagaattgtcatcttaacagtatctagtcttctgatccatgagcatgtatgtctttccatttatttggatcttctttaagttctttcaacaatgttttctaatttttagagtacaagatttaccctactttgggaggctggggctggaggatcacttgagccccacagttcaaggctacagtgatttatgatcatgccactgtgctccagcctgggtgacagagagagactctgtctctaaaacaacaacaataaaaaacaaacaaacaaaaatgacttacttwtgtcttactaaatttattcctatttctattttataattcctattttcttgatgctgctgtcactggaattattttctaatttcttcagatttttaataaagcatgtagaagtacaattcattttgtgtrttaatctttttatttttatttctttccttttttttttaagagacataagctcgctatgttgcccaggctgctctcaaatttgtggcctcaagagatcatcctgccttggccttccaaagctctgggattacaggcacaagctaatatacctggaccactttgtttattaatcttaaatcttacaatttttctgaactcatttattagttctaatagtttaagtaaatttcttagtattttctatatgcaagatcatgtcatctgcaaatagaaagagttagttttactttttcctttccgatctggatgcattttrttttattttcttgcctacttgcccttccagcacactactgaatagaagtggtgagagcagacattcttgtcttattcctgaaagaggaagtacttgctttagtcataaagctataatagctaaaacaataattgtggttctggcataagaaaagataggcaaatcaatgaaataaaaagaatagctcagaagcagatactaaaacagagaagttaaaatatcatgagggaagcgctacaaatcagtggtggaaggttgaactactggataaattgtggctctaaaaaactagttggatgttttggggaaaaatcaattaagggattcacatgatacatcaatatacaattttaatggataagaattaaatatagagaaacacatcacaccattagtaaatataaaatataaaagcaacgcctggatgaaaatcaaatctccagataagaaagaacatttcgaaatggctttccaaatttttaagttatcatgttttttgactcggcaatttaactaaaagaatgcaaacatcatctttatggatctcagacaattgactagctttctcattgctacatttgcggatggtagaaagtcaatacatacttatgaatttaaaaaaaagttgtacaaaaacttaaaggtgtacgttcaggaaggatgtcatagcggtgccatttgcgtgagtcagtagccaacagtcaccctatgccttgagatttaaatgaagttcacctgggaatcctaaccctgtcrgatgtacattgccctccctgtgatttctgtgagttatggcagttttattttctcacagttctttctatcttgctcagagctctggttctgtctcaagcccacttgcatctcacctcttttagcctgtcttgtctttttgacttgaaccaatgtacatgtgaaattcaataccctttccttacctatcttttcaagataaaacaagacaaagcagaacaacaaaaacacctcccaagccatctgaatgtggattttttacaaccacacaaactgactcattcaaaaattaatattagactttctcatacataaaggccctttgtcctcttgtcctctttcccatgaagaatttctcactggccacatttctccatgggctctggtatcctgcttgtcacttgaccttctctctccacctcargcatttcctgacattttatcagttctgtgttttcaggatttgctttcccatggactatttagagacagtcaaaatacccaaggggaataaaatcaagcttttaaagaattaaaataagttttattcacagtccttactgaggactatagactgaggcccatagcccaggaggagtctttcagagaggtctgtcggactcctctaaagcagtgtttcagcccattggtaggtaggtggtggaggttaagtatatgcaaaatcacatctatgtttgggtgcaagagtacatttgattayagtttactaaagcacatttggttataggtagtagaagcatagtgactaagcccatgagatgttatcgtgtgtaagaaaaggcaagggctagctagggtcaattaacttttaagaaatatagtgactcagacaagaggcatgggggatgtgctctatcctgttttgtcaaagtatctttctggagagctgcaggcctcacaatcaggggctttgtaaaattaccctggcaagcagaaacaggcaaacaccgctccttccgtttgtttgctactttgtctctcggtatgcagaacaattctgctttctaaccctctccattcctggaccttctttgcatktctaaagctttgataacatctagactactggagggaccattaatttggcctsaagctttaacagtacagaaaatgggtggaggtttccacatttcagacttccttttctcttttacccaccaagatttacaagtaaaaggaagcaatatggatacttgttttccctctgctatgaaatatgcctttcttcttcccttacaagtggctacagacagtttgggttttaaatattttttttcaccaagctayatttgtaaaagtaagaaaattaaaaatgatccaaatgatcatccatagaagataccagrttaaataaatcatgatacaatagaytgaaggatgtaatcggtccagatgttctgaaatggaaagatgaccaaaatctattgttaagatacaacaacaacaacaaaaatgtaagttgaaaagccagttgcccgaamgtatgtgtaatatgaaaccatttggcaatgtctrgatgcattattggttgtcacaactaggcggtggtggtggtggtggtgaggctactactggcctctagtgggcagaggccagggttgctgcttatcattctacaatccacagggcagctttccaaagaatttgctggccgcaaataccaacaggtctgagattaagaaaccctgttctagatgaatatacaccaaactttcaacagtggatatctccaagagttgaattatagaggaattatactttttctaaatttttaatctattcgcatttcttgtaacgagcttattatattcagaaaaaaatgtgaaaagctataaacagttggaagagcttgcacataaaaaaataaatatttctaatcaaattacacagaagatgagcagatagggagagagcagtgccacagaatctaggacaggagagacctcccttcccaaggacacccagttgggagggaactcaggtaagaatcagcccttcattcaaatggaggaatttcctcccgagagcacatctcaccaatagccagttctttcctagtctcacggggcggtgctctgtcttcggagattacgggtggtcgaaggggagggaggccgggtgtggaagcttgtgttcctccctgtctgaacatgatacccagaatccaggggtttggagaatgtaactgttaggtgcttaatagaacataaaagtacacgtgaaatagaagtcatagtgctatttattcttccacggggcaaatttccctttttaatttttctctagttgttttgttacactggaatctcttgagcgccatctggtggacagatttccatcacccaatcagatggtcagccttccccacaaacattttagtcacactatgcctctgtccggcaggatcatgtcttgtcttcaatgccccagcactttgtgcagttgacacattataggtaaccagagtctgtttgttgaagtagtaaacattggtccattagaagctgggagtgaatattgaagtcaggtatgaattggcattgggaagaaggagctgaaaagcaggaataagctgtcctgattgtgaagggtgagtgcaatgccggactgagaaataaaactaactccaggccaaagagcgttggagattcccaacaggctccccaaggacacacagggagcccagtagaattttcctggagcctactgaatttctgctaggagtggactcggccctctgcccaaatgaggtgccatgaggtacacaaaggctctaatatgtaatttgacacttccctgggtaaaacagaaagtacactggccagaccccaaagtaaacttacgtacttcctctttacccctttttttctgctttaaaaaatctcagcgattctttcctgcctttctttttttttttttttttgagacggggtctcgctctgtcactcaggctgsagtgcagtgatgcgatctcggctcactgcaagctccrcctcccgagttcacaccattctcctgcctcagcctcccgagtagctgggactacaggcgcccgccaccacgcccggctaattttttatatttttagtagagacggggtttcactgtgttagctaggatggtcttgatctcctgaccttgtgatccgcccgcctcggcctcccagagtgctgggattacaggcgtgagccactgcgcccggcctctttcctgtctttcagctstgctcctctcaattccccaataacacaatccctagtctcctaagagtgggccccaggatagtctgcaaactcatcaccttctaagggggactgctgtcactgagtggtcccaagtgggcactagaggccagtgttgcaatgttttcagtcttttcaaaagaaatagaaatctttattatcttgtgaaatcccttagtttggagccaatattggctccaattacttttgaaacactccatgggccaaaaagcacttgtgtttatggccaacaattagtaacccatcaaagaggctctctggactgagtgtagtggctaatgcctgtaatcccagcaccttgggaggccaaagtaggaggatcacttgagcccaggacttggagaccagcytgagcaacatagcaagaccccgtctctacaaaatttaaaaaattagctgagtgtagtggcgtgggtctgcggtcccagctacttgggaggctgaagtgagaggattgcttaacccagaaggttggggcttcaatgagccatattcttggcactgcactccagtgtaagtgatagaatgagactctgtctcaagaataaaaaaattaaaaaattaaaaaaagaagatttctaagcttcttcccaacgtttctgacacactgtgactctaacctctgcccacatttctacatggctaatttttaaataaggtcaactgctgatcctaggtcagcaagaaccacaaggtcaggagtgttctttcttcgaagtttcaggttaatcagtttctgtttaggaaaaagaacaagacttctctttaggtaaggtatctaccagagcagcccccactcccacccgaaagtcacctgaatacagctatttcctgtgcctctttctgctacaaatctctgcagcatgttttgttttatgcatcaaaactagatcgacctctgcattctgatcattcccccacggtgttgtctttttccaaactttctgttttcattaacttaaagtctatgatgctatcaaactgattaagctcattccaaccaagcaccacatgctgaagctagtgaatcacattgccagttgggctttaaaaagaacaggtttgaatgtacatcctaatgtattatatactatattgtgaatatggattgtgttgaagctataattatgagggatttaatacattggggtctacattcaaccccgatgtacacatacttatatatatgtaaaatgtttagcccattaactttgccttgctgacagttgtgggaaagtttctagagttgtcagtcacaaggtcttgtgagaatctgatctaagcaactcagccttccctcaagaaaaaagcactcataagcaaacaatttmccaaagtctgtgcatagacccttaggcatacctgaaccccaggtaagaactcctgctgtatcagtgaggggcaaggcaactgctcagagcctgtaggtctcatttaatttgaaggtggctggttgaccctaagctctttctcagtacatcacgccttccagtagaactgaaccaaaactctaagacaccctgtttatgctcccttgggaatttagggcccttaccatgtatagcttctctggggtggtttctgatgctcatcaattctctgacatcaactgggtatgttaccagtggaagatatcctggttatcggtggcaaattcatatgtgtctgcagcaacctcaattcttgcctcctcagaagaaagaaytcaactgaggggcataaggcagaaaaaagactgaggcaagtttcattgtaggagtggaagtttattaaaaagctttagagcaggaaaggaaagtgctttcggaagggacgcaagtgggcactgagaaggtcaagtgcctggtttaaccatcatcctaggactttataggctggcaaactctggcgtcttgcgccccctttccatgattcttcccttagggtgtgttgcctgcatgcacagtgccctccttacccttgggaattgagcacatgcagtgtgtttaggaagttgtatgcatgcccatctgagactttcttcccttttctggtggagtgccaccagaaggtcatactccaccattttgtctcttaatgcgcaggcctgggaaattgcctctctggtgtctgctgtcaatcaacacttcagtgcaatgggtatggaccatcaagaaatggcctctctctggaggctggctgccaatttatcgcttttagagaggcaacgtgataatcatcaaaccgtcacctgccattcctggtgggtgggggagagccctctcctgccccactcacgcctaactacctgtaacaggtatcaaaaattcaattatgacactatctggagttagtgcagacacagattaagggctcagtcctataagactgcactgacttcaaatgtcagtctcatctgggccaggccacccatgcttytgacctaccagctataaatcaaggattcccaagatcccctcctcaagttcaataatttgatataagagctcacagaactcagaaaaacagtttacttacatttactgacttattataaaggatacaactcaggaacagccaaatggaagagacgcagagggcaaggtatgggggagtagggtgagggtggcacagagcttcaatggcctctctgggtgtgtcacctcccagcacccagtagctctctgaatctattgttcaagagtttatagagctcaacaggtcagagggtggggctgaaagttccaaccctccaatcacttggtctttttagtgaccatcctattctgaagctatctagggaccccatctcaagttaccttgttaacataagtttcagtgtgatctaacagggctcattatgaataacaaaagataatcctatcactcaggaaattcaaagggttttaggagctctgtgccaggaacccaggatgaagaccaaatacattttttaaaatactatcacagcttctctgtgccatccaggcttattaagatcataactgatcactcaatgttcccacctctagctttttgcttgattgccatctcctccattcatctttatctctctgtctccaactggattaggagtgggcttagggtcagaaccagggttcttttggcattggtgatggatcaaccaagagaaggttaaaacctccaaacctgatcagtctatcaggttgggactggctccagtagtaggtaacaaaacgatgtccagggagatgcaggaggtaaataaccaggcatgtgggcagtgcagagcccccaaaaaagccaagcaggatrgcaggtggcattagagatggctggaagcaggaacctaaccagaggactgcagttcagggccaggattttaatctctggaattgagaagagcaagacaggaagtagagtttgaagccgggagtcaaggtgggaaagtgacacaagggaaaagcaggcacccagttaccaatgttgtggtacaggcattgtatttaaaataaggaagatgggcacagtggcaaatgcctgtaaccttagctacatgggaggctgaggtaggaagattgcttcagcccaggagttcaaaatcatcctatgcaacacagcgcaaacccatcttgataaatgaataaatacataagtaaaatttaaaataacctaaggaaataatccataaacaaagtacatctaagcagagctagcagtaagttggcttgattccaagtcaatgagctttgaccctatagttcttaacacgcttcttggggatcagttcatctctgaatcaagatgagctgaacctgcaagtggggaccaaatggatctagtagtgggttttagaggccttcagcgggtagagagccaggtggaaacaagagggatgccaccaacatcctcatctttggtaatattttaaataacaatatgagaagatatatatgagaatataacaaatatgagaagtcagtgctgagcatttcctgggccagcggcagataagccagggatattttcttgttttccttaaagcaagtagaaagacaacagagtattgtggttacagctgaatttggagccagattgcctggattcaaatctcaacgctgctatgaggtcagctgcctaaaattggctttttaaatttctttaaattgtctttaaatctctatattactcatttagagagtaaatataatttctattatgttatggatgctaataatagaacacacctcctagggttcttatgagtaatgaatacattctataaaagtgcttatgacaatgcctggcatacaataaacactatacgtgttgaaatataaatagtggttgaaaacattgtaagactcaggccacctcaatatgaatcctgagtctcaagtgaaatctctgtggacaaggagatagtgaggaaattgtccagaatggaatagtgttagagtggcaagaggtgacaaccacaagactcaggctcctgttgagacttggccctaatataattgggtcttgcttttctggaattccaaatgtatgcccaagagtgaagaattacagtcaatacatcaatgggtagaatcaactgtctaggaaaattcataaggtaatggaattaaggctatttgtctcatgcaatacaatccacttggacctgcaaaattttaaggaggtaaaaaagaaacaccggatttatccaaataccatttaatcccagttgatctcagtttttccaggtctagaacagtgttcaattcctgtttgtattccctgtcaataagaaaaggattttgattcaatgattctgtgttaaatagcatgttgttatacagagtagcattcggtttgttattagtcaagattctccagagaagcagaaccaataagatgtgaatatacacaaatagaaagagattattataaggaattattcatgtgattatagagactggcaagtccaaaatctgcagagtggctgacaaggtagagacccaggagagccagtggagcagataaagctggaaggcagtgtgctggggaattcttgcttgctcagggaggccagcctttgtgttctatttggcttcaactgattggatgaggctcacccacattatggagagcaatgtgcttactcaaaaattcacggatttaaatgttaatctcatccataaacacacgccaggtttyaaatgttaatytcatccaataacatcttccaagttaacacaaaaaatgaaccatcacagactgtaagccccctttaagaccaaaaataatctgttgttcttatacccttattctgaaggaaaatgaagacatttaatatctttccactgttcttttctatttttttaagagataggggtctcactctgttgtccaggctagagtaccatggcatgatcaaagctcactgaagcctcaaacacctgggctcaagtgatcctcctgccttagcctctcaagtagctggggttacaagtgcacaccactgcacctgccttcactgttcttttctagcacatacttttagtgtacttgtattgggaaaaaaatgggcattgtttgggaaagaacaataaattcttacaacaaaagcaattttaattataaaaataagggtggtactaaaggagatggtgcaacagtaaggtggaaagacatgagtcctgtatgacctcatggagtaaggctgcctaccaacttaagactgctcatggtgagatcattatgtgtgtaagaaaaaatcttcaattttttaagtactatattttgttagtaaataatataaaccactgatacctggaaatggatgctgccatcaaatgaccttaaatacatagcatcatcctagcagtgagggatgggcaataagaacagatattgtggcccagaaaactggtgagccttgtggaagacagaccactgtcctttcttttcccctagggaaagttaatgtctctctcaactatgttccacaacacacatgaaatactttggatacctagttatttctgtatgtttcctcagaacatttactttatggagccgtttatccccagcatctaacagaatgtcaggcccagaaatatgagttggatgaatgagtgaatatatgcccaatgagtgaatgaatggtcagggaattattttctgagacttcatctaaataggattggctataaacacgtagcatctctaaaggttgtgagagcctttctttccctctgagtgaagagattcatgttagttgttcataaaggtaagtcactggttagccagggcttcaagactggaaatgatatgtaataaattctaagctttgcttactcacaatgtcgctgctggccaaggaaaagtttcctttatttgctgcctcagatttatttctataaaaagggccataatcaaactccaggagaatggtaaattgctattgagatgatatatgggatacaaaagaaaaaataaataaaaataaacctgcgttgaattccaaaatattctttgtagtagatctatgtttattgtagaatgtaagagaatccaatgtcttattcttcctgttcttgtaatgcctatgctatgagaacagaaggaatcaattattcagtaatttagaacaaataactggaggattgaattctgtatcacatttgattctattaaaacaatgaggctgggcatggtggctcacatctataatcctgggaggcagaggcaggaagatccctggagcacagaagttcaagaccagtctgggcaacatggtgagaccctgtctctacaaaaaaaaaaaaaaaaccaaaaaaaaacaaaaaaaaaaaccttaaaaagttagctgggcgtggtggtgcacctctgtggtcccagctactcgggagaattgcttgagccctggaggtcgaggctgcagtgagctgcaaaaaaacaatgataacatgtacagaaatcaaaacaaaagaaaaaattatctataatcctatcatcttacaatcttttaaatttttttttcaagacagtattttgctctatggcccaagctggagtgcagtggtgcaatcacagctctctgcagcctcaacctcctgggttcaaatgatcctcctgcctcagcttcctgagtagctgggatgacaggctcgtgcccctataccggcaaatttttttattttttgcagagatgaggtctcactatgttgtgcaggctggtcttgagatcctggcctcaagcaatcctccagtcttgtcctcccaaaatgttgggattataggcatgagctactgcacctggcctgttttaatttttgtatgttctgttttacactttatatgtttgtctatatttttcaaacacataatgaaaagaactcatgcacgcaaaacatgcacagacagattttatgtgtatacaggccaggccagcctgagggtagatatcaggtcacactagcagtaatcagacaatatttctctgattctagccctactcattctgcagaaattccagtcctcctcacatccttcctaactagttcttgaattctcaggaactaatcctcccagctatcatgtgtcatctccaattttcctcttctttttagcatctccctttcagcatgtctcctgttgctggtgctgctgcagaaacttcaaaagctgcccggttcctctgccccagtgtgatgccctcttccattcttcttccagcagcaagcaaaggctgatttgactcctcagtcagcttgcttgtgatcagcaagtccactgtgttagaatcagggacctggtctatcaagtagtgcaaacgtggagattttgatggaactgcccttgtggtttttacaggctttttattgcagtccatactcctttgagcatctgtgagtccacagtttgagagagagcaaattaaattgctgacagtctttttaggacgacctatttctttttttgctgattctgttcctaagctgagcttatgatacttgattctcttttccttataatgaatttttactcaataggttcctcagtacctcatgcaaacatacgccaggtaagtctcttcagacaggcctaaatatgttcaaagtcttgcatgaacgcagtttgaggtgtctgggcatcctaatacaatagtatagatagaattatgggttttgctttgttcatttcacattgtgagtgtgtttgcaggttactagagagttctcataattattaagtggctatataatattatataggaaggagatgccataatttacctaatttttctcttaatttggacgtttatgttatcactgatttgtttctagttaaataatgtgagttgagcaaggacaaattagtggtcttgattgtgtgttttattttggagacatatatatttgttaagggaatttttgcttctgtaaccccccaaatttcaagaacacaaaactctaaccatttatttctcagccatataccagtccagtatgggttttttttatcagcaatgttggggagagctctgccccacacattcattaagagacccaggggattggggcaccaccatcatcagcacatggttttcaaggtctctctgggcaccataatcagccagcagatgagtaggagagacagggttgtgtgagggtttttttaaattaaattcacccaatttaatggtacagtttgattaacttttgctaattgtgtatagttgtataaccaccatgaaaataaaaatgtaggctttataacatcctaaaaatttcctgttgcctttttacatctgatcccctcttacaaacccctagccccaggcaactttctgtgaatacagataaactttgcctgttctctaatctcgtacaaatggaacacaacatgtattttgtgttatgcttcctttgttcagcataatccatgttgatcattatattagttcttcattgatttttattgctgtgtagtgtttcatcgtatggatacacaatgatttgtttatgcattcactgttttttgacgtttggataagccccaggtgttagctattatgaataatggtgctatgatttgcatatatgcccttttgtgtgcatatactttaacttctctcgtgtaaatatctagaagtggaattactgggccacatgacaagtggatgtttaactttgtaagatacggccctactatataccaaaattgctgaccatcttgcactgtcacaagcaatgtctgggacttctagttgctccaaattttgtcaatgcttggaattgtcagtgttgttagttttagccatatcaatggatgtgtagtagaatcttatttctcatttgcatgatcctaactagtgaggtgagcatcttttcacatgtttattggctatttgtatattttcctttatgacatgccttttcaaatattttgcccatttcaaaaatagggttgttcatcttattattgagttgtaagagttctttaaatattctggatatgagcaaagagtatactcgtctctatctagtactttccagtacattaattattgctttttgccttatgtccagatttgataagtgttttgtatgaaggagttggtcttgcagaatcttactgtatcattacagaaatgtaaactacaacagaggttttaagaaccaggactagaactggccctcatcagttcagcttacaccctattggctagaatttagtcatgtgacaatacctaactccaaggaagggtagaaaatgtgatctatctgtgcccacagggtagtgtgccctggagaagaacagggttagtgatcagccagcactatctgctaaaaggarcctagcagggcctagaagggcctagaaggaacatggagtggcagaagttttgkcccagggacatggtaactatttctagatcccttccatgataaacaatcatgctgtacctatcatatgctagacattgagctataataactgaggctagcatttattgagcacttactatgtgtcaagcatatatagactctataaatgtttactgactgttgaatggacccgatttcttggagtggtctggggaagactacccgctatatgtgtttaatgataccttcggattttgccagcccagcagaagcagggttgtgagtaatgaggctgcttgccaagcatgccagttcccctgtgggaagagatcactggagaaacagagcattattaatgtcctccaaacttcaacaaaccagtttttccactctctgggtgattatttatgggtttgggtaagatgctaacttgcaagctctctctttgtctctgctctgcttctacaccaaactcatgactatttacagcattccattctagagctgttcacaaaccaatgtttctgattttttagtgaatttcctgcttccctacattgtgctgccagatttattggtaatagttctttgagtattaagtggattgaaaatgctgcctgtgttatcatttctctgttgaaagcagctagacacaaaacatacataataacagctagcccttgttgggcactgttgcacacaaattgccttcacgyctatttggtctaccccctcacatgattcatttgaatgatcagtggtagagctatttcacttgttcacatgcttattagagtaatatgttcaaagttaattgatctttttccccatcctactcttgttacaaaggtaattgacactgaaatggtcaaaagacgttcagtagggatggccagtaagagaagtagaaggaccacacaatacaaatargataaaaggctcctcaatatgtaataatcgaatggctgtaaacacatccacacctggaatctctcttacatatcatagataaaatctcaccaccttattgtgcaatctattccttcattactgtacttttttccccctgattctgcatactcctctgcacagctcctcctgacctggctgatgtccattatcctgtattattactcatcactactcccttagaacctatactctgaaattgctaatcttattgcagtttcctggatatgttatggcttgtcatgtatcgatccttttaggcatcccattccctctgcacaaagcatgatttacttactagattgctccagtggtccctggcattggaagcttccacagccctgcctcccagctagccaatctgatttctgttagagcatctaggagcaccctcctccaaagcccttttgacattcttttgtgatagtgttatttatttacatgactatgtggccctcctactgtgagctccttaaggatgtagattttttcttatttgcataatttctggaatattttaattgaacaattagtgtgaataaatagttagataaatgttcataccacacacctcaactctttcatttctttgacttgaattcgaggtacattttataatcttgtagacatggacgaagcaagaagagacactgtagcaaaggaaagatcaataaataaaatgactgcaagaaaaacaggttcaacgacaatggtataaaataacagaaaaaaaatggtcatctttgagtatgtttgccctctttatatcaagcatatacttctcaaacttattcagaataataaatgatgaatgggtgtggaattatgtctcttagtccttattactgtataataataacaaataacagttgtttaggaactatgttttcaaagcattgtcacatccatttttttttcaggacatgtttacaacaactctgtttttcagatgaagacattgagacacatagaggagaagtaattgatcaaagatcatatagccactgtggcctaactgaatggataacatctcagtctgttaagtcagcatggagtcgagttgttgggatgatttctgtttactagattgccaatttatactttatctgccaatctaatttccttagagtccctgtttgtccctgcagaataaaaaacatactgcttgctgtataaattatacattgtctaataactggttatagttagttgaagcaagttactaatgaatatgtaatcttggatttgattctagaatttacctgttagcttgtcttttcttcccctattaatagcttgagccccctgtcaatctctaaattaaaagcttctccatagcctactctttgaacctaatctcatttctttccttttttcaacaggcagactagggtccttctcttcacttccaccaacctcctatgcacattgctgcttgcacacttgtgctcagaaccccctggaccagttcatcctgcttcactgcctgttctagtctatccttcttaaggctcagctcataaagccttccaggaatgctagcccccagtgatctagccctcctctgagctaaccagctgcatgtggcccattccactttgttgatgcttgataatactgatcatagtaacactgtgtcttgttccagtttttacattatcagcattctttacagtccatggcaataaatgtttgtcaaatgaaagaataggtgttgtgtttttatttaaatcttctaatgccagactcagcttgaattatcaatgagtagtgttttaagaccatcacagatcttgggctcttggacctgtaatccttaatggatgaaatggccctgctcttgatttgaaagtggactcactttattagcattctaattttgatggtggagttgcactctcaggacatattcagaacttcccacactcttccctaaatttccctttcctttttatctctgatactcggaatagaagataagctcctttgagagcagagcatgtacttcatttactcttagattcccccccaacactaccaatgttgtaccaactttgtatagaataagaatgtaatcagtgtttgttaatttaaattaatggcagtgttaaatgcagctgcagtggagtgggttaagattgaccttggtgtcaaaagccctgmactcaagtcccagctctaccactttctgactttgggcaagtcatcattgtatttgctcacatagttagcattactgggactcttcattcctttgtgtggatctagatctccatttggtatcattttactttgctgaaaggcttcctttaaatttttttttaatagtgaaagtgtgctggtgattaattccttcagcatttgtagtttgagaaagttatctttatttttgaaaggtgtttttgctggttatagaatacttgttgatagagtttcttttttccttttcagtacttttaagaatgttaatccactttctactggcttgcattgatgagaaatctgcaatcattcttatctttattcttctatatttaccatggttttttgtttgtttgtttttgttttttgtttttgtttttgttttttttttttggtcgctggctgcttttaagatttttcctttgtccctattttaatttttgtttgctttttagcaactttattatgtgatcattggtgtcttttttcctatattttatgcttggggtttactgagattctggatttgttgatttacaattttcaacaaacttgaaaaacttttggctattgttacttcaaatttttttctcctactttgtcccctgatctcttctggggactcgaattgcattgatattaggccacttgatattttccagcaactcactgatcctccgcttattttttcttatcattttttcgatgtgtttcattttgggtcatttatattgatagatcttcaagttcaccagccttttcttccataatgtctaatctgctgttatccccatccagtgatttttcatcttaggcattgtagcttccatctctagaagtttgatttgagtcttttatatatcctttcctgtctgtacttaacatgttcaatgtttctttttttcttttctttttctttttttttttttttttgagacagagttctgctcttcttgcccaggctggagtgcagtggcacgatcttggctcactgcaacctccgcctcccaggttcaagcaattctccagcctcagcctcctgagtagctgggcttacaggcacccaccaccacgcccggctaattttttgtatttttagtagagacagggttttaccatgttggctaggctggtctccaactcctgacctcaggtgatctgcccgccacggcttcccaaggtgctgggattacaggcgtgagccgccattcccggcccaatattccttttggtattttaagtatatgaaatatggttatcgtaatagtttttatgttcttgcctactaattctgtcatctgtgtcaagttctaggttgatttccacctattgattttttttctcttcatcatgggtcacatgttcctgcttccttgaatgtttggtaatttttattattattactattattatactataagttctagggtacatgtggtgcacaacgtgcaggcttgatacataggtatacatgtgccgtgttggtttgctgcacccatcagctagtcatttacattaggtatttctcctaattctatccctcccccaggcccccaccccccaacaggccccggtgtgtgatgttccccaccctgtgtccargtgatctcattgttgaattcccacctatgagtgagaacatgtggtgtttggttttctgtccttgtgatagtttgctgagaatgatggtttctagcttcatccgtgtccctgcaaaggacataaacgcatcctttttaatggctgcgtagtattccatggtgtatgtgccacattttcttaatccagtctatcactgatggacatttgggtttgttccaagtctttgctattgtgaacagtgccccagtagacatacgtgtgcatgtgtctttatagtagcatgatttataatcctttgggtatatacccagtaatgggattgctgggtcaaatggtatttttagttctagatccttgagggatcaccacactgtcttccacaatggttgaactaatttatactcccacaaacagtgtaaaagtggccctatttctccacatcctctccaccaccagttgtttcctgactttttaatgatcgccattctaactggcatgaaatggtatctcactgtaatttggatttgcatttctctgatggccagtgatgatgagcattttttcatgtgtctgttggccgcatagatgtcttcttttgaggagtgtctgttcatatcctttgtctactttttgatggggtgatttgtttttttcttgtaaatttgtttgagttctttgtagattctggatattagccctttgtcagatgggtagattgcaaagattttctcccattctataggttgcctgttcattctgatggtagtttcttttgccatgcagaagctctttagtttatttagatcccatttgtctattttggcttctgttgcctttgcttttggtgttttagtcatgaagtccttgcctatgcctatgtcctgaatggtattgcttagcttttcttctagggttttatgattttaggcctaacatttatgtctttaatccatattgaattaatttttgtataaggtataaggaagggatccagtttcatctttctgcatatggctagccagttttcccagcaccatttattaaataaggcatcctttccctatttcctgtttttgtcatgtttgtcaaagatcagatggttgtagatgtgtggtgttatttctgaggcctctgttctgttccatcggtctatatctctgttttggtaccagtaccatgctgttttggttactgtagccttgtagtatagtttgaagtcaggtagagtgatgcctccagctttgttcttttggcttargattgtcttggcaatgcgggctcttttttggttccacagaaactttaaagtactttattccaattctgtgaagaaagttattggtagcttgatggggatggcatcgaatctgtaaattaccttgggcagtatggccattttcacaatattcattcttcctatccatgagcatggaacattcttccatttgtttgtgtcctctttcatttcattgagcagtggtttgtagctctccttgaagaggtccttcccatcccttgtaagttggattcctaggtattttattctctctgaagcaattgtgaatgggagttcactcatgatttggctctctgtttctctgttattggtgtataggaatgcttgtgatttttttttttttttttttttttgagatggagtctcactctgtcacccaggctggatggagtgcagtagtgtgatctcggttcactgcaagctccgcctcccaggttcacaccattctcctgcctcagcctcccaagtagctgggactacaggtgcccaccacaacaccaaactactttttttgtatttttttttagtagagacggggtttcaccgtgttaaccaggatggtctcaatctcctgacctggtgatccgcctgccttggcctcccaaagtgctgggattacaggcgtgagccacygcgtccagcctggaatgcttgtgattttgcacattgattttgtatcctgagactttgctgaagttgcttatcagcttaagtagatttggggctgagatgatgggtttttctaaatatacaatcatgtcatctgcaaacagggacaatttgacttcctcttttcctaattgaataccttttatttctttcccttgcctgattgccctggccagaacttccaacactatgttgaataggagtggtgagtgagggcatccttgtcttgtgctggttttcaaagggaatgcttccagcttttgcccattcagtatgacattggctgtgggtttgtcataaatagctcttattattttgagatacgttccatcagtacctagtttattgagagcttttagcatgaaggctgttgaattttgtcaaaggccttttctgcatctattgagataatcatgtgttttttgtcattggttctgtttatgtgattgattatgtttactgatttgtgtatgttgaaccagccttgcatcccagggatgaagccaacttgatcatggtgagtaagctttttgatgtgctgctggattcggtttgccagtattttattgaggattttcacatcgatgttcatcagggatattggtctaaaattctcttttttttgttgtgtctctgccaggctttggtatcaggatgatgctggcctcataaaatgagttagggaggattccctctttttctattgataggaatggtaccagctcctctttgtacctctgatagaattcggctgtgaatccatcaggtcctggactttttttgattggtaggctattaattattgcctcaatttcagagcctgttattggcctattcagagattcaaattcttcctggtttagtcttgggagggtgtgtgtgtccaggaatttatccatttcttctagattttctagtttatttgtgtagagatgtttatagtattctccgatggtagtttgtatctctgtgggattggtggtgatatcccctttatcattttttattgcatctatttgattcttctgtcttttcttctgtattagtcttgctgggagtctattaattttgttgatcctttcaaaaaaccagctcctggattcgttgattttttgaagggttttttgtgtctctttcagttctgctctgatcttagttatttcttgccttctgctagcttytgaatgtgtttgctcttgcttctctagttcttttaattgtgatgttagggtgtcaattttagatcttttcttctttctcttgtgggcatttagtgctataaatttccctctacacactgctcgaaatgtgtcccagagattctggtacgttgtgtctttgttttcattggtttcaaagaacatctttcttcctgccttcatttcattatttacccagtagtcattcaggagcaggttgttcagtttccatgtagttgtgcagttttgagtgagtttcttaatcctgagttctaatttgattgagagacagtttgttgtgatttctgttcttttacatttgctgaggagtgctttacttccaactatgtggtcaattttagaataagtgctatgtggtgatgagaagaacgtatactctgttgatttggagtgtagagttctgtagatgtctatgaggtctacttggtgcagagctgagttcaagtcttggacccttgttaaccttctgtctcattgatctgtctaatattgacagtggggtgttaaaatctcccagtattattgtgtgggagtctaagtctctttgtaggtctctaaggacttgctttataaatctgggtgctcctgtattgggtacatatatatttaggacagttagctcttcttgttgaattgatccctttaccattatgtaatggctttctttgtctcttttgatctttgttggtttraagtctattttatcaggcagtaggattgtaacccctgcttttttttgctttccatttgcttggtagatccctttattttgagcctatgtgcgtctttacacgtgaggtgggtctcctgaatacagcacactgatggatcttgactctttatccaatttgccagtctgtgtcttttaattggagcatttagcccatttacatttaaggttaatattgctatgtgtgaatttgaccctgtcattatgatgttaagctggttattttgcccaataattgatgcagtttcttcttagcatcgatggtctttacaatttggcctgtttttgccgtggctggtaccagttgttcctttccatgtttagtgcttccttcaggagctcttgtaaagcaggcctggtggtgacaaaatctctcagcatttgcttgtctgtagaggattttatttctccttcacttatgaagcttagtttggctggatatgaaatactgggttgaaaattcttttctttaagaatgttgaatattcgccccaatctcttctggcttgtagagtttctgcagagagatctgctgttagtctgatgagcttccctttgtgggtaacccaacctttctctctggctgccattaacattttttccttcatttcaaccttgttgaatctgacaattatgtgtcttggggttgctcttctcaaggagtatctttgtagtgttctctgtatttcctgaatttgaatgttggcatgccttgctaggttgaggaagttctcctggataatatcctgcagtgttttccaggttggttccattctccctgtcactttcaggtacaccaatcaaacgtagatttggtcttttcacatagtcccatatttcttggaggctttgttcatttctttttactcttttttctctaaacttatcttcttgcttcatttcattaatttgatcttccgtcagtgataccctttcttccacttgatcgaatcagctattgaagcttgtgcatgtgccatraagttctcgtgccatggttttcagctccatcaggtcatttaaggtcttctctacactgtttattctagttagccatgcgtctaacctttttccaaggtttttagcttccttgcaatgggttagaacatgcttctttagctcagagaagtttgttattaccaaccttctgaagcctacttctgtcaacttgtcaaagtcattctccatccagctttgttctgttgctggtgaggagctacgatcctttggaggagaagaggtgctctgacctttagaattttcagcttttccgctctggtttctccccatctttgtggttttatctacctttggtctttgatgatggtgacctacagatggggttttggtgtagatgtcctttttgttgatgttgatgctattcctttctgttagttagttttccttctaacagtcagacccctcagctgcaggtctgttggagtttgctggaggtccactccagaccctgtttgcstgggtatcaccagcagatgctgcagaacagcaaatattattgcctaatccttcctctggaagctttgtcccagaggggcaccctattatatgaggtgtctgtcggcccctactgggatgtgtctcccagttagactacacaagggtcagggacccacttgaggaggcagtctgtccattctcagagttcaaatgccatgttgggagaaccactgctgtcttcagagctgttagacagggacgtttacatctgcagaagttgtctgctgccttttgttcagctaagccctgcccatagaggtggactctagaggcagtaggccttgctgagcaacagtggactccacccagtttgagcttcacgcagctttgtttacttactcaagcctcagcaatggcggacacccctcccgcagccaggttgctgccttgcagtaggatctcagactgctgcactagcagtgagcaaggctctgtgggcatgggacctgtccagccaggcacaagagagaatctccttgtctgccagttgctaagaccttgagaaaagtgcagcatttgggtaggagtgtcccgtttttctaggtacaatctgtcacagcttcccttggctaggaaagggaaatcctcctaccccttgtgcttcccgggtgagacgacaccctgccctgcttcagctggccctctgtgggctgcacccactgtcccaccagtcacaatgagatgagccaggtacctcagttagaaatgcagaaatcacccatcttctgggtctatcacactgggagctgcagaccattgctgttcttgttcttccatcttggaaccgcatgtttggtaatttttaaaattgaattctatatattgagaattttatcttgttgcatgctggctttcattgtatttatacatatatttctattctcaagttgttctgggacatagtcaagttaattgggaacagtttgatcctttcaggaatttctttcaagctttgttagacgggaggtaagccatgcttagtttggagctaatttttcccttttactgaggcaaggcccagtggcccataaattatgagggtttcagttttcagtctggctggtgagaataggaatgtttccttgcctgtgtgagctttagagattgctccctctaatacttgcaggtttttccttggcctccagtagtgtcaacacatgcatgctatggtcagtctcagctgaaaactctaaggggttcctctgctgatcgccagaattatctcgatttttacctctcttccctgcagcattctctatcacacagcttgatttctttaagtcagggagaccagtggactccaccaggtttcctcattcctgccctgtagcctggaaactctctctgtacagtaagctggggcaatcataggatttaccctgtgtatttcttgtgtctcagacatctctgtcttttgtcaccgaatgacaattgctttatgcattttgtccattgttttagttgtttcaggtaggagggtaaacctggactctgttactctatttggctggaagtagaagtcctatgcagcttctytgtgcctcaattttctcattttggaaatagtgctcttaatatcagtctgttctacattaccaatttattgttattttatgaaatatataattcatacataaatataagatcttatttgaatagatgaaacgtgcatacaaataactgtgagagaagttatattaaaattatatcagtcatttgtactttagtgagcatgtgttactaagatcttttactaaaacagattcaaagttgatagtagaattgcaggtagctacccatttttgccccaggccttctcactccccaaaatacaagtaagagattagggatccaatacagaagaatgagtctagatgatagtaggttagtcaaggaattattccagattgccctaaaatgtaatgttaaatgttttatcaaaagtcactgaataggctctggagcctggttagaaaaggatgctgcctctttgaggacatgaaggcttggaaagagggcaactgcggcctgaaagtatgagaaggcaacctaaaaagagagaagagtaattccaagatcaggataaggaatggagaggagagtttgctgtctggaaaagcaataaaactagaagaacttggaaaagatgaaagattaatgcctccagtacaatcaacgcaaacaataaatggggactttgaatttataactaatttcatccatatatataatatttgtgwatatatatatatatgtttgtattctgaaatctcatgtgtactgagctatagaagtatcttggacttgatatgtgttgaggaagcctgactttagagcctggaatttttgggggtgcgggggtgggatggtaaagatttgcaggaaagtaccttttgcagcaagtacctctgytctccataggtctttctgattcatcttgaggaatgacagaaatggaatgggaagaaactttctacctagtgtcttcttagagatgctcattttgtcttgaactccactttctatgtgcatggcaattatcaaaggagtgacagtgccagggccttcttccaacccagtcctgcctaagatcctagtggcatcaagggatcaaaatgcatcttctctatgcattgatgacaatgattgaatcttcaatgctgtgacagaggactacacctcaaactacagaagatccttgcatttggatgtaacatccacgttcttacattatattaacagtgaaagtctgaatttcctggttcttgccccacttgcctacatagctgagtttgcctcctttctgcttctctgctgatggtcactgtgatgatacaacaatctctgtcagtgacacagtcaccagtcctggaggtactagaatgacagtctgtgcatacctgtgcataccctcctctctggactctggccacattggccttctttcagtttcatgaacattccatgatcacttcccattctcccaccccaaaggatctgcacttgcactgtttcctcctgcctggagcactctttccccctttgtgtctcttccccacgaaaggttcagagggctagttaatatctcagctttcttcagatatcatctggatcttcattccctcaaagaaaccttgattctcttcttcctccttcttccacaagtcttgattaagtccttttgttaaaaactctcaaagaaccaattctgyagtacatttatcctaggttataaatatattctcatttgtgtgattatttgattaatttcactttagtctatctctcaggctcattcgcattctaccagttaatttctgtctcctgagtccattcattctctctaataatcatttactatacctcaaaagaattgcctacattctccatctcttcccattaggttattggataataattttcctgctttttcactgtgtgtatgcatgttaataagattgcatgccttttttccctgttgctctgtctattgtcaattaacttcaacagaatcagacttgaaccttcagagggaaaatctgaacttccctccagtggaaagaaggaatggaagagtggagtacaatgcattccctcacctctctcctctctactacataggtacacctaagcagcattccctatgcctcagggacacctccttaaatagctctttcaaatttttttgcctatagtgccaaactccaaagactaaaaatccagccgcttgagctggcttggggataggatacattttctatcttgctcaactttggcctcaggcatccttaatcagttaatcattccaggaaatagatacttgatgatatggtttggctctgtgtccccacccaaatctcgtttcaaattgcaatgcccatgtgttggaggaggggcctggtgggaggtaattgaatcatgggggtggacttaccccttgctgttctcatgatagtgaattagttttcatgagatctggttgtttaaaagtgtgtagtgctttcttcttcattctgtctctctcctgacatcatgtgaaggtgtttcaccctttcaccttccaccatgattgtaagtttcctgaggcttcccagtcatgcttcctgttaagcataactatgagtcaattaaccctcttttcctcataaatcatccagtctcaggtagttctttatagtagtgtgaaagtggactattacagtaaattggtaccaggagtgggacactgctataaagatacctgaaaatgtggaagagactttggaacttggtaagaggcagaggttggaacagtttggagggctcaaaaaaagacaagaagatgtgggaaagtttggaacttcctagagacttgttgaataattttgaccaaaatgctgatagtaatatggataatgaagtccaggctgaggtggtctcagatggagatgaggaccttgttaggaattggaataaaggtgacccttgctatgttttagcaaagagactgcccctgccctagagatctgtggaattttgaacttaagagaaaagatttagggcrtctggtggaagaaatttctaagcattcaagaggtgacttgactgctgttaaaagcattcagttttatgtattcacaaagatatggtttggaattggaacttatatttaaaagggaaacagagcataaaagttccaaaaatttgcagcccgacaatgtgatagaaaagaaaaaccaattttctgaggagaaattcaagctggctgcagaaattttgtaagtaatgaggaaccaaatgttaattgccaaaacaatggaaaaaatgtctccagggcatgtcagaggtcttcacagcagcccctcccatcacagaaccaaaggcctaggacacagggcaccagggcctttctactttgtgtggtcttggggcttggtgccctgtgtcccagctgtggctaaaagggaccaagttacatctcaggccatgacttcagagggtgcaagccccaaactttggcagctaccacaaggtgttgggtctgcaggtacacagatgtcaagagttgaggtttaggaatctccacctagatttcagaggatgtatggtaatgcctggatgtccaggcagaagtttgctgcaaaggcagagccctcctggagaacctctgctagagcagtgcagaagggaaatgtggggttggaccttccacacagagtccccactgggcactgcctagtgaagctttgagaagcaggccattgtcctccagaacccagaatggtggatccaacaacagcttgcaccatgctcctggaaaagccacagacactcaatgacagcctgtgcaaactgctgccagggctgtatcctgcagagcaacaggtgtagagctgcctaaggccttgggagcccaccccttgtatcattgtggcctagatgtgagacgtgaagtcaaaggagatcattttgatgctttaagatttaatgactgtcctgctggattttggatttgcaggkggcctgtagccactttgttttgtccaatttctcccatttagaatgggagcatttatgcaatgcctgtaccctcattgtatcttgaaagtaactaacttgtttttgattttacaggctcataagcagaagggacttgccttgtctcagatgagactttggacttggatttttgaattaatgctggaatgagttaagactttgggggactgttgggaaggcatgattgtattttgaaatgtgagaaggacatgagatttgggagcggctaggggcaggatgatatggtttggctttgtgccccgaccaacatctcaygttgatgtgtaatccccatgtgttggaggagtggcctggtgggagatgactgaatcatgggagtggacttcctctttgctattctcatgacagtgaatgacttctcacaaaagctggttgtttaaaagtgtgtagcactttccccttcactytctctgtctccctcctgccaccatgttaagaaggtgtttctaattgtgytgtagtcctttgaatctttcaaaatataatctraagtccttcaatctctaaactattatattaagtttagaaacagcaacacaaaaaggcttgaatgtcatattaatgacagatagaaatcaaggatttgtgttgcctgttgtgcatttactaactgggtgccagatgtaaacagaattgactcttcccctccctgctccctttatcttgcagcatgtggattaccataccctccctttttcccctccagtccacttttccccgctaaatatcaaagccctcaaaatcatcttgggagaaaggcacaaagtacagactgtttctccgtttccaggttcttgtcttccaggcatgtccttaaccttggcaaaataagcttccaaattgattgagaactgtctcagatagtttttggtttacatacttctaggcctattttgcatctgttacaatgcctaaaccatataacatatggaattccaataaaaggttcatgggatcctaggaggcccatgagcaggtttcaggaggtatatgtatcctcaaaactgaatacacagcttagaagttcagagggtttgtagctttcattagattcttgttggattcagtgaccatagcaggttttgaggcacaatggttgaagggaagaacttcaacttgagatgagaaagctctctgattatgagacttccaaggcaacagctcagatcaataaatttaagaatgtgattctatcagagcccttcgtgttgagcagagtttcagaccaactcacatgatattagtatacacaccaaaacagccaccatgttcagtggtgtgagggtggagcttgcccatctagtgaccacgcaccagtttccctctcctgtactgcctggctggggtgcctgagcagcatttccctgcagacagggagcccttaaaccattttgtagccttgcctgttttctccttttgccacaagacttaaagacaatggtaactggtgggaaacagatcacccagcagctctttactggcatcaggatatctggaaaacaaccactcagaagcgtggcaaagaaagggagttgtagaatcaggaggcatgtttttgtacagactatgataacatctgatgaattccctctgtaccacatcaaagtagaactcactaatgaccacaagacccctgtctgccacacgcacgatcttcctttctttctcttggaacagtgctgagtaaaagccaagactttccttggctcatttttgttgaatatgccaaccagccctttctattaatatattctttccgaagaaaaaaattataattcattatgttacaggattttttaatgttcaattatatttttatgaaatagtctcttttgttctggtgtctcctcaaaccctttttcggcatctgccttctctcaggataggtgactttcttggatggttaacttccttcatgattcattgattcttagttttcactatcagagagttgccttttcaagttataggtgtgtcttatcctktcttttcatgtgccccacaagggaatcacctcccygctcaccatgatcatcgtcattgtgataatgaaaacatgaaaacactgtgaaatgtagcttctgtgttaaggtagagtgctctgtaaaaaamcttagtattagtcccctccttataattaacccatcaattgtttctcatctacttagaattaaatctaaacttcttcaccatggtggagtagtcaatgttggtgttccttgcctgtcctccaatccccatttcccttctttcagctncctgaattttcctctggggacccacttttcttacaattttagtgtatacttcagatagatgaattctttcctcagatctgaagtggttgctttattcaggactgacaaatctgcatattcatcctcctgggcactgtgactaatccaaggacagatatgtggcccagggggatctgatraggataaggtctggacattttgtggcaattattagaaaaccagtgcaacacggtgaaaccccgtctctactaaaaatacaaaaattagccgggcatggtggcgcgcgcctgtagtcccagctacacgggaggctgaggcaggagaatggcgtgaacccgggaggcggagcttgcagtgagtcgagatcgcgccactgcactccagcctgggcgacagagcgaaactccgtctcaaaaaaaaaaaaaaaaaaaaaaaaaaaagaaaaccagtgcaatcttttaggattgctaaactgctagactatgtggctgaattttatattctttactaacttgtgacattcttgccacattttgcctttctggaaatgaagcaagccagaggaaaacagacaggtgagasagacatggattgccagtgacactatctgagcaagtttttgtccacacttgatctttttggacaactgagccaatacattcccttttttccttgaaccagtttacaytgggtttctgatacttgcatctcccaaagtcsagactattcccrtggtctcaatgctgtggcccctgctgatgtctcccaccttgtcttctgccatgttcacccacattctctatatcattgctgttctgaccttctgtcagttcctagaaaaatccatgtactttcctacccaagggactttgtttttattattctctttcctctaaatggtcttcactggctgtcttcaccttcagatctctgcctaagtgttaccgtctctgaggcttttctgacacagactacacacatagcacatacatgctcacacactagactgcaagttccctatgggcaggtaatttatagattcaatgccatccccatcaagttaccaatgactttcttcacagaattgggaaaaagtactttaaagttcatatggaaccaaaaaagagcccgcattgccaagtcaatgmtaagccaaaagaacaaagctggaggcatcacactacctgacttcaaactatgctacaaggctacagtaaccaaaacagcatggtactggtaccaaaacagagatatagagcaatggaacagaacagggccctcagaaataatgccgcatatctacaactatctgatctttgacaaacctgacaaaaacaagcaatggggaaaggattccytatttaataaatggtgctgggaaaactggctagccatatgtagaaagctgaaactggatcccttccttacaccttatacaaaaattaattcaagatggattaaagacttaaacgttagacctaaaaccataaaaacccgagagaaaacctaggcaataccattcaggacataggcatgggcaaggacttcctgtctaaaacaccaaaagcaatggcaacaaaagccaaaattgacaaatgggatctaatgaaactaaagagcttctgcacagcaaaataaactaccatcagagtgaacaggcaacctacagamtgggagaaaatttttgcaatctactcatctgacaaagggctaatatctagaatctacaatgaactcaaacaaatttacaagaaaaaaacaaacaaacccatcaaaaagtgggcaaaggatatgaacagacacttctcaaaagaagacatttatgcagccaaaagacacatgaaaaaatgctcatcatcactggccatcagagaaatgcaaatcaaaagcacaatgagataccatctcacaccagttagaatggcgatcattaaaaagtcaggacacaacaggtgctggagaggatgtggagaaataggaacacttttacactgttggtgggactgtaaactagttcaaccattgtggaagtcagtgtggcgattcctcaaggatctagaactagaaataccatttgacccagccatcccattactggatatacccaaaggattataaatcatgctgctataaagacacatgcacacgtatgtttattgcggcactattcacaatagcaaagacttggaaccaacccaaatgtccaacaatgacagctggattaagaaaatgtggcacatatacaccatggaatactatgcagccataaaaaatgatgagttcatgtcctttgtagggacatggatgaaattggaaatcatcattctcagtaaactatcgcaaggacaaaaaaaccaaacaccgcatgttcccactcataggtgggaattgaacaatgagaacacatggacacaggaaggggaacatcgcacaccgggaccttttgtggggtggggggaggtggggagggatagcattaggagatatacctaatgttaaatgacgagttaatgggtgcagcacaccagcatggcacatgtatacatatgtaacaaacctgcacgttgtgcacatgtaccataaaacttaaaatataataaaaaaaataataaataaataaataagtactgaaggatggggctgccttgccctccccagcaaaaaaaaaaaaaaaaaaaaaaaargttaattcttccgtgatttttgtgccgtttatgtttttagcttttacatttcacatgtaaattatttgaaatttgtcttggcataaaattcagatttgactttattttctagatgactgtccacttgttcaaacaatatttattgaatgattctctatggagtgtatttatggtaatagccaaatgtaaggaattgtcgacggggagaaaagtgaagtttaatcaagattgtcagtgaagatatgcttggctaagccatttctttttgtcctcttctccctcctttcctttcttctgctttcttcccctctcattctcttctgttctttgtttttctctttttgtcgtattcatatgtaacttgattcattctctttggggatagaaacatttttaaattttcttacgaattaaaaaattctttaaatttgtaaaaaaaaaaaaagttccctctgagtagggactacatgtgacttgttcagcattgttattccagtgcctggcacatagtcagtactatagaaatatttgggcaggtttcttgaatgtgccacacttgttctgtttttccttctgcctcgaattctctttttctttaattctttgcatagccagtttcttcttatttcagtctcaacccaagctccaccttttcaggaaggcctttcctcatcataaagtctatgattcctctcccctaacctgtctttcacatcatctggttttacattatttattatatatgccctgagattatccagttcaattttttgtttatttatttattttctatcctcaaacgcaatgtaagctccatgagagcagagacggtcttaatcaaagcttcatttccaaccccctcagcagtgcctgacacattacagtttcaataaatatacactgattgagtggatgaatgaaggaaagtcaagcactagagattacactcacttgtatgctttgccttatttaatccctacaaaagccttatgaagtaagcactatcatactattcattccatattacataggagaaaactaagtcttaggggggcaatgtaatttgcccaaaatcacattgttcataacttgagaagctgaaattcaaatcaagatatgcctgttttacggatgacagttcattttctgcatcttaaaatatcattttatttctttttttattatactttaagttctagggtacatgtgcacgacatgcaggtttgttacatattttatttcttatgattcgagtttggatatcacagctggtctccaagcagaaaaagagagttcctactctcctccccttaaccccattaactttatcctcagagttacaggcggaacagctggacatcttgcaaccttaggtaggggtaggtcttgccttgacagattcactacacacaaggaagcaggagtgtgtacattattttaggcttccagcttcgaaagagagagccaaaaggggctggcctgggcacgcactaggaccttttccccaaacttcactaatcagagtggttttctcttctgaaggggttggggccagaggaagggagagaaggaggggtctgaggagaagggcagaactgttttcctactacttccaagctggccaaagttcctgttttatggatggatgcaataacacagggagagggagaaatttccccaactccaaccctcagttatcaaagaaaaacccttagtttgcaattgatgttggagattctggggtgtagtggtgagggatatatctgtattggcagtatcaggtctcagcccgaccagcaacacatttgatgatatcgcttctaaaaatcactcggtacctctgtactaactttggagtcaagtttaaactcctcctcagggcaagacacttcatgagcagcccctggcccctctgcagtctcacctcctggtatcccactggcatcccccacagccatggtagagaagccatgaacatgttgcaactcctcacaactctaagcctttggaaatgtcatttcttctcccccggctaattcatattcagctctcaagattaggcagttaaccatgagcagcttcaaggcaggttatgttttacctatctctgtatccttgagcctctcaaagtagctgccttgaatgagtttcaaaaggttagctgaaaggcaaccttgcttggaaatcctcctggcacctcaggagatggttctcctccttgctcccaaagccctccagcacacctttatttataattcttaaactatacctttttaattttttttattattttttagagacaggtctcactctgttgcccaggttggagtgcagtggcacaatcatggttcactgcagcctcgaactcctgggctcaagcaatcctcctgcctcagcctcccaagtagataggactacagcaatgtgccaccatgccggggtactcttcttaaaatgttgttcttttttctttttgaggaaagaaggctgtgtcttatgtgtcacagggcctagcccataggaggtactggataaattaatttttgaatcaaacctcttctgagcctctgtgatgtggaaggcatggtgctaggcactactgggggtatacaaaatcgtgtctctgatttaaggaaatgagagttcatggggaacaagacatgaaaagttcataaatatattgcttaaggcactgtgagataacttgaagttaattctatagaaatttaaaaggagggaacatttctgacttatgtaacaattatcacacaccctccttttcacttggaaatggactcttaatctgttaattattttcttaacggtttagaagtgtcttttattgtgtggcttggatctgtttaaaaagtaggtgggtcataaataataaataaagaaaacaggtgatcaggcttaggaggccctctgggttgtgcgttcagacagtatccaagaagtttgacttggtgtgaaagggtgggattacatgttaatgatagcagggtttagattctacactgaaaggaagcagttagtgagccctgggaggagttgaaggaaagcagttacaaaaatggatgcttcccaagaccctccattaagcctcctgggataggtcccctgtctgtccctagactccagggtactgctgggcacttcaagagagacagagaatttgaatactcatgagtcttggaatgtaggaataacaattcatccgaacaagcaaacatgatagacaatttttttttttacccactgaggacattgtgtctaaaaatctgatttgtgcccaggaattatctgtatagaattttcattactttatagaattgatattgcatagttctgtaggataaggatctagcacttgagttatgaatagctcaggatgacataacacacaatggttagttggactggatatgtccataaagctgaattctaattcaactatgagcatctctgattctgcttctgattctaggtgactttaatcccaaattgaattttctgacatttctgtaaaatggggcatgagagagcacgtcggttatggggtttaaatataaaagagttaagagctgagaagtgcctccttggtcaattaaaccacactgacatcccgttttccttttcttctttttcataattagagaggaagtggagggaaaggaaataaataactttaacaaagtatgcctagtttaaatgcaccaggtccccgctcttttataaactcataattctcattgcatcactaatttgaaattaatcacagctccttggtgtctcrgaaagcttcctattgcttttcactacgtaactttccaagtctgtgtgtttggtactctaggatgttaggccaccagaggaaagaggatgtatcttttttttttttatactttaagttttagggtacatgtgcacaatgcgcaggttagttacatatgtatacatgtgccatgctggtgtgctgcacccattaactcgtcatttagcattaggtatatctcctaatgctatccctccccccctccccccaccccacaacagtccccagagtgtgatgttccccttcctgtgtccatgtgttctcattgttcaattcccacctatgagtgagaatatgcggtgtttggttttttgttcttgcgatagtttactgagaatgatgatttccaatttcatccatgtccctacaaaggacatgaactcatcattttttatggctgcatagtattccatggtgtatatgtgccatattttcttaatccagtctatcattgttggacattttctttttgatagtcgaattcccttcaacgtctagcacagtgccttgcacatttacccactcaaaaaaaatttcgtaaggaattaataaatgaatccttaggaggaaaagtgaaaatgaagtttttctctcaggatgaggtgtatttctccgttcatttcagatatgcatcagctagtcagcgtaaattgtgctttttatatgctcaccaggtgtaggtaagagctttggctgagatggagaaattcatcgcgggaggataataaagcgggcagggatttggcaacctcagagccgcgaggaggaggcggagtcgcggagagtttgagtatttccgtccaatcaaaaggagactgtargaggaggaggaggaggagatgactggggarcgggagctsgagaatactgcccagttactctagcgcgccaggccgmaccgcagcttcttggcttaggtacttctactcacagcggccgattccgaggccaactccagcaatggcttttgcaaatctgcggaaagtgctcatcagtgacagcctggacccttgctgccggaagatcttgcaagatggagggctgcaggtggtggaaaagcagaaccttagcaaagaggagctgatagcggagctgcaggtaaggcgagagagagaaaattgaggtctctagggcaacctccatggaaaaaggctggctgcgcccaggccagcgcgcccccctcgcatgcaccccgtatcaattagttccggggcctcctgagattggggggtagagaagaacgggggcgggaggaggcagaaagagggaagaacaaacggcggcgagatgcaaacttttcttttagtttgcaaccgcgtctttcacgttggcatgcctccgctagcattgcaaagtgcgggctgctccaactggtcctgcaggctgctcgcggatgccagcgcgggatgccagcgcggcgccccagcgccttagcgcgcarttgttctggcagcctcgcgccgcctctcccccaacccccaaccgcctccgcgcggggcgatcgggagaggggccccaaagtggcttctttgcggggaacccagggactggcgattcttcccaaccaagttctgggccgccccgccgattctagcctgccttggcggtggcggggttgggggggtcggggggcggggggaagctggcggagacccaaccagtctggtggctgctggggcagctgraggggaaggcagccctcstaaggcagcaaacacgtacccgcccctcgtctgatgcaagactgctccgtgctttcgccgcccctctgcctcctgggagccttcggaggaaagggaggcgggcggggagcgctggggtccagatttagcctcctccccacctttggtttatcgctggttgggagtgaccagactcgactagaatccgatsccaaacgctcccagatgatttatagtcttagcaaatttttatctccttttgttgtgatatataattaatctacttcaaatctttatccaccgtgtttgaaaaggcctgctgggcctggtggccttgtccggaatatttattttgtgaactcttcactccagtgcctgcactttcgacctctgtagtcgacccagctgcccagtctctacctcacctgatccagtatattctcccccaccctccaaatcgcacaaccgccttctgcccgcctcagccctgtccaccaccttcagccgtctcctcctccgaggaccccttagaccgcagaggctgctgttgttgctttagttgtgccacaaccacgtggtcctggaaactgcctcgctcactttgtctgcctttgtatctgctggcgtggatcttgtcaccatggcatgacactatatccaagtatccagctctgccctgtactcagaagaatttggtccctgccttcaagaagtttgtaagctggttagggagcatggctaatacgcaggagacagttgagcagatgacacaagagcatagccccgaattagaccatccagctccctaacctttgcgtgttccccttctggaaaagccagagaaaggtccaatcatcatgcacagaattggtgggcaagggcttaggacttgagtaggattggacgggtggcaggctcctcacatctgtcacctcctttcttgtgtgaaattgtatcagtggctctggggaacaaccaggaaaggcagtggggtgtcctgcagaacagcctctgactctcacctccaccagagcaccaggttgggaagagggtggcaatcaagtgctttcacctctctaaaggaaattagaaacctgataccccagtgagggggtggggatagggagggatgagggcagaattgagaggaatgggaggcctcatccataatgaggggttgttccatgaagtcaggaatcagctgggtggatgctgggagtctggtgctgaaacttggagaacattttaaaggcgctgaaaactcttggcaggagaggaggagtgtttgttggctaacttgactgctgggcatttttggactgtttgggagggctcagctttcttgyctgtctttgcaacacatttggttcagaatgccaattaatctccttggtcagcccactgaagggtcctcatttctacactatgcctttttattctgcatgaagaggtgtctggcatagtgtctcctgccctcccccactgaagtctctttaatgctgaaggaagcttcggcagcgttgctagaaccgggcctggccttggttcccactgccttgtattctgggcaggcggtctcctctcactcaccccctggtcaggaagtacaatcattcctccctgccctttcagtggtgcttttcagacttggagcaagtcatagttcagtttaaggggtcatgacgagcattttaaaaaacaaagtaggaaatatcagacagcaatgcagatagatagtaaggytgtaagtattgtttcatgaattttgtttcatttatgttgtgtagttgtatgtgtgtggcatgtgagtatgaaattacaacttaaaaatgtgtttcttggccgggcgcggtggctcacgcctgtaatcccaacactttgggaggggccaaaggaggcagatcatttgaactgaggaggttgagaccagactgggcaacatggcaaaaccctgtctctacaaaaaatacgaacattagctaagcatcttgcacaagcctgtagtctcagctactgggggatggggtggagggctgaggccctggttgctgtcactcttcccaacctggtgctctagtgggaggatcgcttgagcctaggagtttgaggctgcagtaagccatgatctcgccactgcaatccagcctgggcaacagagctagaccctgtcccacccctccaccaacaaagatgtgtttcttacaatgarcctcagtcaaaaaagtttggaaaacgttggcttaaaataataaagcatcttgtttggaactcacatcttaaatatacctaatatgccggaaaatatttaaataatattaccatgtatcagtggcttttaaactttgactgtgacccacaataagaaatttgttttatgtcataacttaaacactcatacatatgtgtacacacagacacacacaaattttatgaaataatacttactctttttacatatgatgcattctggtattttcttctgtttcattaagtagcattgctggtcaggaccactaaactaaacactggtaatggtatttaatttactgaagcacatccataccttcatatcagtacttgaagaaagattaagaagggaataaatctttccatgccaaatttcttttcaaatttctttaaaataggaagttcccagcctttacacaaggatttagtttgcaaaagttaaataaccatcaaattaatcaggatcacacatcttgtgcaaaacagggtagacctgccttccctatagctggggaacatgacctggatagtttcattgtcttgccctatgatttaagtcagaggcatggcaatgctagaattacctcctaggccaagcttgtccccttgggaaaggaagcatgtgtgaacctgaggaatggcaatggattcccattgctgagttagcagtttgtctcgaacagccataaatcaagcagttttctagctgaacagcagctaaggacaggggagcgggaggacttgtaggaagtgtgggaagtgcctgttcccgccacagtgcagacacagaagccacacgcagagggcagtgaacatcagaatttggtgctgtgtagagagagacttgcttcctcacccaaggaatgacaaagagaggggaggatctctggacactggagaagttttaatcgcaaactgcagaggatgtgagcagatgggtgcatttggttagggctgtggtttccataagtagaggacaggagcagacagcttggggcaaagtctttgaagggggtgcgttgtggcgtgaggagggaaggggcttgggtgcaggggctttgagggtccagcaggaggtaggttggattcaggctgtctgtgaatatgtgctgattgaatgagtggatagagtgggtagttgaggttgtaagaggccttggaagctcattaactctgactgatgtgggatgtctggttctaatgtgggaccaaggtctcctgagtgacagtttctgcccttgggagaggtgagacctgatgctcatctgtaggagtctgactggggactcttagtttccctggcaccaaagaaggctggtttgagggaaaagtgaagagactacagcataaatcttyacaagggagatccatccagagagtccatgctcatgaaagaaacaatagtgctgtttctgtgcttgttcaggggctacaagaatgggtggactttggggagtctgcatgctctccagctagtgttgcctgtggggagcaggtttgcaaggtttggggagcattttggcagctttggagagaacaytgaagaaggatggacccttaaggcccaagggagtgattggtagagcctctggagcaggactgggcctgagatgtgggctctggaacttgatgctagagagacaaggtgataagatgatgactctgggtggtcccttctcctcttgctccatgcctgcttcttgtcagttgaactttgacttttggtcctgagctgaccacttgaaaggaggttgtgtttcctcagtgtgttaccaattttctaaggtgtcagtgctggctgcaaagaaatgaccactaaaaatgtgcttacccacccactgcccagttgccctccaaaaaggtcatgcagtgtacactcctgtttccctccatgctcaccaatgctgaatattattcattttctttctgccaaaatgatgcccaaaaatatcatatttaaaaatctatatttccttgatatctagcgttgaagagtctataaactagtgaaactagtgaccactttgtagttcttctgtgcattgcctatttatatatttatctattttttattgtgctctttatcctttaaaaaagtggatttgtggtgcatgcctataatcccagctactcgggaggctgaagcaggagaatcgcttgaacccrggaggcggaggttgcagtgagccaagatcgcgccattgcactccagcctgggcaataagagtgaaactctgtctcaaaaaaaaaaaaaaaaaaaaaaaaaaaaagttgatttgtaggaattctatcacttttggkgatraatccttgttctgttacatatggkgaaaggagttttctccacatatcaggaccactacttgcttttgtttatgggatctttttccatgcagaagtttaaaatttgaatgtaactggatttgtcaatattttcttccagagtttctaagatttgtgccttgcttatgaaaggttttcccaatccgagtcataaaaatatcccctgacattttcttttaatgcttatatttttaaaaattctttaattcatctggatttttaaaaatctgaagtgaggtagcaatctattatttttcttcttgaattttcataacattatttcttgtttagttcttcctttccgcatcaatttgagttctgctttttattttctaaattctcacatattctgtttgtctagtgtctatttagttctgttgactgatttgtcaatttctgaacgtttttcctgctttttttcaacttcttttaataagatttttgaaaatccttgagcactcttagaagtagaccttatgcctccttatcacagtcaaaggaagggatttctgatgagcaattttcaggcatgtgaagtgttaaagttatttgggaaagagggtgaaggtgtgaggatgggggactgatgagggtggtttctaccggcctctcatcactgaattcatttattcaatggaagtgtataaaacacttcattgtgaagtatcaactgtgagcttgcctacaggccacaggcaacttgctcttctcgacagaggcatttgtgcctatttctattatcccccagtaggcaggctggctgggaggagcaggtcaccagaagatccagggacctttgttagggagcttctgccatcttggagaagccacaggatttctggcaatgtctctcctggtttaggtgtctaaatgctgtatttggaaggtagttggaactcaacagatttggacttgattccagcttctgccatatcctagctatgtgacttcagcaagttctctaaattctttaagtgtcagtttgcttgtctgtactatagggataattgtratatctgtcttaggattgttgtgaagcacagtgctggatgtaaagtacttgctcaaaaaatggtagctattgttactagtaaatctctccaagggattttacagtttggtttttgcacctaactggccatggccttggctctggccctatcttcttgacatcttggcaggtctaccaactcttcttcagttacagtctcagagttagccagtggcaatgactttccagttcttggctggtttttgatctgtaagagtgaccttgggcaggttacctctcaaagcctctgtttctttatctggaaactggggatgattataccccttctccttggagttgtgaagagaataatgtaaagcaactggtgtaatgcctagtacccagcaggtgctcaataaatggtttatgtgctggtgagkctggtactatggatatatggtatagagtagataaagttttaatataaaatccctgcattaggcatagaaaatataactaaggagaccaaaactgcaggtctaagagaggacaactagatatgaaacatattatattggtgatcacaacaaaaatggtggggtgtagggagagtgacagttcagggttgttggcaaatgtttcctggaagataactttattgcaccttgaaaagtcagtaaagtgtgtccaggcagggaaatccttttctttggagcctgtgtggtggacttgaatgtggaaaagatgccagtatcctgtttctgcctggcttggctgatatttaactaggctgctatggggggaaatcagaatacctccaggtgctcacctggtgttggcctcrgcactggggcagtcagcactgaggtggcttctgtttgattcctctaagccctgggtgcccatgtgacttgtatacacccaggtcataatcagtttagcataatgccagatacgtacatagcgggcatccgataaaatgaaggaagaaaagtacaggggaggggaagggaaagtaggcaggcttaactttgttgggcttcagtttttcctctgtaaaatggagttggaccagatgctggtgaacatttcttcaaatctcccactctgacgttctgcttcagaacctcagacataaaaggatttggagtgtcttccaggccgcctgcatgtttctctctgctggtaggcacagcccccaagcagtgaggatgtgtgatgcataaacacctccagaggaatcgttctactattgctcttgaacaattcttccagtgtttagaagctcttaaggcttaaatattctatgctgcagcctaagcatcattcctcttctcttcttagtggagataaaattacccactgctctccttacatttactttgtccatatttgctcctatgctctaggctcgtgcacaacaaacacagtgtgggcccttaccctagaagccaacttctcatgacctttctctatctccagaatccatgcagtgggaatgaaggtaaaagaaggttttcatgggatccagctgagagctctacggggaaaatggatctgaggagccatgtgctccatctcttttattttacaggtagagactaggggtatagagtgaggtgaattaccgcagtgacccacacattgttggcagacctaggattagaactctgtcttcctggttcccagcttggtgcttttgaaagcatacttgctgctttcttaccggcctggtgtctgccactttgggacagagtgtggacttgctcacctgccccatttcttagggattctcattctgtgtttgagcaagaatattcttattctggaaagaaccacataccacaggattctgggtgagcataaggaagattgtcttggggatctgacttagctcacgtatagtggctatgatgaattcagtgtcttattttttgcatatgtatatttttagtctaatattgcctgggtgtctgagcaagtctagatgaatttaattgctctcatttttcccctgcccctcttcctttggtctctcttttaggaaatgtttttctttcaacattcgtytcattcattatttactcattcggccaaccaacatttattgagtgccttccctgtatcagggacaggggcttacaaagtagaatttgatcccacctctgccctcaktagctcagtgtctaatggaggtagtgatgttcattaagcgtcgccagatactgtgctaggtgctgtgcctgttctctctcgcttgttcctcacacacttgagaaggccgaagctgattcatagcttggaaggcaggggccttggatttgaacccaggcctgaccaatggcagaacctatcagatgtgtggacagatgacattgcctttctttctttggatatatcaaaatcagccagcaggcaggaactcccattttgagcaagcaatgtgcaggaatgatagggtatacagagaggaacaggagatggcccctgacttccagcatgtgtctgatggacatccaggctgcaggcatcatggtgctgtctagagagatgagccaggtgcccagagcccatgggccaatgctgccctttcttgagcatgccaaacaaagcggttggtgtgttagaggcacagtctcctccactctaagtaaaaatcagcatgagtcctagcccacatttccctagtgagtayaccaaagatatctrtgaactggcagtcatcagtgacttcctaaggttccggaaatgcatctcttactcaggagtaagcaatgatgtgcctgcggctttacgagttctcacagaatgactttctggacccaaatgttytttctgcttcaggactgtgaaggccttattgttcgctctgccaccaaggtgaccgctgatgtcatcaacgcagctgagaaactccaggtggtgggcagggctggcacaggtgtggacaatgtggatctggaggccgcaacaaggaagggcatcttggttatgaagtaagtcatggaggctgcgggyggtttgggggtaggggggtgagtgcggagactgaccacacctagggagaaaaaactcacttgagagaaagctgagtccattggaagggcttccaggaggatgcctggtctagggcctgcatggtcaacacacacagcatagtggtttcaaggtttttggaaggcagctatgctcaccactatatcaccaatgccatcagggtgttacacagtttttgaaattgagagtccctgcataatctcaaaatgtttcacgagcccaccccatgcgcagttgcttgcacctctgtgacctggttcaggaatcggaaggtcagtgagttcatctgcatttcstgctcccacccagccccctctgcctmtattaatgctgtttgtggcaggtttttgtcagctctactttactgtgcttgtacagaggcacaacctttgctagcagactaatgactagaatccttgccctccccacttccctgccaccttctggaactaagacactagtttctctttcagtgctctagggcaagaggagaagggtcccatttaaagctgtttctgcagaaacacaggggcagaggtcatcagcacgccagtgctgtactgtaccygttctgtcacttagatggtatggcaaggccatccccaggcctctttgttcttaagacttttctcttcccttggggacttcattgtccttaagacctttcccytcccctgcactgcacttccccctgtagggtagaggttaattggtcacctgactgaagtcaatattcaacagcagaaatgttaaacgataacccatcccacattcttgccttggacccagaggcagccaggccccaatctctgcacctctacttgcgcccccatacagcctgtttgctgtgggaggatgagaagccaggtggttttgcaggcagacagactctgagagtccgtttatcttatacaggatctcttgactttttcttcttgtaaccttattaaccttcattccagagatgaaaaagacagacccagtaggggaataatcagggtgaacacgtatatgaaattctttcaaaaacctaaaaagcatttaagaaaagaaaaatagttttgtgggttgccacctctatttttttgtttataaaatgggaagggtctggattgccctgtgacttagggtgtgaggaggctttctcagttcagaacttgttgagagataggaagagtagtcagacaggtggagattactaataaaagctaggttggggctgcgtgtgggggctcacacctgtaatcccagcactttggaaggccaaggtgggaggatcacttgggcccaggagtttgagaccagcctgggcaacaaagtgagacccccatctctacaaaaatacaaaaaaaaaaaaagaaggaaagaaaagccaggtatgttggcaccagcctgtagtctcagctactgagaaggttgagctggaaggattgcttgarccctgggaagtcaaggctgcagtgagctgtgatcatgccagtacactccagcctgggtgacagagcgaggccttgtcaaaaaaaaaaaaaaaaagccaggttgggtaacttgatgaagatatgtaggcattggactgagccctgaattcgagagactctgaccttggtaagatcaatggtaggagcagcagggaatttgtgctttctggaggcaggtagatcctgaaataggagaaagaaaagggctgaaccacacacaaatctgatcatgtgagacacttctctgccttgggaggagtgtttggatagagagaagccagatatgtttctctaatggaggtccctctgcagggaaacataaagccaggggaagggggtttctttccagcccttggcttagggcgagagtacatcagagaactctggacagtggcgtggtcagttcatggagcaggagtgagagaacacagcctgcactcaargctttctcttggggaaggagtgggaatactgggtctgtgcccattgatgtcccccttttctttgatctttagcacccccaatgggaacagcctcagtgccgcagaactcacttgtggaatgatcatgtgcctggccaggtaagtccctgacttctcagcaaagctagtctctccgatatgccaattattaccacttgccaagcaaatggacccagaaaaacttagaaacatttcgtctcagcgacttgcagactgctaagaaggcgacatgcagactgcaaagaacctttaaggccatcaggtcctctattcaacattcattacacaggttccctagtgcacaaaggtgcacttctctttactcatgttctattctccatgctgcagacaatctgccttctctagcctccaactcttgcaaatgttctccataccctgctgcctggagataacaaggaaggatgttccaggcagcagggtatggacagtgtctaggtaccctctgcttacttttcaagattaagcttcagtattaatttatccaagaagctctctggcttttccagctaggctatgtccctcactgattcccctggccctcagggcttatctctgtcactgcccttacaaatctgtattgtaatagaatggagtaagaacctgcttcagggtccttgtgtgttctgtgggttcataacacaatggaactcaaatgggcaagactcttgctcttctagcaggagttccaggcctcttgagtggatggggcagcctagaaatcaaatggttgtggcacagaatgtgcttgagtctcagtgtgttggttagtaatttggcaaaactgattgcatggagcacttctgttgaacaggcaattcaagcatttatgtggtcaaggggaagaacaaggctcccaataaacagggtaggaagttgttctaggtccctttgaagctccatggattccctaaaccagsggacctaggcatcaaggactccttgtttctctactcaggcctgaaaccttccgggaccaagaaattacttttcccatggcgagacctgctttccctcctgctggaggaggatctgggggaatttacctctgctctaactcctccctgcagtttccatctgagctctctggtattcactgatattcactggtaggtgaaaggaggcagtggggggraaggagaaacagggatagcttacacagcagtagggtctcagcctagaaggggcccccaggctggcagccrggttctcccagaacatctaggctgagtgtctctccccctggagaagtacagaagcctggcaccctggtttcacttcagctattaccttcagggatttttttttttttttttttgagtaagggaaaagatctcaatgtggctttctgattaattacctcactttttttctggaggtggaaggaaaggattgggagccagcaatactttccctccttttccaggaccagctttgtttaaaggaatcggtgaaatgctgtggtttaaaagaagctccccattgtcaactgctcaccatgacctcactcatcaaaggtgcatsaaaactaggaaacacgcacaccctattgggaaggaatgygttcgtttcatcagactgttcctagcagggaggacggtaggagagtgtgggtgcctatatgtagactctacaggattgggcaatgtgggtggagagcaggcgtggctgggcctcacagtagggactttgagcagatggcgggggctcctgaggtgcagaagaacagcacacagaaaggaaggaaggagagaatcaacaaatgtaggtttcaccatttttgcctgctttaccatctcctcctctagtaagtcaggccagcaaccatttaattattgtgaggaccctcgcccacattagagtcctctccagtctggcctgatgaggattccaaagcattgaaacctggagaggctccatgatcagctgggagcagcagccagagaaaagggttagggatttcttgtgttctgtggtgccgcacgcatacatcttagatagcactgtggagtctggtgggaagaaaataggatgtgagggagaggagagaggggccaggtggggctctgtctcactaggtcaaaggcattttatcaggcaagctttcccaagaagtgaacagttcctcaaggcaagtccctgtccttattacctgcctgatgggtcagagcagtgaggtgaatgcagcttgtcccccatgtggcttggtactgaagttcttctgagtttacccataagatcgtgcgcctctgtgatggaggacagattccaccttcagccttaccctcagatggagatcaatgtcctagtgatgtgtagagatgagagaatgtttttgtgttagaagttagtgaagtgaaagcacggaagtagcagcttgagatttctctttttgcacgctcgctcactctgaggtttttggcatcaggttaaaggcctacatttaagtactcaggaggctggccgtgctggggttgactttgctggctttgaatctgttcaagtgcctccagttgggtgatctggggagaactgtttaacctccagtgcctccctccgtgcagctgtgaatgttagaggagttaatgtgtgtctaaacatttcttttaggatgtctaaaatagagaaagtgctccttaaacattgtttctcaaatcttccttttttgcctccagagatgtgttgatgacccatgcccacaggacatatatygccctttgacctctaatgttgccctaattgccacttcctctgtctcctccagaaaacacagatgtagactcagacttccatctggactaataggaggagacaggctgtgaagaktgtgtgtgtgtgtgtgtgtgtgtgtgtgtgtgtgtgtgtgtgttggtggtggtgggacaggaaggtggtgcggatgtttaaaaatgttgggaccacgcattcaggacagaatggaagtgtctgggctttggcatccacccacccactctagggtccagactagtctaagaccctcggggttaagaaactctcaaggaagcataggtaattaggtgtcctcttcataatagtagaagacgtcataggttatggtgctggatgagataggtagatsaaaataattccttgagcttctggagtactcgatgtcatcagagttgcccagtaccccactcagttatccctacagaccctggaggattggcgatcgcttaaagtaaaaaactcactctggttgatgcctcagtggctgaggtggaatccatacctcctcccagatgcctggctggtcacagaaatcccaggctttctaagtcagatcttgccaagggtttctctcttctgttttccctttatcccccatcagtgttcctaaacctgaacccccagacccagttcttggggaagtggctgtcatgggcagtgactgtgcaaacctgatgttgcatctccttcctgggctggcgggagtccgaatggaccctctgaacctgtgtctatccttgcaggcagattccccaggcgacggcttcgatgaaggacggcaaatgggagcggaagaaggtgagcagcggccttgactcrccccacctgggctcaggscccggggtccactcatgttgctgacttcagcttctttccttttgcctgtttggttgcagttcatgggaacagagctgaatggaaagaccctgggaattcttggcctgggcaggattgggagagaggtagctacccggatgcagtcctttgggatgaaggtaagatgttgctggaaccctgtgatgtgggactttctgcagcaattttgggaaaggcagcatgtctgggcagaagccagaagctttgttctaggagggtctgaccctctcttggagcccccatctaaataagtgttaaagtcaaggagggagagaacactggcctgctgatctggactcaaaagctggaaatacttggtgggggtcctttagctctctggtgagtgaatagccctgagtcccagtgaaccaggtgttgatggctsttttgagactttggttcctgtcttcttagtttaaaagaatttaaacaagagacacggtgcagcattgaggagtttattgcaaaggaaaaagaatattttgaaagttaagtgcagagtagacagtacacctcgggagagagagaattcagggtgggctgctcataagagtgaggcagtgttggccgggcgyggtggctcacgcctgtaatccagcactttgggaggccgaggcaggcagatcatgaggtcaggagatcaagaccatcctggataacatggtgaaaccgcatcgctactaaaaaaaaaaaaaaaaaaattagccgggcgtggtggcgggcgcctgtagtcccagctacttgggaggctgaggcaggagaatggcgtgaacccgggaggcggagcttgcagtgagccgagatcaygccactgcactccagcctgggcgacagagcgagactccgtcttaaaaaacagaaacaaaaacaaaaacgaatgaggcagtgttgattattgctggagaaactccctttataggagttttacatgattattcataaggaggtgggaagagctgttactagtaagcatgttttgggtggtcctctgggtgcacatgagtagtagctgtacattcttgttcatttggcacatgtcttattagcatcttaaatctccacccaggagtgtgttttttactattataatgagccagggggtcagtttgaggacaggaaaaatcaaagtgcacaggctgtctagatgggaagttccctactgaagatagctttgcttgaatgagctcagttagaatatgaataccgaggcttattgtgttgactataggatcaccaaggttgctgcacttccttgattacctatcctgcctcacagggagggtgcttgtgtcctgcccattctttctttccttcctgcttttgttttgtctgctttcctgtgataatttagaaaacaggaacaagtttatggcctcacagtagagccttacatccattgtccatctgtccttccagtttccctccatatttcagaaaagatttaaaagtgcttgtatgtacactatgatatgattgtagagcctatggtggctggaagacctcacaccggtctcagaaatcacacctaactcctgtcttcccccaggtctctgccttttcctactctgggagctcagtaggcttctggctactcccttagcctgattgcaaccctctggttgccatcagtagcagtgccacccacttgggctaatccaggagaccttgcaaatgagagaggcaattcagctaagagaggggatctgcagggcttcccagataggccaaagagatgaacccactaaggctactatgggacatctctctgttcactttctgttttagggaattacagggattatggggtcaaactgcagccaggaagtctttaaacattaggagatcagttttgacaaccagatcatgtcaaatctagaaaagtttacatagagctgctatggaactctccctttttctacatccctcctaccttcttagagttagaagggatcttaatagattaacccttaattttacattgacatctagaatttgtaagcttatgcctaaggactcatagcaaatggacagtagcctagagcctggtgagcatcccattgtacacattgaatattatcctctccctcctgcctccactccccatcttatttatttaagtcagccagatatctttcctaagcctctgcactgagaagggccaggtgtattcttgatccctggactcctgagagaggcagatgtagcccagcaggatcattgatcatgtaaacaaaccacagccttgccctctgtgcagggatggtgggatgccataagccacaaagagcactccctcctccatcctcttttgtaagggatcaagggtcaaggtttagtccatggagaattttgatataaaaggcagaggtcaggagttaagtaaaactaagagcactcatagccaaataggtgagcatttcattgatgaagcagtaactgggagacaggctccagaccagtggccgttccaaggctcctgcccccttccccagggggtcctcttccccatgactccccttccccaggcttccttctccgtggcaccactacacatcaatattcctggcaatattcttcatcatggagacttcggcagcgacttcaaccagatgaaaagccccacctcattcctgaatgattgaggtgctaggtaagcttgtctgtccatctggcactgcccaactctctaccctgggatgcttccaagaggtgcatgggtacctgggaccttgagcatcagtgtcaggaaatggctgacacctctcgtgcatgtgtttgattgaaagagatgtctacggcctgctcatttcagtgttaatctgtgcctcagagcaggtcacccactgaatgttttattcccattcccagcayggtgtggagggtgccagtgccttcactttgcatttcttctgtccagatgtctctggarggtcattcttaactgtcttgcttccagaacatgctctttgtaaacccctgaaacatggcttggatcattcmgtctcccacctcagcccctccggagctgcctggacctcatcattccggagagtctaagtggcctcttctcgtgctcagctgcttacctcaaccacgtcattatcatacttttgagtctgratgaattttgtcttagggcggagagctcatcagttctaccggtcttggagaacaagattttctaaagggaaaggaagattcttgaacatattgtgaaagagatgtataagcacccagacaggaaatgaggataagtgtttattaaacacaagttatttcatactagcctcatcctctttttggaaaccattattaaactggtagagtatggaaatccctagatgtcagatacccggactatttaaagttatgttttaatcatgtaataaaggaatgcattctcatataaattaaaacttggacaaggctatacttgattaccatctgaaccctagtctcctcacggtaaacatcagtttagcatgtcatccgagacttttctatgcatttgcacagaatgcatacagttccatgcctgtggatggattctttggctgcaaacaatagaatattgtttgtgatgttaagaaaaaaacatgtttatctcagaacaactaaatctagcatatttttaaacagttgtgtggaattttattgtgcagataaattgctttttatttggccattctctcaatgatgggtatttagattgtgtatagatatggactttggtaagacatctttcatgattccctcggggttcggatggagccccttgagcttggtgctattgaagggattagtgcttggtgctgttgtggaatgggccacctcagtttggagggagatagtatgcaatagtgctccaccttgcccaccattctcatcaacagcctgaaccatgtgtcatttgtggatggcaggaagcaaggagaggtagttaatacttaagggtgcagaatcaggtccaaaaagacatatgaaggctagaatggttgggcaccctcacaggaaatttagctagaatacatttctgcaccctacttgtgggtccaaaaagcagctagacaagttttagatgtagaagcatttgtcaaaagcttttctgggggagcagggctttggtttacaaaagagcagtgtggttgtcagtggcatagctgatagaaaaggtaacctgacatttggcagcattaaaagaagtatggcttccggagcaagggaggtgacattcctcacactgtggcctgacctgcagcctacctgtggtctgagtcatacaggtcttaacgctctatactgttgtgtctgcgagagactttttctcaatagtgttgctgaatgacaggtcgtgacctcagagactcagctcattcatgctggtgtgttccttagaatgtgttaagaggcacaaaccaatcaagaagcgagccttgtgctttatgatcaaggttttccttgagggaacagacaagcatctcttaacagtttctttgtagccagcgttgtgatgaatccaactttagcccagagggttggatgttgaacctgaggcaccagttatcaccgattttttcaggtccagctaatgtttgctgaggtctactgtgtcggttcctgtgcttgaaatgactctgcagggtcagaattattatcccaggtttacagataaggaaactgaggcccaggaaggttctatgatatgctgaagataatgcaactatgaactggtgaatttcggctcagccttccaggctggcattctttgcccagtaccacttaactttattcatgatccattttaggtaaacagtccctgtgccatgccggtatgcttagctattccaargacagatactctccaggatgggcagctcctatctcagtgtgttacctggaatgcttactgcccagagcagtgattctcaaactcaagagcctcgggttctggcaaggtgccttagggacacaggtgggagcaaggaggggcccagggagacagcaggtggtggcacattgagcctttacctctgcagctttgaattgacctatttttatatttgggtctctgtttaagatttcattgccgtggtagggagagttccaatgctaaactaaaaattcagctgtggggcagagagagcacgtgacggtgagggttcttcttcagagcctctttaactgggaggcctccttgctctcctctttgctctgctgagccagcaaggccctgcagccagcataccagcctctcagggctgtcttctgtgacctcaggcaggtaggagccaccagctgccctggagtcctgcttagaaagtgaggcttcctctgttgcctcaacatcaggagtctgccctggggctgggattgaggtgagggaaccccttcatgtttctccccaaggcttctctccgggagtagtctttgaatggtgggtacccagaggtgctccartgtctgtatattaggacatctgaccctttccaggacacaccaggaccctgacaggcacgtgtgtcctgggcctgttgtcaccctttccatcccctcagtgttgtctcctagtgtcggaaccccaacccccagctgagttcagctcttctctgccckggttatctcaaatggaaaatgagaacagaggtttgctcagccagattccttccctgcagtcatctgcagataaatgagatactctctgtgaaagaaggaagctgagtcagtgcttcgctcacccctgaggaagatgctcacctgctcctctccccaaccccctccctccagccccagtcacctgtctgtggagggggccaggttcagcctgcagggtccttcctcctgccagcccccaggttgttcttggctcctgagcatggagtagacgtcagtcaggctggaccttgtgatctctattggtgttcccttcctctccccactccatatgagaaaaaaaaatacatctggattagagatgaacagggccattgttctggccrgcctcagggccagcagacgaagaagacttgtgacaacgatggcarggatcccatctcctcgcctggacactttctcctccccaccagaaatgagtaggttacagccgaggggagcagcagtgtctgaaaaagaccaccagcgttctgagctggaggttcttatagggcgtgggagaggcagcatctttccccaaaacctgcctgatggttggtgtggggccacttggctttccttattccacaaggctaatgatgaaaaaagggatccagaggcttcaccttaatcataaccattttagcttctgccctagaattactgaatttgaagtcctctttcctattacgttcttttttattttgttttatttttttttttttttctgagacatcttgttctgtcacccaggctggagtgcagtggcacaatcttggctcactgcagcctcaacctcctaggcccaagtgatcctcctgsctcagccttctgggtggcacaggtgcatgccaccaaacttggctagttttttaaattttttgtagggggggggtctgactatgtttctccagctagtctctgactcctggggtcaaatgatcctcctgcctcagcctcccaaagtgctgggattataggtgtgagcaatggcacccatctttcccattatattctaaagtatctatactgtatccctaatttcaaaagtaatttatgaataatgtagtagaaaacttgaaagcacaggaaagcaaaaaggagaaaaataattccactacccagagacaaccgctgttaaagtactatgctgtgtattctttgtttttgtctaatcctgggctcactctttacattctgtctcggggttaagggggatttctcttcaaataattcccagtgattgaatgtgagagtgagagatggctgcaatcatctgcccagctcctttatttagggttgaggacccaggtccaggggaactgacctgtacctttccacacagtgggcagtgactgggggaggacacaggtcaggcttcctgatttagagggcatgcagtcttgctcccactctgggtcctgccttgtacccctgttgtcctcctccttcgcttctgctcactctgttttagtacctgatgcacctgtttcctggactggaccctccagctgcagctgccatttctccttctccctttcctggctgtccgctccctacatgactgccctccctccctcaggactccctgctttctaaggacttccaagctccaccttgtccagacctatatgagctattgttgcatctgtgtgtgatcacagcatggaggcagacgcaccttcttttgagctctggctgtgcccctcctcattgtggaagccctgcttccctcagctctcaagcagacaagaacagtcccagcatcattgtgtggtcatgagaattaattaagctgatcatggtacttagtatatggtaaatagtacttagtatgtggaacatggtacttagtgtatggtaaattaactggagaattaattaagctgagcatggtagttagtatatggtaaatgctcaaaaaatgtttgccattcttaataataacaatactaataattaagaatgacacttcctccctctctcttgcttccaaccagactatagggtatgaccccatcatttccccagaggtctcggcctcctttggtgttcagcagctgcccctggaggagatctggcctctctgtgatttcatcactgtgcacactcctctcctgccctccacgacaggtaggtgtgtccttacattgtggattggtcacagaagccacagaccagttaacaaatgggccctccatctgggccttccccagacagtggtaaccagctgtggggagaggtccacctgggtcctgcagaggstggtgttttgttagacacccctacgttggataggggagggtgagccagctagaagtgcttggggtctaggtaagctgggcacagggacaaccagtgacccccatggatgctttctgcagcccctgcagggctttctgattcccagacccacttgaaacagtaatatctcaagaatttctaagatgtttctaaactgagtctggcccagatccataacagggactcctgccccagagcatctgaggaggaagagatgagagcaaagaggctgccgtccagcaggagagaggctctgggaaagagctggctcaaggaaagggaagacctctggaagccagggatgagcgtggggatcctggtgctgccccagcaggaagatgcttcgctttcttccaggcttgctgaatgacaacacctttgcccagtgcaagaagggggtgcgtgtggtgaactgtgcccgtggagggatcgtggacgaaggcgccctgctccgggccctgcagtctggccagtgtgccggggctgcactggacgtgtttacggaagtaagkgcctggcagcctcagcgtcaggaggacgggagagatagggagcagagaggcccatggcagggaaagcctggcgttttacagaaagcctctagcttattgtctctttcatccatggtaaaaggagaaaactgtgttgccaaaaacacacctttgtggtttgaggagtccttgcggagcctggtatggaggcagctatgtggttttctgcaaaactcgggctttaaaggggacccagttcctggttccgggcttctcagactgctaacatattgacaaagataaagccacaaatcagttctgaagttgagggtctggagcaggaagagagggggctttagtgtatagttgagggaccctgatggaaatgcagtcccattgccaagaaaatgtccttttcagtgtccatgggcattcyttttcccttcttctcttgctgggtggacagaagcccgaggatactggcagtattccctcagggtcctcggggtgggctgctttcccagctggagcagaggctcagcctcacaccagatccagtagggaagagtgcatttgcactcgaatccttttggctcctctcctgaaagatcctgtccccaacattggagcttcccctggtgaggaaggggaaaggacatggactttggattaggtrgttgtggttcgcaggttactagctgtgtgtccttggaaggtcactggccctctctgagcccctgtagcactcactgtgtactcccagcccagggcacacagtgccttttggtttgtaaccttggtcatctttctcagctcttagatcataagctccctgaaggcagggcaagccttgtccatctttgtatcaccatcctccctaacacagcaccttctcctgctctcttcagcatccttgaaccacttgctggtggtacttacatggttacatgtggccgggactcacaggattacatggttacatgtggccaggactcacagggttaaatggtcaaaattcaatgggaccaacagagccctgaggagaatggccggaagatgcctaaataacatacccaagggcaatcttctcagtgagcagaagggtggaaaagacactggagggtggggtggaggtgccacagatgggcaacctgtcctgatgagagccaagatgcagttacctgcgtggagtgtcttggaagagcaggacactgtgctaaaagtccagcaaggcacatcgacagcaagtgctgcatggatgcaggggggtgagtttcggggaaaagcccagtaacaacaacaacagtagctcctattggtcaagggcctcccatgttaaaggtgcataatccccacagtaatgttatgagggagataggaycaacccatttcacagataaagaaactgaggcttagatcaaggttcacccccaaggcacctaggtggttaagtggtgaaggtgagatttgaatctggttcacactttgtgctgtgtccactctgctgagatggaacattcatgtggaagcccattattgagtccagtgaccaccctgacaaaatagaagtggaaggcaccagaactcctgactgccttccctccaactttcctgttgcctggggtggcccaagagggtgtggccagtccatggcagccaacttagaggtatctctttctgggcaggagccgccacgggaccgggccttggtggaccatgagaatgtcatcagctgtccccacctgggtgccagcaccaaggaggctcagagccgctgtggggaggaaattgctgttcagttcgtggacatggtgaaggggaaatctctcacgggggttgtaagtatcaccacctggggctgggggccaggagtcagagggaggagaggaaggaaggcatcttgtaggggctggtggcagcgtgggtgaatagattcagccctgggagctgaagataagggaaatctgcttgagtcagcactctccggagcaggtgggcgggagcctcccgtctccagccttgatagcagaggccttggcagcagagagcccggctcaggcctgttatatcgtagtcttgctgcagagattgtggcccttcccaggcccagcctctagagaaaggctcctttgttctccacatgccgtgggagtgaaggagtgctgcttgggtgccagctggacgcagccgcagcaggtggggatgtggttggggacggccawgtagaaatttgcaccctgtaagctccccagaccctgccttgacagcctgccctacctactcccaaatgagccctctgtgctggctgacccccttgctttccccaaatcaaggcataagacccccacttcttgtctttgcttccatcaagcccttcctggcatgtgcgtctcctacgagcttaacctgacttacacttcaagtcctgtctcattcattcagtctgtggatattccttaagtttcactgggtaccagacattgtcatagctcttgggagacacgggtgcatgagggaggcatagctctccttccaggggcttgctgcctccttctgaagtcttgcttggcctttccagccccttctcaattctgagaaccatgttctttcttgttattaaggttcagttccatggggtgtttttttttttccctaatctttctacttaacctaagttctaagttccctgaggacaaaaaaacatgacttaagcctctctgcagcttgtgtgggtgggcccaggccatggagtcaaagggtcaggaaaatgggctgggtgttcttggttgtcctggctgaccctcagctgggtgattttcgctggtgaggacagcactgtggcaggagagacggggattttggttctgccctcccacctctggattgagagcccagccctccaggcctctctgccccctccatcctgaggaaagaagggtgcctcctgctgcccagcagccccacacagtccatggaagtcagcagggctatgaccagcagcatgcgaggaggtcagcagagactctgacctgtctgcatcctctgtcctctatgctgtgtgggctcctcagggcagagcacacttcactcatcttgcacctggtcggcctctgagcaggttcgttcctcccaggagatgctgctcgtttcccaggctgaggtttgagctcatcaccattgccagccaatctgggcttcagggttttaccctttcagccttctcagaaagcagctgtctgccttccccatcgcagccttgcaatttattgccattaccattaggtagcagtgacattccagagcttttcctgaaagggactcctkaatataagctctggcagagcgagggggtgggggagggagggggaccttgcagagagatggggaggagggggtgagaggtgtatgggctctgccctgctgggtgtatctgctgcaggacacagagttccatcaaatggaccacacagtgtccccatcttaggaggtgaaacctcttggtcaaaataactacccttagcaaattgaactgttcacccacatcagcaaatagtcttagagtagccatttggaaaaagagacatttttgtcacataagaaatatattttcctaattcttccctgcattttccccagttcaattctgttctaacctcagacacagaataacattagggtcaggttggtgtcccaaagtgcctgactcctccctggaattctcccacctgtccaccagggaagactgagaatcctccttttacttgggagccctgtgatggacacctccccgggcttgggctctgcaggcccacacagaggacagagagatgtgccgaggtgcctgcgttatgggccctcttagtwggactttcctctgctgctgcaggccctcagccccggcagtggcagcatggtgctccagatctcctcccagcagctagctgctccaccccaccacccttcttgtctgtgactccttggagaggatccaggagccatgcagcaagaagcctgcagacctgtcacctcccacactggagaggctcccgtgaagcccggcctcagcagtcatttcccataccatgattctttctctgtttaaaaaaaaaaaaattcttccaatgatatctttatgaaaacagaaagagaagcatctgtgtttccttctaattacatcttgtagctgcctgtttgatttgcatctttctaagatggttgactttacaagttatctcaataaaagtggccagatgcctaactcagaaccagagcattttgaaccacaaaatgraattgaaattttggcccagaacaagctggttctgttatcaggcccctgggtggggcagggggcagccagccaggtcctagacataacttttgggggatatggggcttgtgtcccctcagtgtcacaacatgcctcacagtggacttcgcatgcgttgatatttgaagcacgatcatcaaaactttgtgataattgatcgtagtgtttagtaacaatgtaaacacttaaaaaaattcaagatagaaaataaaaatgaaggcaagttgggactgccagagaagacccgtcactcctcatccaagttatctgcgactcccatatgttttgtgtcaaagactcacctttattgtgctgtccaatcccttccccagtgcagaaacaagtctcccatggagggggctggggcagacacagtttgctgaaaggagcaattttgagtggttgtggcattctgtgtccatttctggctccacagctttcttcatttgtaggaacaagtccttgtcctgttgttagtggctgatggaagttgtcacccaccaggcaccaaggcaggagtgaccctatactgtctttcttgtggagctgggtcttggcagccagatcttgattcaggatctgccatgcctcttcctgaccacagccccgctcctccatcctctgcaggtgaatgcccaggcccttaccagtgccttctctccacacaccaagccttggattggtctggcagaagctctggggacactgatgcgagcctgggctgggtcccccaaagggaccatccaggtgataacacagggtgagctggggaccttgcagagggagggggaggaggggatgagggagtgtgggatctgccctgctgggtgtatttgctgcaggacacagggttagtgagaggcagtgrgggtgccttggaccctgccctgagtatagctcccttactactggtgggagggtggtaaagggaggggttaaaaaaagtcgttggaaagatgtactgaatattcataaatcatgtttatgtagcatttttaagacctagatattttgggtgcaagagaaacctctacgagagagagagtttcatgcgagaggtcgtaggatggctggagggaggccctaattaagcaacaggatgctggattctggtttttggccctgtctcttccctgctgtgtgactctcccttctgaggcttggattcttcacttgtaaagtgagagttaggggcagatgagccaggagcggtgaggacactttgtgctctgtaacttactaaggtggtaccttgggccgtctgacagccctcgagagagagtttgctcagccgtggagtgggaatgagaacagtgccctctgaccacccctcgggctgctgagtgggctgtggccacctttgcagtggatccagtactgtgcggatgtggttgagtgaccaaggagggctccagtttccttaaccctgtagacgtgtatctttccccatggactcttgggtgtctcacagttgggcagagattgcagggagagggcagctaaaccctaggcattgacaataccagggaagggcagagccagggggtcccactggcctgggtgtccaagcgccgaaggaaacaaggcagggagctgggcagcagttgcttcggttacttctttctgctttgatttcctgaggctggcaaggctctgagtgccaggaaggggtaagagtagggaattttcctgtgtcccctgggagaataataggtaggccaggatggccaagccaggtgcagggttggggagcggagtggagttgagctgagttttggagaggagtttctcagggtggttaaaacatcctgggtttcctggcttgggcccagattatgcctcttctgagcccactgaagggcgagtggacctgcctggagcaagctgcctttggggtccccagggcagcgaggagcccatagtccagagctaggtgccagtggcttcctgccccctcctgtagtgctcaacaaacagtgacctcatggtagcttctctctgtccccaggaacatccctgaagaatgctgggaactgcctaagccccgcagtcattgtcggcctcctgaaagaggcttccaagcaggcggatgtgaacttggtgaacgctaagctgctggtgaaagaggctggcctcaatgtgcgcccctctcccccacgctgcctccccatccctgtcagcactagtcttctcccccacatttccagagcccgttctctgagcggaggcctaggtcccagccttgcatcggcctgtctacctgtgaggggtagctgcagtttcttcawctgcaaaatgaagatactgcctggccccgagtgttgctaatggcactgctttgtgtatgagtgctgtgggaatggaggcagtagaagtgtccccatttcacagccaaagaaaatgacgagctagtgtgtttgactctgcccgacatggctgccaggccatgtttgactctgcctaactcccctcagggctcctcatgccgtagcacccgggttcttgattcacttgcaagctctaggagccctgctgccttgcacggcttcccgttggcgccttcccctctggttccctgtttagatcaaagtctgtttcaaagcctgytgctcagccagtgggagctggcagaagggataggcagtagagctgccatgtcctcacccctctgctcccctccactcctgcatgccagtcatgccactgatgccgtgcaggaggctgtgtcagagcaggaggggccagagtggagtctcctcacagccctgcctccctgcttttctttcctccctgttttcctccaagccttcgcctgtgcctggcagatctctttgccctccctttaaggagatcattggctgttccaggaagctgatgccgaagggcacacagcttggcccatttgccctctcccttctggtcctgaattactgagcacattatccaggctggagccctacatcctaccaatgggtgatttggccaagagaggagggtggacgtggtgcagccaggaggtgtaacagtcaccttgccttctccacacaggtcaccacctcccacagccctgctgcaccaggggagcaaggcttcggggaatgcctcctggcyrtggccctggcaggcgccccttaccaggctgtgggcttggtccaaggcactacrcctgtactgcaggggctcaatggagctgtcttcaggccagaagtgcctctccgcagggacctgcccctgctcctattccggactcagacctctgaccctgcaatgctgcctaccatgattggtgaggagggccctgtagggctggctggtgtccttgaggctggggtggggtctgccctggaattgaactctacccaccttcctttagcccctcttcatgtcccagggtgtctctggatctgcaccatacagagggtctgatgccagttttcagaaccttcagggagtggatactcagttcaaagagggaaagtgccttatccagggtcacagagcagcatggcaggggtggggccatagcctctattcctgcccagctgtggatcctcagcttgccatgttaggtacactggaccagcttgtggagccatagcccaggagctcagggacattgagtgcaggtttcttactcctacctgctggccctgtggctgtccctggtggccagcccagctgcagcaaaacctacaaagcctccagccatggtaggcgtcttggacctgccccagtcagctggggcttgggctgctaggggttttggcacacgtccatgtttggcggagggtgtgccttcaaaccctgaagggcctaatttcaccattctttctggctgcccaagggaacttccctgcttttctcccttgctgttggctggataaaactggcaatcagaaagtcaagagctacagctgatggtcatggtgttcccagagagtcaggaatatccatggaagctgagcagatgccctgttgctctcccatctcagctctttgattctgagaccatcatccgctcattgcacctttgatcacaaaagctttgaacttctgattctgctcccaatccctckctcctttttcccctatcccctgtgccaaccaggagtttcttctatttccaggcctcctggcagaggcaggcrtgcggctgctgtcctaccagacttcactggtgtcagatggggagaccwggcacgtcatgggcatctcctccttgctgcccagcctggaagcgtggaagcagcatgtgactgaagccttccagttccacttctaaccttggagctcactggtccctgcctctggggyttttctgaagmaacccacccactgtgatcaatagggagagaaaatccacattcttgggctgaacgcgggcctctgacactgcttacactgcactctgaccctgtagtacagcaataaccgtctaataaagagcctacccccaactccttctgcacttttgtgtggtcattatcctaaagcgccaccagagggcgtccaaaggcagacgtagggtttggtttagactgcgggagcggagcgggtgtgggggaagatggggatgagcaaatggcttggttgagttctttgaaggtgatccctctcttgtctgccgaaggttactcagaggcacttttacaggagcaaagctcaatgtatttcacagtgctacggtatttcagaccccttccatctgggaatatacatgcacgttaataagtaagattcaacacacaagcccagcattatgtaccaggcactgggctaggtgctttactttaagaggagaattcaaacctgaccctttttccatagaagtctggtgggagggacagagcatgcagaggtgactggaagcagtgagtgatgctacaacagaggtgtataggaaattctctagagtccaaaggaggaagtaatttgagctgaggatattggtgtctcaggagatgtttagaaggatttcataagggaaagaaagtgtaaaattatgggggtatgagactatttggcaagttcacaaagcaaggtcagtgtgggttggtgaacatgtcacttttttttgaaagatgattttcatgcaaaatacagctgaacggcactctacccaaaagattcacttcagggaatttttttccccattaataagggatgatccattcttactgtgtgcccagtagtgtctgtttctgagattcctggcctggctaagaaggcttgacacagggcagctgcttggcactggcaggggcgagtccagcactctggcctccttagttttgtgatggagctaagcatcaataagaactccagcagtaagggctgtgttagtgtctgcagtgaactcagaggggttggccttgctgtagctcaccttgaagggaatgggcctggttgtgaatgtcacggtcaactctggacagctgtctgaccgggaactcagtgtttaattatcctagacctttgtttcctcatctgtgggagggctaatggtgcctctcacagaactgcaatgagaatttactggattaaacagtgacttacgggaagtgccaggagcacttggtgaatgttggtttcttcatcctatgttagtctgagagcagacaggcaggtctcaattctttacatagaaccaaccccatgaaccaaatagttctcaacatgacctcattgcaattatgttcagccagatctagacactgggtgtcctgacatcagacaacccattctctccaactggaaatatacctgtgcctcacatggcatccactgaggtcacttgagtgcactgatggatagaaaaacaggctgaaatttatgaagttaaaaattcagttaaaaattgagctcaatgtttagcctctcagcctccttcctcataagcccctaaacaaatcatgttctgtgcactaaggtcttcggaacagtactagaaatgcagattacttgagcatctcaaaatatcttcctagactgggtcatgaaagagggcatgggacgatcttatcgtatcacgtctcccatggctgtccacatgacctctcccaaacttaaagggcaggattcattgtaaaattcagctggtttctttaggaaactctgtaatatttttcataatagctgcatcaatttacattcccatcaacagtctagaaagtttctccttttctccacatctttaccaacacttgctatctcttgtctttttggtaatagccatcttaacaggtgtgaggtggtatctcaccgtggttttgatttgcatttccctgatgactaagtaaataggccagacacaaaaagaaaattattgcacttactcatttatatgtggaatccccccccaaaaaagaggtcaaatatattgacataggaactagaaaagtagttgaggggggtgtctagggagatacaggtcaaagaatgtaaagtagaaaatacatagggtgagtaagtcaaaagatctgatgtacaacctgaggactatagttaataacagtgtattgtactgaggatttttcctaaattagtagattgcagctgctcttgccatggtggcgggggatgggtaactttgtaaaataatgaatatgttaatttgttccgttacagtaaccattttactacatatatatatcttacaacgtcatgttctatccctcaaatatatacaatgaaatttttgaaaaatccagctagggctacagggagggtgccatggactccctcatgttctttgtggcatgtggcatctcttcactgcccctttagagtagaagttcattcttgtgcacacacagcagaaggctggctgtgagctcagggtggaggcagggcaaaagctgggccacgcacagaatctgcctcaatgtgctgactcctgaagttgtgatcagtgtgtccccctagagcttgggcttgtctcatggtcagtggcggggccatcttttgcatcagttttaacatcacatgttgagtattcccgtttgaatgagtgtatcatagcccaacacttgcccaatctgccgtcctctctcctgccctaggtcaccctgtgtgaatttttgcccacagggaaagtctttatttgtatggtatctgtagactttagggtgaaaatgttgactgagccattggcaactcattccctcgtgtgctgaccttacatgggggagagggctttgttcagagcaggcaggcatcagtgtcccagagctgccagaggaaggcctcgggctcagtataaaagttggtgaataaggaagttggagggagccagtgctgatgcccagctggtgtgtgggctgtgggcagtgtccattcaattggtcagcccttgacaacctggttgtcgaatgtttaatatcattccatttgtgctcaaatgcctccctagtggagacaggcctggcctctgatgcaggaagtatgggaagttctggttgctgaggctgactgaggctgatggagagagtttcagcaccaacactgcacagtgagcttctgtgtggatagaaggccaggcccgaggcctcttgtctccagagctaaggttagtgctgggttttctcccctgcacacagataccgaaaggcacatgttgttctgctagggatgccaaccaggttgagggcccctaaacatcttgctgaggaggtgcaggcagcaagagggtagcaaagaggggctgctaagcagcggctgcagctggtgtgatgagtagagttttgcaggcaccttgagagaggcctgggaaggcagtcagctaatgctggattctctgagcaaattggggcttatctgggatttgttgtgacatgaacagccttgagcaaaacagtgaagggaacagacccagcttctcattcctgtggggccattcttaagcgctccctgaggcttaagggagccttaagcctcccctgcttctcctcctcctcctcctcccctcctcctcccctgcccccaccagctctgctccccgccaatggaaagcatcctctctcttttccaaggtgccctttcctcatgggggtgactgaggaaactttctaaaaggaagtgatgacaacaccctgatactttccctctcctcccactcccgtcctcagctcaatccccatctgcctgaaccattgctattttataagaggaccctagaagaagcagtgccctcccccaagggggaaagatcctgtaatggaataatttcctgccaggcatcaaaatttatttatttttttatttttggctatagaaggcaaaaacttgttaacctttgcgctgtgtttatttgttcaaataacagcggcaaggaatgaccaagaagatctgaactacagctcctgctggcccctgtctgctgctctctgtctatgtggtgtctttagaacagggaagtgggctgggggaagctgtgttctaccgttcttatttgccttgtacctgtcatagcacttggcatgtggcagaaatagaatggaattgcaaggggacagaggcagcctgtgaggcaaggacccagccctctgacccacaaggtctagcaggcttgctgcatgttaggctgggtttgtattctgggttccaagaaacgcaggaatcatttcctctttctctctttttaattgctatatattagcttagaacaaggtacaaaatttggagattcacaggaacagcacagaagtttaacaatattaataataataaagttctaacacatgacaggaaagtttatctggatcttgaaggcaacagctgatctgcatgcacatttctggagtccagtgattcaggaagaggtcttctctccattgctccatcttgctctttcacaaaggacccctagtccatagcaccataagcccaggacagtgattgcagcatggagaggaatgaagggcccgctagagatggctcctcactctacagggctgatgcttatggggctactatgtcgattcaaattcatttaccagctaagagtgggatcttaaaaatatgattcacggggagaagctctgctagcatacgtttcccaggaagctttccatggatctgcagaacttaaataaacaaaaagtcattcaatcatgggtctcctcttgggcaccctgcccccagtacctgcttcttgcccgaggtgtggctgtgcagaggggctcccctaactgcatcctgagggtgctcccactatgcaccctgtgccaagcctggacacctgagggatctgtgcccaatgctactggagccaaggctgggggtaggcagggtccccgtcgcacatctgcctgtgataggagagcaggagaggcaggctagggcactgcagagacctgtagagctccaccatgagcactgcactgacagcagcccttcatttctgctaaaatctcattgttggaagttcactgctcatattaataatcaacatgagaaaaggtcaagagttccagctttttttttcaggtataattctgcctaagcacttgcaagaagcttgtctaccatgagagggagggaggctgacgtggaaattctcctttaaaaattccaaatttctctttctctctccccctcccgctgactctctccccaacctctctctctccctttcccccctccctccctatttctcccactcttcttctgatgaatgaactaagttgacacatttaacagcccctctttgctactgacctgcccttaagaaccgtatttccaacatgcacacaggctcccgggcagtaccacagtcttcagggctgctaactgagctcgtcctctcaaaggcatcctgcggccctcagcccacttgtccacctctcctagccctaacaacatctgggctgcaacagcctagcacctgccaatatcccagcggtaaggaatgaacccagggcccctccacccgcacctctgcttcctctcaggtggctgtatctgtgcatctctgccacccactgacttcttccttcccttcctctgctccttccctgcctcggcacacctttttcttcttccctctccatctaccaaaaggaggggaaaatcttaaaaacttgagcatggagactgcactaattaaaatttatgggttgtaaaataaatctcttctcactctatcattctgcttatcctacctatttggtcaactgaaggcagctaccttcatataaggttcatataagattcttatttttgaatgtttgctttcctttaaaaacgatcataaagaatatctcccatttctcctgtcaccgcaatcctctttcaccttgctctcttctccctatccttgtgtccacgaatttcctgaacctcattgcttctccccagaaagaatcccatgatataagaattgttacatgacccttagcctaaaactccctccagcagaagtatctggctttaacagaatcttcaaccgccccattccttatg

SEQ ID NO: 95693 - DNA, 20158 bp, Homo sapiens
cttctctgttcaacttgtaaatattgatatgtgtattccaggattcagtccggaaactttccctattatccatgaatattcttataacttatttcgtctagtcatgtgcctttaaaacttattctgtgctactcatgacctctctaggactcaagcacaaggggtgtaattatcctaaaataagccaggagtttagtaagctggccaagaagagggattttccttttcccagcatgagagactgtgcctagtacagctccctgcaaaatgggtggctttctcccctaaaaaaagggaaaccctttgcatgagccccaaggactctagatgctaggcaggtgatttttccagacaatcttgtgaacatctggaacctaaatctagactgtttcacaccaacagcctgtgtgttcctccactgataaagctgcatccttgtgctcacatgataaaaaattataacaagggagactattgttcctacactggaatgcagactcccattgtgagcccagcatttcctgaccatttatgcatcagtattaaataggaggatggagaaatcatgctgtctatttttttgctgatcagtaatctttgtgagctttcctaataccgcttttttttttctgagcatagacaggggactttattggtggtacacgacaaggtggggttccctaggcccctccctcttcagggggtctgcatggaaactgcatggaggggagaatctcagtgtggtgggggactgagtgtggcagggactccccagcagctgagggcctctcttttcctctcatgctctcgcggggctggtggcccagaggtcttactccttggaggctatgtgagccatgaggttcaccatcctgttgctgtacccaaattcattatcatatgagaaaatgagcttaacaaagtggtcactgagggcaatgccagtcccaggattgaaggtggaagagtgggtgtcaatggttaagctggaggaggcaacctggttctcagtgttgcacaggatgcccttatgggggccttctgatgctgcttcaccacctgcttgatgttatcatatttggcatgcttttcctgagggcaggtcaggttcatgaccaacatgttcgtggtggggacctggaatgccatgctagtgatcttcccatgcagctcattgatatacttgcccacagccttgagagtgccagtagatgcaaggatgatgttcctttgagccctgcagctgtcatgccacagtttcacagaggggccgtccacagtcttctgggtggcaatcatagcatttactgtggtcatgagtccttccactaaatcggagttgtcatggatgatcttggccagagatgctaagcagttggtggtacaagaaacactgttgatgatcttgaggctgttgttatatttctcatggttcatacccatcacaaacatggggctgtcagcagaggggttagagatgatgatccatttaactggcccctacaaatgagccacacacttctccatggtagtgaagacgacactggagtctatgatgtacttggtgccagcattgtcctatttgattttggtgggatttagcttttggaagatcgtggtgggatttccattgatgacaagcttcctgttctcagcctttacggtgccatggaattcaccacgggtggaatcatactggaatacatagaccatgtagtatggaatttgtagactatgaaggggtcattgatggtgacaatatccactttaccagttataagtagccttggtaaccaggcaaccaatggggccaaatccattgactctggccttcacccttaccatggtgtctcagggatgcggctggcgctgcacaagaagatgcggctatctgtcgaatgggaggagcagaaagctacagcatattatttaacccatagttatcatattgagaaattcttcacacactctgatgtcaataggtggtgactcgggtgggcaccacttgacatagcaggctgacattccctgagcatgtggacaattcagttgtctcagtgtcacttgtttaaaagacaatctttttccctattgaatttgctattgtcaaaatcaattggccatatgaatttaggccattaacccacacataggcaaaacttccctcaaaataaaataaaggcctaaatttaagggctaaactatacacctcttagaagaaaacatagattattatattcatgatcttgaattaggcaaaaacccaacttttcctggttaaaaaatagttgaaaaatgaaacaggatcaaaactaaaaatgttggcatttaaaagccaccaataagaaaatgaagagataaaccagagactgagaaaaaaaattcaaatcatatatttaatacaggactcatatccagaatatgaaatacacttacaactacgcaacaaaaagataaataacccaattttaaaataggcaaaatatttgaataaccatttcatcaaaaaggtgtaggaatagacaataaaatacatgaaaagatggtcagcatcatcagtcagcagggacatgcaaatcaaaactacagtgagacaccacttcttacccactagaatgctataataaaaaaggacagtaacacctgggggaagtgaaataatgacgtggaaaaactaaaacactcacgcattgttgatgggacatgyagtcacgttggaaaccagtttggcagtatcttaaaatgttgaagatatatttaccatatgacctagcactatcacttctagctatctacccagaagaaaaaaacctatgtccacacaacacatgaatgtgaatattcatagcaactttatccataattgtccataaagtagaaacactcaaatatgtatcaactgataaatgaataaactaatgggagctatccatacaatttaataggatttgtcccctaacaggattaaaatattgatatgtgctgccacatacatgaaccataaaagtatattaaagtaaatgaaagaagacagatacaaaagaccacatattgcatgatttcatttatatggtctccagaaaaggcaaatctgtagagtcagaaagtcaattagaggttgcctggagctggggactgggaaaaagtggtggtgactgatgaacataggggatttcttaggaatgatagaaatgttgcaaaacaggatcatggtgatggtcacacaagtctaaaattttactgaaaataatttaactgcacacttaaaacaagcgaatgttatgtcaattatacctcagtaaagctgtttaaaaacaaaagaaatttagtagtgtggcccccatcagtcttgccctttgtttaatttctcactttctttagggcttttatttatcggttccactcagagactccaagagacactggctgaaatctatcagcctccagaactctcaacagcatagggaatgtctggccccatctgaaaggtgatgggatctgtaaggtgcactctagcatgtgctatagcaggcaaaggtgtgtgatgcacctgggtggttcagatagtgctccacatgtctcagcaagacccagggcctgtagctatcggagaacaagctgctacatcttgcagcacagggccaaccttttctaggcaagtgggtttgaagcattggtagtcaggtcccaagtagcagttgaatgttttcaacatgggaggagggcaagacctagagtggggtttcaaagcaaatcatttgtagaatattacttccaacaactgcagaaagcattcgtttcaagtgtttatgggatgttcaccaacacagaccttttgctgcaccataaaacaagtctcaatatatacacaaggatcaaaatcatacagagtatatgctatggccacagtagtatttaattagaaattcaaaacaataagatatctagaagattcccaatttcagaaaacaagctacatactctgttggtatcggtcacttgggtcaaagacgaactcacaagaaaaaattcaaaacatcattaactgagtgatgataacccgatgcatcaaaatgttggctgcagctgacacagtgcttagagagaaacttacaactttaaatgcctgtagtggaaatgagcaaaggactaaagtcaattatatatgcttttataataagaaccctgaaaaaaaggagtaaaacaacccccaagttaataaacataagctgataataaaaacaaagaaaatcatgaaatagaaaaatgaacaaacaatagagacaatcaatggtcaatccttctgtactccatgaacaaaacttcagttcagaatgattttatatttaaatatatatccagaaccacagagatcttagaagaataaattaagaaaatataggaataaaatgaaaattctgtgggaataaaaatcagaaagtagctgcctaccagggtaaattgggggcaggggagggaattaactaagaacaggcagaaaagaactttctgcagtgaaggaaatgaccaatacattttttgggtgctacttacatgggcatacataactgtcaaggttcatcaaactaaacacgagctctgggcattttagtgaatataaattacacctgattacacctggattttttttttttttcttttttgagacggagtctcactgtgtcgcccaggctggagtgcagtggcgcaatctcagctcactgcaagctccgcctccagggttcacgccattctcctgcctcagcctcctgagtagctgggactacaggcgcccaccaccaggcccagctaagtttttgtatttttagtagagatggggtttcaccgtgttagccagggtggtgttgatctcctgaattcatgatctgcctgcctcggcctcccaaagtgctgggattacaggcatgagccactgcgcctggcctcgatttttttaagtagaggaaagtatcttggagagcttatggtggtgaaatttgggcagttctcaggtatacgctcaaggagcattcacagcatcttcagaaatttgctgagaatggttttgtacccaaaaatatgggaaaagttcaaacatctatgataagagtcattggagcatacaaccacaaatccccactcctgtggtacaggccatatcattaaatggttaacactagatagctttccttcaatggtgttcttcatctaggaacccagagctctctgggggaaaattgcaattgaggttttggatatattgaataggtaagtaagtcacctccgtaaaacttagtgattggagctgtcaccattgcaaatttctaaactttgcaagacagcagcaacatttcaaatgacactcagagagaggagataacgagctaatgtggatttccttccaaacatatttactgcacaaaagcaaagttcacattacacttggagatttctctcagcctagtttaagatcacagattgcggatccccgatatctggtatcaactgaccagtgtcctgttaaggctaaacctaagactctttactgcattgctgccttagaattggacttctcttcctgttcctgggaagaattagagatatagactaaaggtcactattcttctgagaaaagggatgctggaggaggcaggagaaatgagtatgtggcaggagttcaaggggataaggggcaagtcagaagccacggagcataaaggcccagggctcccttaggggatgaagtgacaagcaccctgactcttttgtccagctttaacaatctaacagtaagagcttcttcattttctttcagctactcctggcaatggtggagacatggaatttttgcaaaaaaaatggggtagaggaaaataagacatctgtgtgagtatataaccatttgatctctttttttagccctctccagggtcaccctagaatcagatctgctccccagcatcttctgtttcctggagtgtgttgtctgctactttggattggccatgacaggctggagctgccttgtgacaggagcaggagggtttctgggttagagtatcatcygcctcttggtggaggagaaggagctgaaggagatcagggccttggacaaggccttcagaccggaattgaggaaggaattttctggtaagtaaacttgattcatgggtgtgtggttccattttagacactgcatgggtgcaggaaggtggaccttttctagcaagttacagagaacagtagtcaaatctaagccaatctcacatcgatagtcttaaaaaaaaagaaagaaaagaaaattaaatagtataaaatggcatagtgtgaaagattctggatgggctatccagagactggattstgtccctgacccagaacttgagaggcaaccactttggacaccagcccccttttcttctcatctagaaaatcccacatcagttatttttcttgtctgcaactattttaagttctgaagctttttgtctcggcaattgctttgcaacattcacaaaggacaccatttacctgaagacctcaccagtgggtccctgcctctctagacttccctgagctttgttttgttttgtagcaaccttggcacctttggtgaaggcaaaataaaaggaagtgaagttatagatgagtgtgtaagtgtgtgtgtttgtgtgtgtgagagagagagagcaaaagagagagaaaatgagggggagagaaaatcagagagagagaatgagaaagagaaagaatgcatgagaaagagtgagagagagagggagaggataggagaaagagacagcatcagtgagagagagagagcatgcacaagtgcacagcacagagcagagacagagtaagaggcagtataaggccggatatccctcttttcgatttttcatttatggctttattttttaaccatttgcttctgttgctcaatacccccaagaaattgcagaatttgctgtagcaacttcttgtgcaaataactccatgaggaaagtagaaaaggagtcatatccaactggacaatgaactatcaagatccagaaacataaaacaacttgctaagaccatctggttaatgtgtagcagacctcagaccagagcttcatccagaagcatcatcactttactctggagctgatccttggcaaagtgggtcttcagtctctccctttgcctctctgggtgcccaattccctgtcctcctccccaacccagggggtgggtgaactgtgtgtctacacctgggctctggctgtgcaaagagtcatgccctgccctcagagaagcccctacttgacagcactcagggaccaccacacccaaaattctgctcttcttttgctcttttctgacctcttccaatttcctccaccctctgttttaatggtgtctttcataaacaaatactaacacaagaccaagatgaaatgtttgtaatccttatgtgtcaccaatatttgcaatctaacacctaataccagaaaaaaagcaacgctcagcctagaggaatagttctcctatggtgaaaaggtaggggatataatggatgggcagtagcctgtataaagataaaaacagagaatcctttcagtgttctttctgtgccaggcactgtgctacatgttttgcatgtgctgactcatttgttactcatagcaaccctatgagattgttaatattattatcctcctttctcacagattaggagacagacatagagaggttaattaactcgttgaaagtctcagagttagaatatggcaaagctggatttgaacccagacagtctagtgcggcatctgtgctcttaagcagtagttcacctagcagcttggggaatgagggagctatggctccatccacaaagtcccctttcctggtctctagatccctgtgaactcattaaggaaaagmcttttctcttggctttagacttcttcagctttgaaatggcaattcctttgagccagtctgtctgaagttggcagcaaaggggaagcagaggaagggagcaggaagtgcagaggtggaaatacaaccagagaaaattccactctcaggctgtyacccatgtcctccccagcagcctcttccctgcctcccccatagcatggccttcttggagttgcctggcaataggaaggggctgggagyagacaaaacatggcagaggcattaggagaggaagtggtcccgcctgtatcccaggaaggaattgctccggtcttgaatttttcgctctgaattttactctcactgttctttggcctttgttgccaatttcagttgaactggcttattcttactctttctcagaaaagtttattctaaacagccagtcctgtacctggtgtgcagggtacgaggcttggaggtggagtgggcaagtttgagcctctactagaaacgcgacctttgatctgtcccttaacctctctgaacctcagtttcctcaccagtaaagtgggactcagaaaacctatctcatgagattgctgtaaaaggaaataagcaagctgtgagtcatatgcagattataaagcacaaacaagtgtagtgtatttatccaagcttcatgtaccacagtgttcattgcgtgggctaattccaggtgacaactttactggcagcatcacttcttgtggatttcagaggagcgtgaagacattaaagttttaaccactgccctcagctagacagctggaatatcagttcattggtcgctaactttcagcattgctatctgcttttcaaatctgatgagtttttcatggaaattcctcatttaagcccatcagcaattccctagtaatggctccactctcctcccaattgcccaaggaggaaaccataggggtgattttgtcttctttttctctcagcccagatccagtaggtatcaggaccttcaaggtaaggtctgaaattcaaacctgttttatctctcccctgctctgcttccactgctggaccctgcttccagtcctcatcgaaactttggcacagatactctgattaatatcttaattaccttactttctcatatcccctataccagtccattttatatcctcaagccaatgttgacttcctacatyacaattctgcttctgtttctctgtctctctttttttattaacagggtttggctgtgccaccaaggctggagtgcagaggtatgatctctgctcactgccaccttcacctcctgggccccattcatcctcctgcttcagcctcccgaacagctgggactatgggcaagcaccactacgcctggctaatttttgtgtttttagtagagacggggtttcacgaggctgtccaggctggtcttgacctcctgggtgcaagcaatctgcccacctcagcctcccaaagtgctggaattacaggtgtcagccaccatgctctgcctgtttctctacttattccaaatataaataagggattttctttgacatggtgctggagacccaaaatcatgatcccgcatcaccagcagaattaaattcaaattttccctcttatacccaactctccacagtcaccttactctctttaaatattttagtgagtctcccatgactctagaaatgcttatattccaagcacacctgacagctcattgctcagattacttttcttaaatgagatggggtagaaacagatgtttgctctttcccaataaattgctacatattctgacttctgtgtccctgtttacttgttccttccatggaatgtacaccctccactccaacaccctgactctagccatcctcgaacatctatgtaacaacatctttatcagtttcagaaatcgtttcagaaatcgttctgataacctgaccggtgttcacacagagctccagaacaagaccaagctgacggtgctggaaggagacattctggatgagtcatgcctgaagagagcctgccaggacatgtcggtcatcatccacaccacctccatcatagacatcatcggtgtcactcacagagagtccatcatgaacatcaatgtgaaacgtacagtagcctggggaggagatgaagcaaggtggggaattaaggatcacaaagaaggacaggaagggaaaagaagtctctccactgaacacctgctatgctctggaccaagtgtctttgctgatcactaccaactgggggagttcaaagctgctatcttcagttttttacatgaggaaaccagtgctacagatggcaagtaacttgtccaaggcccccccaggtaagtaagtaaataggagagttagactttaaactcacccctgtgtgactccaaaggctgtggacactctttctatagtggcttcaatcaaaagtcaactaaattccaacttcagactcttgatatccctctatgggacagaatcaaaccttccaggtgccaccatagtcatcattgtgctacacacaagtcaccttgtgcgtaggcttatgataatgaaatgggaaaaattccctcatccccctcaccaggcatgcaatgagggtgtggcttgcttcttcaatgcctcactgctcaaacctctgtgggagcatagagacaggcaggctgtgggactccgacaccatagcagtgtctggggtgaatgtttacagctcctgaagcctcagtgggtgtgtgttacatggtgctcttttagtcttgctcttttagttttgacatctacaggcggcttgttttaaccagctaaattagaccctctaccttgtcggaaggtcagagggctttctgtatcctgggttcttgttttggttaccagagaaattagatcacacctgggcttggagaatgagtgccaggttttgttgagtgaaggtagctctcagcagctgggggatgccagaaggggagggttttcccatggagttggccgttcaactgcccaactcttctccgaccatcccagggaaactccacatcattctgctgggcggtgtgttcctcccaacgtccagctgcccatgtgttcctctgctgatgtgttcctccgttgatgtgcccctcctgacatccagccccttctatcttcttctgccaatctgctcctctcattgtcaggcagtttgtgtgtgtcctgctagggtcttgggggttttataggcagagaattggggcatggcaggccagggtggtcttgggaaatgcaacatttgggcagaaaatgtttgtcctcatctaggtccctgggagtagagccatagccagggaccacaccctccttcacccagcacttcccttcccccctcccatatcatttaaagggaccatgctcttcccttcccagcactcccatatcaagaacattcagagccctcctgcccacctcaaagaagttctctcgagagaattagtaaagttggtccacagaggtctgtcaggactgaattatccagcacatgctttctcacaatattttcttaagaaaaagggtttcccagtgtccagaatacacagtctcttcagctcgccacagggcctgctattacagagccattcccagccaggtgtccaacatgcaccttcattcaatcctcatcccttaaagtcttggtggtctttccgaattgcagctttccaaactactttaaattcagacacattcccttaaggaatctcgtcatgcagtctcaccctctgattcccagagcccagtctcttcagcaccacagcaccccaccactggcctagccctccacattcagtctactctgacaccttttctaaagcaactaattgcttttgggtctccagcaccatctcaaaaaaaaaaaacctttccagtttctacttacgcatacctttaagtacctctacagtgtgaggagggtgttaagagtaaccagtgtttcatttgaattattaactctccacagctcccaacaacaagaaaggtaaaatgacaggggaagtgttagaggcatctgtttcctaaaccattatcactccaagacttagaaaatatttcacaatgttggtcatttcccccttgaaggtaaactacttccgcattttctctgccaccagattaattgttgaaaacatgaggctgtctctccagaaactcaaattccacagagactttaaacagggccaagaataaaaaaaaataagaaaaaataataatcctttgcctaggaaattccttccttcttcaagggaaggcactccgaacacctccatgagctwcrcttccacacagctcaggggaggcggcaaggtcctcccagtacaggtgttaccagcagagggcacactcctctccccagtcctccaccaggctccacaggaaacgccagggcagggtttaaaggaaggtttatcaccccgactttacataaccaggtaaacagagtcacagccagaattggaagcagctttcccagggaatgcacaatcaggaaaagagtgtgggtttccagcatctccccacaagccactgttcgctcaaygactccaggaatggtcctggtgacaaagttttaycagtccactcaaaatgagaaaaataccagcaattgyatgtatattyaacagtatatttaagagtgtatattgcttatatacaaytgtatatgggtgtctgtgtgtgtgatgtaaattcttctactgcccttttttgccaaagaaccaggactgtccatattctcagagtatatcttcctgattttttagtttttcawtaatctgccwttaatggtattgatgtcacattataattttcaacatccttacttggcaaaatataaagtgataaccctaggtcctttgccaaaattaaactacacacacacacacasacacaaaaacacacacacacatccaaacacccaaaagtctagaaattcttgctctccagaatccatatgtcagtttcttttcattttggtgtttttcctatggctgtagcatggcccagtctcagtcagagccacaaaagaatgtacctgagtctgttataaccactgcacttgggagtggagatatgtgcacgtggttggggccccttagggatatttcctgacactgacagaatgcttttcgttggtaggtacccagcttctgttggaggcctgtgtccaagctacagtgccagtcttcatctacaccagtaccccagaggtagccgggcccaattcctacaaggaaatcatccagaacagtcacgaagaagagcctctggaaaacacatggtacgctccatacccacacagcaaaaagcttgctgagaaggctgtgctggcggctaatgggtggactctgaaaaacggtggcaccttgtacacttgtgccttaagaccaatgtttatctatggggaaggaagcccaatcctttctgccggtataaatgaggccctaaacaaccatgggatcctgtcaagtttcagcaagttctccagagtcaacccagtctatattggaaacatggcctgggcccacattctggccttgaggccctgcgggagcccaagaaggccccaagtgtccgaggacagttctactacatctcagatgacatgcctcaccaaagctatgataaccttaattacatcctgagcaaagagttcggcctctgccttgattctagatggagccttcctttatctctgatgtactggattggcttcctgctggaaatagtgagcttcctgctgaggccaatttacacctatcgacacccttcaaccaccacagagtgacattgtcaaatagcgtgttcaccttctcttacaagaaggctcagcaagatctggcatataagccactttacagctgggaggaagccaagaagaatgtacctgagtctgttagaaccgtggagtgggtttcccttgtggactggcacaaggagaccgtgaagtccaagactcagcgatttaaggatgacagagatgtgcatgtgggtattgttaggtgatgtcatcaagctccatcctcctggcttcatacagaaggtgacaatggcacaakcccaggtcctgttgtctccctttcacacaatgcccaacttattgtcttcctcatgtcatcaaaacctgcccattccctggctcaaccaggagctttctgtcctaatcatataccagaggaaatacaatgtgatttgctttttccaaatctcagtggctcattctgaacaattgtggtctctctctctttttttttttttcctttgagacagagtctggctctgtcccccaggctggagtgcagtggcgcaatctctgctcactgcaagctccgcctcccaggttcacaccattctcctgcctcagcccccccgagcagctgggactacaggcacctgccaccacgcccagctaattttttgtatttttagtagagacggggtttcaccgtgttagccaggatggtatcaatctcctgacctcgtggtctgcctgcctcggcctcccaaagtgctgggattacaggcgtgagccaccgcgcccggcttgtggtctcttttaacttgagggtcgcttttaactactagagctccatttctcctcttaaatgagaaaggatttcatttcttttcttttaaatctcctatttcttcacgcagttcaatgtaaagagcaataaatgttttaatgcctaacctggagggaggcgtggtttctgttaatacatactttccttgttccttttcatttccaggtatcaccatcttttacctaggagagtagcatggagctggggatgaggggtgggcagagtagtgggagggtcaggaagggcgatgaagactgaataagctctactatgtttcaggcgtgtacaacatgacctacatatgacatatattccctcactgaatactcatcagaaacctatcacgaggggtgactattcccattttaccggtgaggaaacttgttcacagtcacactaactgattaatggctaggccttctaaaaggcagttgaccttgaaagtccttatctttccacggaatcacacagcctgaactggtcttgtcagtggtacagcagaacactggagcatggggtgctgatactttggagggccccagcttttttgggttacctctttcttgcccagtcgcacgcaggggattctctagaacccaggagaatccctgaggggcatctgaaagagattgcacgcctttcctaatggccccgagcagggctgaaagaaacaaaaacgcattcagcctctaccagcttcggtgccaatttcctagaaggtctctagaacactcctggctatatgtgtgttggccattctgatcatacataaccctgcatttcaccctttcaaatcacacaatgagccacaccatgggttcctgggcaagtaaagaaaacaagtgtgaacttctcccaaaatataccttctactcagcccaaaattagaagtctattatcccacatccccagatttaactgcctctctctctcctttctcctcttctttaaatcacatactttcttcctttattcttccatatccttaggctctttcttccctccatctcctctttaatcactggttctctcattcttctcaatttccctgaagagaggaggccaatcaagacaagtttggggacttcagtgatgacacagtcattaaccaatcaatgaaaacacactcaaaagaaacactgtcaggggcgtcagggacagagttgaactgaagcaggtgaggaggttgctatgggtccagagtgtggagatggaagctgtctccctctggacctttgtgtatcacagccatgatgagagtcacatccaacatcaaaatgacttctttcttacacaggaaatttacagatcattaatcagttgaatttgattaccacaatggagttagtttcagtgttcattctgaagagaaaagggaaccacattctggcccagatgaacaggtttccaccaccttcaaaaccccaaggaacagatgatcagcactagcatcaggggcgagtggctccaggcagtggggtaaggtgaaaaatgcaacacccctccttccccagccaccgcacaaaatgcaagagccagcatctctccagctcttgtaaggcgtgcgcacgatccatatgttaatgccaagtaccacgggaatcaacggagggtggtggaatcagggacaagagcccttcccctggtttttcagcctagtgaaaccctacacttaggaaaccaccagggcaattttcacagggaaatgaaggaaaatgacagatctccgacgggcagcgaggggagttcaaagaaagagacgagggggccggatgagtcaacagtctcaactgaacaagcacaaacgcctcgcagtgttgtggccaacaaaatttgccatcccttcttacacctgagagtgccaagcaggtaaagctcctgcaccaagccccgctgcacctcacgtggtgcaccacacgggggcagcaaaggctaagagggaagaacaaggaagcctgacctggccgggatttttgggtcctttttctccacctgggtggctctgcagggtacctgacaaaggattgaataaaagcacaggcaaatgctcaaccaccggcttaagggctaggtgtatatgagtactgagaatggagctgagccgaagtcactgggaaaagccacaggagccagtggggcttgaatgaggccttgaattcctcagtccaggcagtgggcacagaccgagcagtggtgcagaggaggatggaggggcatgaggaggcccctcgccttctggaaagcatgtacagagggcagatgagagagctcgggtgccagactaagccacagactagacaggcaggttccaagggccaggatgggccagagcctgtgatggactggtgagaaccggcaggaaagtgaccattatgatgtgaaatcccgtgatttctaaatattagtgactaactctaaatttgaaaaagcagtgtgaagatctgctccaggagagggatgtgtgggctagtgttccaactgtatgtgcaataatttatatcttaaaaagtgggtggcgaggtgtcagcagcaaatctattcattcttggcgataagtcccaaatatacattattatatcatactctcagctttcctgtatgtttaacataggttataattttttaataaattaaatttggtggggaacaaatatgcaaactaagaaaacacactcacagcctggccccaggattaaggcctccgattttccacttctgctcccagtctagtggtccagtgcgggagataaaataggagacgtgttaggtgcagtgcacagtaaatgtgaagagtgccataagaaaggaaaatgcttccgggagatccattcccataggggattcatggagtccttgcatttgggctaaatatcagaagatgggtaggatttcaacagacaggaatgtgagggaaagtattccaggtggagacaatggagtctgcaaagacccaggtgggaaaggggtcacttttagggaacaatgagaccagaccagagagcaccacgccaaggcagaaatggaagatacacctggaaagacatgatgggcacacacaggatcacccggggccacccctggagacgacctgcctgcttccttcactgacctcagagtaggagttctgtgtccccattaaagacgacttgggctgggcacagtggttcacgcctgtaatcccagcaccttgggaggctgaggcagatggatcacctgaggtcaggggttcgagaccagcctggccaacatggcgaaagcccgtctctactaaaaatacaaaaaattagccaggcaaggtgttggcgcctgtaatcccagctacttgggagtctgaggcaggagaattgcttgaatccaggaggctgaggtttcagtgagccaagactgcactattgtactccagcctgggtaacagagtgagactctgtctcaaaaaaaaaaaaaaaaaaaaaaaaaaagacaacttgacattcaattactccacacatacaacatgcctcatgttctctcaaaaattggaatctatgggaaaagaatgtctcctctagctatgaatattgatggtgatgctaaaagctgggacatcattcactctgcaatgggaattgttcagctgtccctggaagattaccttggcagcacgttgtaggatggactgaaagagatgaagaggatacttgaagaatctaggtaagaaacgaaggcctgatttatgggttggtaacaaaacagaatacaggggcaactgcggcaggcctgagatagaatggccgctagtttagacaggactgggtattggcacagaattcccaagcacacactttctcaagccagaaacctggatggcagccccccactccgcccacctatcattcagcgctaccaactttacctccacaacacctcttgaatgtgtcatcttcctccctggtaacatcattcctactcgtacccccaacaggcctccttgtcttggagagtcacccatgaaacctatcctcagcagtgttgccagagttctctccaaactagtctcaccatgtcacgccctttcttaaaaccaaccacgagggggagccccaggactgtcagggtgagcctgtgagccttagcataacagagggcctctgaagacctgagccctgcctgacactccagactaattctcatcaatccctgccctatccccagattctcctactttgtgcctcaacaactttccaaactcagcgcttcctgcatgcagcatgcttttacatctacccaggccagtgcactgcgttccttcggcttagagggtgccaagctctcctgccagtgcatccttcccagctccttattcaccatccaaagcatctctttttacagcctccatgctttgtgcatagtaccactgccattaatttttcatttatatatcctgttccccacccctatactgccgtgtccaaaggacagtaactcaccatgtcatctctctgtccccagtgactgacacaaaatagacacatgggctgatggatggaaggatgaaacacaagcaaactcaactgctaggatggagacaggagggatggagagtcagggagcagaatgctttgagtgacaaagcaagaaagaatgcaaagatgaattttcacggtgttgatgaacctgaagaagctggatcatcatgatgagagatgggaaagagataagccacatagtgggtatggtgctgagaatgaactcatttgtgtgatatgaagagtgagtggggttgtgagaggcccatgagcagggaaagggaaaggctgatgaaggcgaagcccagctgccaaggttataaagggactgggaattagatccaaaacctgaaatggtgcaaggcccagagcatttttatactacaaaaaaaggaaaagctgcttttgaaaawtgaattcagaagagaatctcccactcttagttgactcaagtgaggaccacgcaacctctctgtctacatgtgcttcttaagacatcaagggactctggtggaaatttgaggggcgttctttttctttatcttggcccaagatcccacccaatggtaatgagcagggaatggggtcggtgatctgaggcatgaaagaggttcattatgaggaagtggagagggaaggctggatgaaaagaaagtggcttagccactctgtccccaaaggcagggagcactgaggtcagttgcagactccaaaacagtcagtaatctgttctggaaacctgaagttccttattgaacagcgcaatctttcctcaagacatggaagaaccagcactgatgcagtcagcccttcttccaaaacaggtactggcgacagagaggtgggcgtgagatggactccgggcctattgccatcttagcatgaacgctggccactgaagtaggaatacccttctcacgagcctggcactaactccctcctgcaccagctggagtctgtcaaatccctggtgtagctctgagcagagcagctctctgggcacaaggccggtgaggtcacccagggcctgtgcttggcttaaggggctgccatgggaccccacatttcattttgcactgatccctgtaaaatatgcagtgaattctgatta

SEQ ID NO: 95694 - DNA, 19239 bp, Homo sapiens
cctaatccagcagctcaatcatgttaccaaggacctctttccaccactccactgtgccttccatggttttaccttcatcttaaggctggcttccattgtgggtacaagatggctgcccacagttacaatggctgtgtgcttctttatgtgttgtccgcagagttggttcccttagccatcaaatacttcagacagagagcttcactgattggacctccctaggtcacaagcccaccatggaaaccagggcaatggcggccctctgaaggccacgtcaggtactgtgaaccttatcctaagggcaatgggaaaccattgaaaggccttaaacagggagtgagatcatcagatgtgccattttagaaacatcactctggttggctggactcagcaagacccatcaggaggcagttgcagtcatccaggtaagaggtgacgaaagtatgagccaagatgaaaaatgtagatgaaaaatttagaaggtagaatccatagggcatggttattgaatgctagggtgaaggaaaagatgaaagtagagatggtaccaggtttctggcttctaggtggagggtggtgctattcactgaaggaggatgaaaaggagatttgcggggaagacaaattcaacctggggcctgttaaacttgaaatacttgtgggacatccaagtggagatgtcttgggtcttgtctattaggcagatggttatgggtctggcatggggagagagtccagcctgggaatacttgggtgtcatcaatttataggagccatgggagtggatgacacggccttgcaaagataagtagcaggataagggcaaaagcatgagagtcttcaatacgaactcatcccttctcatcctgtgcgtccacgtcagttcccctgcactgatggtggactaaatggtggccccatataaagacatgtccatgtcctaatccccaagacctgtatatgtgaccttgttgggaaaaagggtctttgcagacataattagttaaggatcttgagatgagatcattctggattatgttggtaggccctaaatccaatgacaagtgtctcagtgagagacacccagtggagacacaggggcaagagaaggccatgtgaagttggagtaatgcagctacaagtcaaggaatgcctggagccgccagaagctagaagaggcaaggaaggattcttccccagagccttcagagagagtccagtcctgtcaaaaccttgatttcagactctggcctccagaactgtgaaaaaatccatttctgttgttttaagctacccacttggtggtaatttgttacagcagcccttggaaatgaatatagatggggaggtagccagaactacaagtcagcctcaaggttctacaaggaatttgatcagtctttgcccccaagctatggcttgggagagggagcattttcccttctaccccaccagtgaatagtttcctcctctgccatgctgggataggcagagacatgttttagtaacatgacccctcagtgtttgaaaacacaaaccctcatgagcaaacacttggcctataataaccacagagaggtcctgatccaggtgtggggtgccctggtcagtcagtcctgagtatactctgtcccaacccggggagactcaggaaacaataactcaaacctgtttgagggtttggcagactcccagcatgatccagggtcagagtccacattctccactcagaccagagacgagagagacagagaaacagagccatagggaatcgcatttgaaaaatgagtgagctgtaacagagagctggattagtcgttaccacattctgtcttgtataggcccatccaattcagatattaccatgtacttccatatgtcaggggccaagcaagttccaagctaatgacagagctgaccaagacaatcagctggccatccagagtgtaccctggaccacactgccatggagagctctgaatttggctccagaaatggcaccctagaatcttaggctgactacatctgaggttgaccatttggaggacagctgttattcagtcatatatattttgttgtacaatatgacagtcatccgacaacacagatgatttggagtgccacaaaaatgtggtgttgggccaggcatggtggctcacgcctataatcccaactcttttggaggctgaggttggaggatcacttgaggtcagaggatcacttgaggtcaagagttcaagaccaacctgggcaatatagcgaaaccccatctctacaaaacaaataaaaaaattagccaggggtggtggcttgtgcctgtggtcctagctactcaggaggctgaggcagggggatcacttgagcctaggagatcaagcctgcagtgagctatgacgccactgtactccagtctgggtgacagagtaagaccttgtctcaaaaataataataatgtaaaaagttatgtcatgtttatgggatagttgtggacatgcacaggtcattgacaatgagctccttgagggcagagaatatatcttagtcaatttggtatttctcaagcatctggcaaggtaatctgcaaaaagaaaatgctcaataatggctgttgaataaaagactgactcaatcaagtacggaccctgcccttatggagctgaaggccgttagagcagataaaatgagttatcacccttatatgagttagacggtggacaaggttattattgagggcaggcaaagaactgggttggctcaaagatgccagggatcttttccagactagtggtagagggttggttaaggagtttcctgaaggaggtggcctttcatctgagtttcaaagaacagaagggattagacagggaggacagtaaaatttttttttttttttgaaacagtctcgctttgtcgcccaggctggagtgcagtggcgcgatcttggcttactacaagctttgcctcctgggttcacgccattctcctgcctcagcctcctgagtagctgggactacaggcggccgccaccacgcccggctaatttttttttttttttttttcagtagagacggggtttcactatgttagcgacgatttttgtctgtttgtttgtttttgagacagagtctcactctgtcgatcaggctggagtgcagtggcgcgatctcggctcactgcaacctctgcctcccaggttcaagtgattctcctgcctcagcctcctgagtagctgagattacaggtgcctgccaccatgcccagctaatttttgtatttttagtagagacggggtttcaccatgttggccaggctggtctcgaactcctgacctcaggtgatctgcacacctcggcctcccaaagtgctggtattagaggcatgagccactgcacctggccagtaaaactatttgtgacacagcagcaagtgcacaagcactgacctatcagagttgaaggtggctgaggcactcaagtgggctcctggggactctgttatgccagggaatacctctttagataagggatcaggaggtctggagggtccctaaggaagagctagggtagcaggggtaccctggagctaggggccatggctatatgccaacaggattagaaatatcttaatgtatttaattaacctacacaaccatattggtgggtgcctactgaatattagccctagatatggacctgaaatggccttattctcttktagtttgtttaagccaatggagccttactagaatgtgagctacaaaacagtagagctattctctattcaatgctgcatctgtagggcctagaacagcacctgaaggactggcggaggcttaataaattgttaaaagggcagactagccaggtgtgatggcgtgtgcctgtagtcccagctacttgggaggctgaggcaggaggatcacttgatcccaggatttctgggctgtagtgtagtataccagtcaggtgtctgcactaagttctgcatcaacctggttgcctaaggatggttgaactgacccaggtggaaattggagcaggtcaaaactcaatgctgatcagtaacagggtcgcacctgtaaatagccaccgccctccagcctgggcaacacagtgagatcccatctctaaaataaattttaaaaataattaattagaaaaaaaaaccagcctgtaatcccagcactttgggaggccaaggcgggcagatcacctgaggtcaggagttcaagacaagcctggccaacatggcaaaaccccaatctctaccaaaaatacaaaaattagctgggcgtggtggcaggtgcctgtagtcccagctacccaggaggctgaggcaagagaatcgcttgaacctgggaggtggagattgcagtgggccgagatcgcgccacttcactccagcctgggtagcagagtgcgactctgtctcaaaaaaaaaaaaaaagaaagaaaagaaaagaaaaagaaaagaaaagaaaaaaactgggaggcctaagcccattcttggtgtcctcacactcttctgccccatctccttgcacccagtcttcccctgcaatctgtgctccatactagccctcaagccctcaacgtgacctagtatgagaactggattctgtcactctcctgctcataatattttatgccttccctttgcccagaatatcattctccctattgtttttaccaatggaactggtatttcttcaaggacatgatcaaatttgcctacttctatattatcttctaaagcagaattcatctctcttccctcaatatgatgatattgacagggtttgccctcactcactagattgtgagctgctcagggcaggtagcgttttttgtttttgtttttgtttttcttttttgagacagggtcttgctctgtcacccaggccagagtgcaatggtacagtctcagctcactgcagcctcaaccgcctcggctcaaaccatcatcccatttcagcctcctgagtagctgggactacaggcacatgccattacacctggctaatttttttgtatttctagtagagacagggtttggccatgttgcccgggctggtctcgaactcctggactcaagcaatccacccacctcagcctcccaaaatgagggaccgtgtcttattcatttccatgtccctagtccatagcccagtgctggacctatggtagtactaaataaatatttgttgaatgcaatagtaaatagcatttcagggagcaagaactagattaacaaaggtggtaaaaggtttggagaaaaaaataatagtttaatttggctagagtatgagggagagtagtaggagacaagatggaaaggtctcttgggcaaggttttgaaggaagttggaagtcagaagtacacaatgtgcatatcgtggcaggcagtggggagccaatgaaggcttttgagcaggagagtaatgtgttgaaaaataaatataggttaaacctatcagagcccctctgacacatacacttgcttttcattcaagctcaagtttgtctcccacatacccattacttaactcaccctcgggctcccctagcagcctgccctacctctttacctgcttcctggtggagtcagggatgtatacatgagctgctttccctctcagccagaggacatgggggccccagctcccctgcctttccccttctgtgcctggagctgggaagcaggccagggttagctgaggctggctggcaagcagctgggtggtgccagggagagcctgcatagtgccaggtggtgccttgggttccaagctgagtccatggccccgataaccttctgcctgtgcacacacctgcccctcactccacccccatcctagctttggtatggggkagagggcacagggccagacaaacctgtgagactttggctccatctctgcaaaagggcgctctgtgagtcagcctgctcccctccaggcttgctcctcccccacccarctctcgtttccaatgcacgtacagcccgtacacaccgtgtgctgggacaccccacagtcagccgcatggctcccctgtgccccagcccctggctccctctgttgatcccggcccctgctccaggcctcactgtgcaactgctgctgtcactgctgcttctgrtgcctgtccatccccagaggttgccccggatgcaggaggattcccccytgggaggaggctcttctggggaagatgacccactgggcgaggaggatctgcccagtgaagaggattcacccagagaggaggatccacccggagaggaggatctacctggagaggaggatctacctggagaggaggatctacctgaagttaagcctaaatcagaagaagagggctccctgaagttagaggatctacctactgttgaggctcctggagatcctcaagaaccccagaataatgcccacagggacaaagaaggtaagtggtcatcaatctccaaatccaggttccaggaggttcatgactcccctcccataccccagcctaggctctgttcactcagggaaggaggggagactgtactccccacagaagcccttccagaggtcccataccaatatccccatccccactctcggaggtagaaagggacagatgtggagagaaaataaaaagggtgcaaaaggagagaggtgagctggatgagatgggagagaagggggaggctggagaagagaaagggatgagaactgcagatgagagaaaaaatgtgcagacagaggaaaaaaataggtggagaaggagagtcagagagtttgaggggaagagaaaaggaaagcttgggaggtgaagtgggtaccagagacaagcaagaagagctggtagaagtcatctcatcttaggctacaatgaggaaattgagacctaggaagaagggacacagcaggtagagaaacgtggcttcttgactcccaagccaggaatttggggaaaggggttggagaccatacaaggcagagggatgagtggggagaagaaagaagggagaaaggaaagatggtgtactcactcatttgggactcaggactgaagtgcccactcactttttttttttttttttttgagacaaactttcacttttgttgcccaggctggagtgcaatggcgcgatctcggctcactgcaacctccacctcccgggttcaagtgattctcctgcctcagcctctagccaagtagctgcgattacaggcatgcgccaccacgcccggctaatttttgtatttttagtagagacggggtttcgccatgttggtcaggctggtctcgaactcctgatctcaggtgatccaaccaccctggcctcccaaagtgctgggattataggcgtgagccacagcgcctggcctgaagcagccactcacttttacagaccctaagacaatgattgcaagctggtaggattgctgtttggcccacccagctgcggtgttgagtttgggtgcggtctcctgtgctttgcacctggcccgcttaaggcatttgttacccgtaatgctcctgtaaggcatctgcgtttgtgacatcgttttggtcgccaggaagggattggggctctaagcttgagcggttcatccttttcatttatacaggggatgaccagagtcattggcgctatggaggtgagacacccacccgctgcacagacccaatctgggaacccagctctgtggatctcccctacagccgtccctgaacactggtcccgggcgtcccacccgccgcccaccgtcccaccccctcaccttttctacccgggttccctaagttcctgacctaggcgtcagacttcctcactatactctcccaccccaggcgacccgccctggccccgggtgtccccagcctgcgcgggccgcttccagtccccggtggatatccgcccccagctcgccgccttctgcccggcsctgcgccccctggaactcctgggcttccagctcccgccgctcccagaactgcgcctgcgcaacaatggccacagtggtgagggggtctccccgccgagacttggggatrgggcggggcgcagggaagggaaccgtcgcggcagtgcctgcccgggggttgggctggccctaccgggcggggccggctcacttgcctctccctacgcagtgcaactgaccctgcctcctgggctagagatggctctgggtcccgggcgggagtaccgggctctgcagctgcatctgcactggggggctgcaggtcgtccgggctcggagcacactgtggaaggccaccgtttccctgccgaggtgagcgcggagctggccgagaaggggcaaaggagcggggcggassggggccagagacgtggccctctcctaccctcgtgtccttttcagatccacgtggttcacctcagcaccgcctttgccagagttgacgaggccttggggcgcccgggaggcctggccgtgttggccgcctttctggaggtaccagatcctggacaccccctactccccgctttcccatcccatgctcctcccggactctatcgtggagccagagaccccatcccagcaagctcactcaggcccctggctgacaaactcattcacgcactgtttgttcatttaacacccactgtgaaccaggcaccagcccccaacaaggattctgaagctgtaggtccttgcctctaaggagcccacarccagtgggggaggctgacatgacagacacataggaaggacatagtaaagatggtggtcacagaggaggtgacacttaaagccttcactggtagaaaagaaaaggaggtgttcattgcagaggaaacagaatgtgcaaagactcagaatatggcctatttagggaatggctacatacaccatgattagaggaggccagtaaagggaagggatggtgagatgcctgctaggttcactcactcacttttatttatttatttatttttttgacagtctctctgtcgcccaggctggagtgcagtggtgtgatcttgggtcactgcaacttccgcctcccgggttcaagggattctcctgcctcagcttcctgagtagctggggttacaggtgtgtgccaccatgcccagctaatttttttttgtatttttagtagacagggtttcaccatgttggtcaggctggtctcaaactcctggcctcaagtgatccgcctgactcagcctaccaaagtgctgattacaagtgtgagccaccgtgcccagccacactcactgattctttaatgccagccacacagcacaaagttcagagaaatgcctccatcatagcatgtcaatatgttcatactcttaggttcatratgttcttaacattaggttcataagcaaaataagaaaaaagaataataaataaaagaagtggcatgtcaggacctcacctgaaaagccaaacacagaatcatgaaggtgaatgcagaggtgacaccaacacaaaggtgtatatatggtttcctgtggggagtaygtacggaggcagcagtgagtgagactgcaaacgtcagaagggcacgggtcactgagagcctagtatcctagtaaagtgggctctctccctctctctccagcttgtcattgaaaaccagtccaccaagcttgttggttcgcacagcaagagtacatagagtttgaaataatacataggattttaagagggagacactgtctctaaaaaaaaaaacaacagcaacaacaaaaagcaacaaccattacaattttatgttccctcagcattctcagagctgaggaatgggagaggwctatgggaacccccttcatgttccggccttcagccatggccctggatacatgcactcatctgtcttacaatgtcatcccccaggagggcccggaagaaaacagtgcctatgagcagttgctgtctcgcttggaagaaatcgctgaggaaggtcagtttgttggtctggccactaatctctgtggcctagttcataaagaatcaccctttggagcttcaggtctgaggctggagatgggctccctccagtgcaggagggattgaagcatgagccagcgctcatcttgataataaccatgaagctgacagacacagttacccgcaaacggctgcctacagattgaaaaccaagcaaaaaccgccgggcacggtggctcacgcctgtaatcccagcactttgggaggccaaggcaggtggatcacgaggtcaagagatcaagaccatcctggccaacatggtgaaaccccatctctactaaaaatacgaaaaaatagccaggcgtggtggcgggtgcctgtaatcccagctactcgggaggctgaggcaggagaatggcatgaacccgggaggcagaagttgcagtgagccgagatcgtgccactgcactccagcctgggcaacagagcgagactcttgtctcaaaaaaaaaaaaaaaaaagaaaaccaagcaaaaaccaaaatgagacaaaaaaaacaagaccaaaaaatggtgtttggaattgtcaaggtcaagtctggagagctaaactttttctgagaactgtttatctttaataagcatcaaatattttaactttgtaaatacttttgttggaaatcgttctcttcttagtcactcttgggtcattttaaatctcacttactctactagaccttttaggtttctgctagactaggtagaactctgcctttgcatttcttgtgtctgttttgtatagttatcaatattcatatttatttacaagttattcagatcattttttcttttcttttttttttttttttttttacatctttagtagagacagggtttcaccatattggccaggctgctctcaaactcctgaccttgtgatccaccagcctcggcctcccaaagtgctgggattcattttttctttttaatttgctctgggcttaaacttgtggcccagcactttatgatggtacacagagttaagagtgtagactcagacggtctttcttctttccttctcttccttcctcccttccctcccaccttcccttctctccttcctttctttcttcctctcttgcttcctcaggcctcttccagttgctccaaagccctgtacttttttttgagttacgtcttatgggaagggcctgcacttagygaagaagyggtctcagagttgagttaccttggcttctgggaggtgaaactgtatccctataccctgaagctttaagggggtgcaatgtagatgagaccccaacatagatcctcttcacaggctcagagactcaggtcccaggactggacatatctgcactcctgccctctgacttcagcygctacttccratatgaggggtctctgactacaccgccctgtgcccagggtgtcatctggactgtgtttaaccagacagtgatgctgagtgctaagcaggtgggcctggggtgtgtgtggacacagtgggtgcgggggaaagaggatgtaagatgagatgagaaacaggagaagaaagaaatcaaggctgggctctgtggcttacgcctataatcccaccacgttgggaggctgaggtgggagaatggtttgagcccaggagttcaagacaaggcggggcaacatagtgtgaccccatctctaccaaaaaaaccccaacaaaaccaaaaatagccgggcatggtggtatgygcctagtcccagctactcaaggaggctgaggtgggaagatcgcttgattccaggagtttgagactgcagtgagctatgatcccaccactgcctaccatctttaggatacatttatttatttataaaagaaatcaagaggctggatggggaatacaggagctggagggtggagccctgaggtgctggttgtgagctggcctgggacccttgtttcctgtcatgccatgaacccacccacactgtccactgacctccctagctccacaccctctctgacaccctgtggggacctggtgactctcggctacagctgaacttccgagcgacgcagcctttgaatgggcgagtgattgaggcctccttccctgctggagtggacagcagtcctcgggctgctgagccaggtacagctttgtctggtttccccccagccagtagtcccttatcctcccatgtgtgtgccagtgtctgtcattggtggtcacagcccgcctctcacatctcctttttctctccagtccagctgaattcctgcctggctgctggtgagtctgcccctcctcttggtcctgatgccaggagactcctcagcaccattcagccccagggctgctcaggaccgcctctgctccctctccttttctgcagaacagaccccaaccccaatattagagaggcagatcatggtggggattcccccattgtccccagaggctaattgattagaatgaagcttgagaaatctsccagcatccctctcgcaaaasaatccccccccyttttttaaagatagggtctcactctgttgcccaggctggggtgttgtggcacgatcatagctcactgcagcctcgaactcctaggctcaggcaatcctttcaccttagcttctcaaagcactgggactgtaggcatgagccactgtgcctggccccaaacrgcccttttacttggcttttaggaagcaaaaacrgtgcttatcttaccccttctcgtgtatccaccctcatcccttggctggcctcttctggagactgaggcactaggggctgcctgagaactcggggcaggggtggtggagtgcactgaggcaggtgttgaggaactctgcagacccctcttccttcccaaagcagccctctctgctctccatcgcaggtgacatcctagccctggtttttggcctcctttttgctgtcaccagcgtcgcgttccttgtgcagatgagaaggcagcacaggtattacactgaccctttcttcaggcacaagcttcccccacccttgtggagtcacttcatgcaaagcgcatgcaaatgagctgctcctgggccagttttctrattagcctttcctgttgtgtacacacagaaggggaaccaaagggggtgtgagctaccgcccagcagaggtagccgagactggagcctagaggctggatcttggagaatgtgagaagccagccagaggcatctgagggggagccggtaactgtcctgtcctgctcattatgccacttccttttaactgcmaagaaattttttaaaataaatatttataataaaatatgtgttagtcacctttgttccccaaatcagaaggatggtatttgaatttcctattactgttattagcacgaatttagtggtaatgcatttattctattacagttcggaggtcagcagtcagatgtcagtagggcttgttcctccttccacacatcactccaatctcttgctcccattgtcacaactcctacctccacatttgacctccttgtctcctcaagaacccttgggattacactgggcctaactagataaccaaggataatcatcccatctcaaaatcttaatcaccaagtttcttcccatgtaagataagaacaatgcacaggattagaacatggacatctttggagaaggggaattattctgcctaccacagatgctatcaggaagaggacagaaatgactgatactgttgggatggctgtgtgtgtgtgtgtgtttgtgtgtgtgtgcagtgtatgtgttgaggggtagggcagacagcagccctaggcttaacatcacactcaggcttttgggttttcaccctgctcaaggaaaatgtgtcacttcttgcagtttttgcttcaggacgtgctgtctggcccagctggctgctggaacagggcggtgctatggatggcagctcctctgcctgtagggcacaaggcccacgatgtcccccagtcctgtcagactccctgcttcacagagcctgttcacagcccctcctcaatgagcccaggccctccatcccagtttcccctgaaaaggaagtcccaatgcagagcaaggacccaggccctgctcattcaggggtccctcaaactccattgccaacaccaaagaaaggattaaagggccttgagaggctagtaacatcagttttattgggttggggtggcaaccatagcctggctgggggtggggctggccctcacaggttgttgagttccagcagggtctggtccaaggtctggtgaatctcgacgttctcctccttggcactggccaaggtctctgtgaggggaagcagcaggtgagggagaagggagacacaagggggagacgtggggaggcagggccaggggaaggtgacatatagacatggagtcggtcaaggaagacacatgcattcacggacctcagggccccatggcagggacaaacagatggactgactaggatgaggggaacaggacggacgtggatgcctcactcaaggccttggggtcatagaggtggggtggggagggctgagtcataaactactttatcctcttctttagaaggtttaaggaagttggagacagaaggtaagacaaagactgcgccaggaaaggaagggccagacagacagacttgaggtagaaaacagacctgctgctgcagtgaaagccccatgttgstgatatccaacatttttccaagctccattccagaccttttgcaaccttcttgcccctgtcctgcacctcaccaccctacttcctttccagtcactctgtttgatcctggaaccccagctaagtgctctgaggtcagggattggcaccagaggcggtcatggtttgatggggccacacgtgcccacatgcagtggtgaatcagagagcgacagccagggagtgcctgtgcagaggggtttcagcgtgggccatggtgttttgtgggtgggctcagtgcaggggctgggggtgtcagtaagtgccagggtgtcaggagtgaaccagtgctccgtggtggcgatagaggtgctctctggagggcaggaaaacagcatggagaccaagttcagaatttattaagcagcaaaggagggtggaaggggataggtaaaggatgaagccagtgccagagtgggtggtgggcatgatgggggctctccytaggctgctcccagcctggctgtgcaatgttggcaatttctgctcctcctgcctgctcccctccccatagagagaatggaaaggagaggagagaagagagctgaggtggccacgctggcgtggggctcagagggaggtgatgtcattgagtgcgttgtccagttyctcgctaatggccttgtacttcatcttctgggcatagacttcatctggggggggtccagggaggggaccaggtgggagtgtgggaaagggagtggagggaaagaggaaaggaaggagagagagcaatggaaagaaaaacagaatcagaggtacacaaagacagagtgagagagggaggccagggaacaggctggacagctgtcaggaactccttctccccatctctaccccatctcttttctgtccttctctgtaccccaaattggctctacccatggcagctcctgcctctccagggagctgtgtgtacaatgctctcgacaagcaggagtgcttgcttagaggggagagggagggtgctggagccagaaagggcaaacctcctaaagctggaggtaaaattggagcttgcctgagaaggctggaagcgagagaagtgggaaagtgaaagggttatcacagaataaaaaggaaaggcaactttagccacatcatcattaacaatagaaatagccacagactcacaaatatctggatgtttgcttttgtcaaatctagcttaaaatagtgttttctattagtgctgtcatgcagacctagatgttcagtccaacagctctctagttaataagccagtctctgcactagaactctactgcgttacactcggggacggaattgtctatatgggtgccactcagagtgtggcatgaggaccagcagcattggcagtaccagagaactagctagaaatgtaaatcctccagcccaaagtcagcaatctctttggggcagagtcaaggaatctgtttttaaaactctcccagtgattctcatgcatgctgaagtttgagaagcactggagttgttgcgccgtgggcagctacaattacttgaattgtagacatggcccacagagttggggagttggtagggtcctaggtggcccaaccctagtttattggtggcaaataaaatgggatgagaaggtacaggacagactgataatcacggcaggtgtggacctacttataaaggcttcttttaccttctaggtcatcgatggttttctccaactttgccacagacctctcggcaaactctgctcgggtctcagcctgggggtaaaggcaggatgggagaaatggcaaagaattaggccctcccacagactactgcctaagtcaagcttcttgtccatcccaaccctcaagtgtcctgccacaggccgtctctggcaaggattagggtggcttgaggggagactgggaactggaagaggactctcacctccttcagcttctcctccaacagtttgatctcctcttcatatttatcttctttggtggaatacttttggggacacacacacgccatcagtacagcgctaccacagatccttcatttctccattgtaccccgtaggctcctggtcatcttgcctccgttgaacacccagcccctccctgccttgggcccctcacctccctcccctgtgggaccccatcctcactgcccctctgctcccctctaccttgtccgcctgggcctccagggatttcaagttgttggtaacaattttcagctcctcctctaggtccccacatttactgcagggggtgtgtggcgggggggggcagggtgtgagggcacagcgaagccagacagtggagatggcacagcaggggacgggtggaggagagaagagaagagcaaagttgtgagagtgacagcaggcagggctcagaagccccaggcccttcctgatccccagcagctgagaaagagcagcctgcggtgctgagacggagggaaggtgagctgagagaaggcgccattgcccagaaaggttcagaggggtcactacctcctcctctgaggccatcagggacttgagggcctggtccatggttcgaagttcctcctccagctgtctggctcggctgggggcagcgggcaggggtcagagaacagggcctgtccctacagccccaagcctaggatgctaccttcccactgtgtggaaggccccagggccaatgggctcacttgtcacccccgggtatctttacctctcggccacctcagccctctcctccgagcgctccagctctccttccaggatcaccagcttcctggccacctgtggggagtgagaaagagagggtagatcagtggagaaggactgggcatgttgcagrctgggcagcgagcaggcagaggggcaaggctgtcacctcttcatatttgcggtctgaatcctcagcgatgtgcttggcctccttcagctgcatctcctgcagttccatcttctcctcatccttcatggcccggttttcgatgaccttcattcctctgaaaggcagggagagggtgagcgtagggtcaggaccagcagagacaggctcccttctccctcccggaccatcctccccgaggcccctgaccacctctcgctctcatcagccgccttctcggcctcctccagcttctgcagggctgtagccaggcgctcctgggcccggtccagctcctcctcaaccagctgaatgcggcggttcagggaggccacatctgcctcagcctgtgggtcagaggtcaggggtcaaaaaggccttgttagccttggataaggatcagagaggctccagaggatggcgagattcttctcagaaagaactgaggcttcctggtttctagacattctatgtgatttttccccaaccaatcatcttctgcccagactgtgctccagtaaaaaatgtgcattcaggccgggcatggtggctcacgcctgtaatccccgcactctgggaggccgaggcgggtggatcacctgaggtgaggagtttgagagcagcctggccaacatggtgaaactctgtctctattaaaaataaaaaattagccaggcatggtggcgcatgcctgtaatcccagctacttgggaggctgaggcacaagaatcacttgaacccaggaggcggaggttgcagtgagctgaggtcgtgccactgcactccagcctgggtaaaaagaacgaaactccatctcaaaaaaacaaaaaaatacatgcattccttgcttgacaagctccgctcccctgctgcagggcctctcctgcactgtgcacagttagtctcccaaaggtcacctgcacacaagtcctcctgttccctgtgggagcacttcaagtgctggggccaggtctgatgcagctctgattcctacacagcaaagcctggcccaggtaaggggatgggaggagaatcaggccaaccagacatcactgctgctaagaatagcccgtcacagaatcaagctcagtgatactgggcatggtggtgcatgcctgtcatcccagctactctgaaggctaaggcgggagttcagcttgaccccaggagccctgcctgggaaacatagcaagatcccatctcaaaaaaaaaaaaaaaaaaaaagtatcaagttcagtgatgtcatctgtcatcagctgtaaggcagactcccagcaagaagcccaagaggcaggcctataaggaatacccatggctgtagcaaggggctccctgccaaggccagcagagagctgggggcaatgcaggggcagtgtgagggatgtctactcagcccctgggcttgcagtaggaggcaaaaccatggaggttttggaaaaaatccataaaaactggtcaaacactgagaaaaagggcagagcaaggcgagcgccagtaaaggaaaatgagaggagcagggcagcctcgtgttaagagcatcggctctgagtcagattgtctttgagccacggctcagccactcaacacctgtgtaactgtgggcaacttatttagcctctctaagcctcagtttcctccttcacaagttggagttaacaataacagttcctccttcttaaggctgttctgagataatccactgcttttaatactcagttaatca

SEQ ID NO: 95695 - DNA, 17201 bp, Homo sapiens
gtgcctagtgtgctaggcactgttctcagcattaaggattcagctgtgaccaaaacagagtctctgccctcatgaggctgacactctagtactatgagacagataataaataaacaaacatacagcaggccaggtgttcataaacactgtggagaaaaaatgaagcaggttaaggcagtgccaggcctttctgtagagtggcctcactcagaaggtagcatttgagagagacctgagggaagcgagggagtgagccctgcggatccctagcagggagggggagggaagggagccccacccaggaaagcaggcgcagagccctgagggaggagtgtgcttgctgtgttcagggatcaggaggaggcatgtggcgggagcagtgtgactgaggagaggggggcagagatgtcagggttagaggaaggccagatcgggggccttgtaggactttgactctttcagactgagctgggaagctaacagagagtcttgagcaggggcggggagggagatgatctgaaatgttccgtttgagaggctcctcggctgggcacagtggctcacacctgtaatcccagcactttgggaggctgaggcaggtggatcacttgaggtcaggagttttgagaccagcctggccaacatggtgaaaccctgtctcaactaaaaatataaaaattagctgggcgtggtggcgtgagcctgtaatcccagctatttgcgaggctgaggcatgagaatcacttgagcccgggaggtggaggttgcagtgatttgcagtgagctgagatggcgccagtgcactccagcctaggcaacagagtgagacttcttatcaaaaaaaaaaaagaggctcctctgggtgctgtgtagagaatacactgtagagagaagaaccagtttggagcctacagcaatccaggtgagagacatggcaaggaggcctggagggcagaggtgcgtgaccggatctcagcagtttgtgttctgatctgtgaagctcgagacatctataggcaggtgtgttaacctgggtgcagttaactgggagtgagtggagatagagaagctgtctgaggaatgagcagtaagggctccaaccgagatcagggaggtgaggaagagccagcaaagactggatcgaggcctcaggagaggctagagcactaggaggaaaaccaagggatgtggagccctggaagccacatggagaaggtgtccaagatgatgcggctagtcaagtgcaaagatgaagagacttgacctttgtacttagctacatggaggccaccagtggccttgactagagctgtttcagtggaggagttgtggggacgcaaacctgtttcgaatgggttcaaatgagaatggtagatgttaaatgggaacagctcttttgagggactttgctttgaatggggggaaagaaattggaggttagagggttccaaaaaggtttgtaaaagatgggagagatcgcaggctgtgtgaagatgacccagtggaggggagtaacaggttgcagcagagagggagagacttactggagcacatcctgaagcaggtgggaatgggcctcacgccaaggtggaggggttggccttggctaggagctcagggtccatctcaggcagcatgagggacagtgggtctgtaggcccagatgtaggcaggtgggtagatgtgatggtgggaatcaatggagacatctcttgattgcatccatttccataaagcagcagatgagaatgaggatggggaagggggtgatagaggtttaagaagagaggagaaagtgaaatagtcatttgggatagtgggaggtgactgacctgggaagatgggatgtggccctcgtgtggcaaggccctgactgagtgagagtagcctggaggtggtggggggtaagtggggggggggtaataaatgaatcacagtaaacaacaggggtctgaaatctcagcagtgggagggggttaggctggtgatcagaaaaggtctccctgagcaggtggctttcagactggaacctaaagaatgagagttcaccatgaaaggaaagatactgctggcagaggaaacagtttaacagaaactaaaaggagaagcactgtctctttctgtgggattgtcatgtcaacagaatcataagccaaagcaaagaatgactctagaatttcaggcaacagacgattgggaggtttgcaaggctcatctctgtggcctcttgtccccagcaacaactgtgtttcaccatccttatgtttctagatgggagtgagtgtcgtggactcttctgtggcaggacttggaggctgtccctacgcacagggggcatcaggaaacttggccacagaagacctggtctacatgctagagggcttgggcattcacacggtaagcccacccaccccctggtggcgacagccccgaactgaccagggggcctgaagctgagaacaaaagtggatgggggtatttggggttgttaaggtgctgaggagtaaagagggaaagggttagccaggcgcagtggctcatgcctgtaatctcagcactttgggaggctgaggcaggagggtcacttgagcccaggagtttgaggctgcagtgagctatgatcctgccagtgtactccagcctgggtgaaacagcaagaccctatctcttcaaaacaaaacaaaagaggggaagggtgttggggattatggatatttgatctaatattttaatgtttgtgagagtagggttgagtgaggccacacgcatgggcataagaaggctggagtgtcagggtgactttgacagttcagtcctaggagacaccaggaacatggaaggggccctgggaagggtcaggttcatgacctgaaatgagtcagttctctcttggctttgttttgttctctgtaaaatgaggacagtagcgttagacagctcaccagggatccgccagagtccaccagggccctcagtggcgggacggaagcagaatagcatctgtgcttaaagatcagatggaactgggtttaaagcctactcctgccactcccaggctatgagacctcagacaaattatttcatctctctgaacctaagaaatgggaataataatgccatccatctcatggagccattgtgaggattaagtaagaaaacgtacgtagagggccaggcgcacgcctgtaatcccagcactttgggaagccaaggcgggtggatcacctgaggtcaagagtttgagaccagcctggccaatatggtgaaacactgtctccactaacaatagaaaaattgctgggcacggtggctcacgcccgtaatcccagcactttgggaggccagggtgggcagatcacctgaggtcaggagttcgagaccagcttggccgacatggtgaaaccccatctctactaaaaatacaaaaattagctgggtgtggtggcacgcacctgtaatcccagctactcgggagactgaggcaggagaattgcttgaacccaggagtcagaggttgcagtgagccaagatcacgccactgtactccagcctggcgacacagtgagactccctctcaaaaaaaagaaaagaaaaattagctgggtgtggtggcacacacctgtaaccccagctactcgggaggctgaggcaggagaatcacttgaacccgggaggcagaggttgcagtgagctgagagcgtgccattgcactccagcctgggcgacaagagcaaactctgtctccaaaaaaaaaaagaaagaaaagttatgtagaatgcttatcacagagctgagcacagagtgcacttcagcaaatatgagctactgtatgaacagagggtttctgtctggccctttcagttggtgtttttatccctccctctctgcctcacaattgtcacttgaatatcagttttttacctctgtgggccaggccctgtgctgggccctgaagagggagtactgaacaagactgataagatctgtgccctggtagtggcactacaaaccatgacagagattgggcatcttacatgagggggagtcagaggaataacccaggtgccagacagacaggagctcacaggcagctggtgccccgctgtcaaggaaaaagcctgtttatcttcacctttacttttcagtatcacagttgtctgtccatgctgatgttttccctggtgttgagggcataccatgacttaccgcatcctctaacttgtttctcaaagggtgtgaatctccagaagcttctggaagctggaaactttatctgtcaagccctgaacagaaaaactagctccaaagtggctcaggctacctgtaaactctgagccccttgcccacctgaagccctggggatgatgtggaaataggggcacacacagatgattcatggatggggacatggaaatgagaataggttaaatggtgcaggtacctcatagccagctctacacagaggtctctcctggcagaaagcaggcgaagggcaggaggagctgcttggcagaaggacctcctgcccagacctgaggagtgagaggctttgagggctgaagtctccctttgttacggaccctggcccaggagttgaatgcctgaggacgtgtgggaaccccgttccctacttagcatgatccttgagtctcctctctggatggaatccgcgagctggccacctggccaccctctacacggctccaccctgccatggccgtggggcccttgctctctgacttctcaggacacaggtcatggaggttcttcccaagctggcagaggccatttgtggaaagtggagagctacgtggtggccatctgccaactccagcatctctggaaaatctccacgctgaatgtgatttttgaaaacagcttatgtaattaaaggttgaatggcacatcataattccagcattcggttgtgcagctgtgtgtatacatgcgcgtgggggagtaaaatactttaccatgttgcactctgagaggaaaatggagactatgaactagtttattaatctttggatttcctccctgtttccccacctgagccccaaatccatagtgactggaaatcagtggttttgggcttactcaggaggctgcttgcggcagttgctggccagaacacccgacggggttgtttctgagctttgcctctgtgactggggctattgcacaagctcccctgaggacacacttgctgctttgggcctcggtggcccggcctctccctggcgctcccgggcccgggagcgctcacctgtcggttccctggactctgcgggcaggcgctggctgattcccggctgcgcggacacctgtgcgctcctgcatttagggctcctttgctctggtttcatcacgcaggatgtcacattttgtgcatattattctctagctctactacttttcattgtaaacaaacaatcattttctaacctgccgtcgtggaaggcagagtgcagaccgacccttcccggcaggtgggggctgagagccaagagcgctggaaccgctagtgtggcctgacagcttcctccagctccttggtttatttgcaaactggacttccagcaccaggccccctgcgaccccctcctgccttagtcccgtgggatcgggtagttcaagattttgaattcatggtttggcacacaccggcaagtctgaaaacctgcgggtcagagtggggcggaggcgtgggccccctaccctctgccccctgccccctcggaagcgcagccctcttccaggggttgggacgagctagcgcggggacccggggcaccggcaaggacccacccgctactgggacctggcgccggcggcgcctctcgcggggtggcaccgcccacttccgccttccgcgggcgcgcgctgcgcagtcttcgtcacagcgcggaggccttttgtcctcccgccctccccgtagtggccgtaacccgagtgacatgtttccttgggggcgtggaggggcggggtcggggccggagtgggccgtcagcacttaaagggcccgcggctcgggcgtaggaggcggtgcctctgcagcaagcgtggggcgcgggaacccgagcaggttcgggagacggaatgaagggccgggtgggctcgcgaggggccggggagtccgcggggagcgagggagtttccgaggggcgggtcgtgttcctggcagcgtccctccagggcaggcccgccccctttgtcccagttccccgctgcccgggctggggcggccggggttcattcattgccggcctgaggactcctagctcggccccgctccgcgctacagcccaaagcccagcctgagacccagccgccctcgtatgcccacggcctagctccccttccctccaacagacagactgggaaaaccgagtgggcgacggctgagcaaggtcactccgctgtcgggggcgcagccggcctcagaccagctttcgtgcttcccagggcctctctgcgaccactttcggggtccgcgccaggcgcggggcgggggcgggggcggcttcggcgcggcgggcagagtccagcgggcagcggtgggggaagggcgagccgcctggggagagggccgggctgcgagcctggcgatccagattccagcccgctgtcgccagctgtgggaccgaagggcaactgtttcacctctctggccctagtatctgtatctgtaaagtgccagtgataacacctgtctcaccgagatgctgggggaattcaggaaaatcatgcaaaagtgcctggtayggagcctggcacgcagagggctcttggtcaagtgggttggagctgcgtgagcccagaaggggatagaggcagcgtggaggaaggcggcagcgggcccggtcgctgggaatgaaaggcctcagtgtctggggcttcctccccgtactacccgcagagtttgttcagggtggaggtgcgcacctggccaagtccacgtctacacggcccacccagartagcctaagttgggcgggattcctaactctgagccaggagtgaccgggctggccctggcatgggcagaggctgagcgggggttggggtggggccccctccaggaccaaccacggtgtggttgcccctgagctggcctcagcctgcctggcaaaggacctcacccttgaggccatgtgatctatttcctgcttcctcccagctgacccttgagggaaagggggtgggggccgcctagagcaggaggtattagtcactgcgcccaggagccagtttacacctagcgaaggcggaggcattggacaagcctgggtctgagcagacagaacccyttcctgcgaccctggagtcccaatcgtgctgccattttccttctgcccaggactctccagtcctcagtcaccttggacaaagaagtgtggatcctcagattccatcttttccaactccaaggcaagtggaactagaaaataaggtgcctgtgtgtcaggtctccccagctctgctgtggcgggcccttaagatcacctcactgaaccctcacgctgcctcatgaagtttatacaattattagctctgttttacagagatagaaactgaggccaagaggctaattaatttccaaagcctaaggccagaaagtgatggtacccagacttgccccagggctgacttctgagccagtctggtacctagggcacactgccgcctccttccaaagcgagcttagggggcaggattccagtgggaaggaagctctgagcaggcagcctcagccacctctgagactctgtatcctgggccaggtgccatggcagagaaggtgctggtaacaggtggggctggctacattggcagccacacggtgctggagctgctggaggctggctacttgcctgtggtcatcgatarcttccataatgccttccgtggtgagcggggcagtggggctggggctacttgaggggatggcagaagcaaaaccctgggttccacctccaccaccgggcggggaatgtgtgtctggctagtccctgggaacacagcaccccatgtcgtgatgatgtggcctacatgtaccctaccaggagggggctccctgcctgagagcctgcggcgggtccaggagctgacaggccgctctgtggagtttgaggagatggacattttggaccagggagccctacagcgtctcttcaaaaaggtgggtgcaggctgggcacggtggctcacgcctgtaattccagcactttggaaggccgaggtgaggagatcacttgagcccaggtgttcaagaccagcctgctcaacacagtgaaaccccatctctacagaaaaatacaaaaattagctgggcatggtagcccatacctgtggtcccagctactcgggaggctggcatgggaggatggcttgagcctgggaggtggaggttgcggtgagctgagatggcaccactgtactccagcctggacaacagagcgagactgtcaaaaaaaaaaaaaaaggtgagtgcaggcaggcaggctgagggcattgccaaggactaaaaccagtagagcaacctctggccatgtcacccctgcagtacagctttatggcggtcatccactttgcggggctcaaggccrtgggcgagtcggtgcagaagcctctggrttattacagagttaacctgaccgggaccatccagcttctggaggtgagaggcatgggacagggcacagacactaggagggtgtccagctggaccccagcctggcaggcagtgccaaacacagagcccaagctgtatcatcctggactcatgtctttacctcccagtctcagtttccccatctgtaaatgagagtgctcatcacctcagccccattctcctgtggaggagtaacagggtgggagtaatgtgtgaggcagaggtcactgatgccatctctccacggccagatcatgaaggcccacggggtgaagaacctggtgttcagcagctcagccactgtgtacgggaacccccagtacctgccccttgatgaggcccaccccacgggtggttgtaccaacccttacggcaagtccaagttcttcatcgaggaaatgatccgggacctgtgccaggcagacaaggtgagggcccccttgacagtgccctggctccactgatcgatggactcctcagggcccaccctgagcccaggggtgggattccgaacacccccactaaggaggaagctaaggctcaggcagttgcagtggagggccccatcccctgcttgtttctaaagataataaatagacaactggccgggcgcagtggctcatacctgtaatctcagcactttgggaggcccaggtgggcagatcacctgaggtcaggagttcaagaccagcctggacaacatggtaaaacccccatctctactaaaaatacaaacattagccggccatggtggtgtgtgcctgtggtcccagctattcgggaggctgaggcacaagaattgcttgaacctggaaggcagaggttgaagtgagccaaatcaggccactacactccagcctgggccatagtgagactccatctcaaaaaaacagaataggcatgaggagggctctgggttcagctgggacacgctgcctgtgcctctggcctcaccacctgacccacatcccacagacttggaacgcagtgctgcygcgctatttcaaccccacaggtgcccatgcctctggctgcattggtgaggatccccagggcatacccaacaacctcatgccttatgtctcccaggtaaggcaaaagggaagggacagaggagtggccctggggttaaagctggtgcctgggatctgggacgaactgacctgatctccacctccagktggcgatcgggcgacgkgaggccctgaatgtctttgscaatgactatkacacagaggatgscacaggtgagcctaggaccagggggacctaggagtgggagccaggaaggagagtcagggggaacagactccccatccaacacactcccttctctgcaggtgtccgggattacatccatgtcgtggatctggccaagggccacattgcagccttaaggaagctgaaagaacagtgtggctgccgggtaggaagagaagggagaagtgagggaggggagggaccagatccaggcagagcggcccagaggcgtggtcagtccagcccgctccataaaccctgttctccgtgggccagatctacaacctgggcacgggcacaggctattcaggttgttgggtatgccttgaggatcctcaccaaggcctcagaggcatgggtacgcccccccgccccacccacctcacccacctcaccccacccagctctcagcaacagagcagctttggcccttcccactcacctctctggagggtacctggcactgcccagtctcctcagcctgcctagcacccggtgcctgcgggccagccgctgctctgcacttctgcttcttaaagacctggccagcagctgggccagggccggctcagctaagctccaactacctcctgtcttgcagatcccgtacaaggtggtkgcmcggcgggaaggtgatgtggcagcctgttacgccaacccmagchtggcccaagaggagctkgggtggacagcagccttagggctggacaggatgtgtgagtgctggcctgacccctgcagttaggggccagggaggggctaaatcagatctgggcatgcccacccagggcgggctgtggggtgggggaggctctgcattccaccgtgggccctgagcacacacctcgccgtgttgcaggtkaggatctctggcgctggcagaagcagaatccttcaggctttggcacgcaagcctgaggaccctcccctaccaaggaccaggaaaagcagcagctgcctgctctccagcctctggcaggaactcagggccctggagctgctggggccaagccaaggcctcccctacctcaaaccccagctgggcccgcttagcccaccaggcatgaggccaagggctccactgaccaggaggcckaggtctytaactcttatcttccacagggtccaagagttcatcaggacccccaagagtgagtgagggggcaaggctytggcacaaaacctcctcctcccaggcactcatttatattgctctgaaagagctttccaaagtatttaaaaataaaaacaagttttcttacactggggcaggttctcacagatggtcactatccacccctggaatagaatcagccaggcctgagcgttgaggaagcaatttctttaattttatcggaatccaggacacaasaagaaaaacacccaaaaaccacatggagacagaagacgagacacaactcctcccccacygcctccctgctctagagtggggacaaagtgggggtgagacagctggggggagacctgaacctcagtccagccctacaggctccaggcctgcagggaaggagggtaacggggaggcagggyccagccccccagtgtggggaaacagctgagggaaggcccccctcaaaaggctccacctcctcaccagcactcctgcccagggacagggagcccacagcagcaaggggaccccggggccatggccacattcatgactgagaagcagctgagtggaggcaggagacacgattatctgggcagaatcagttggggcaggggcctgggrgggccccatgggccaaaccctgaggtcacaggagggggcccaaagcggggctagtgagtgaggtcctgagtgagtgggtcagcggctgggcccctttctccagctgcctgtagcccctccaatactgctgccaggggggcccgcctccagggaaatggataagaaagcagcctgcccctgctgcagacagagccaggtggctaaggccaggaaggaaggcccrgccaggccttgccacctgcccccagaggcctgtgggaaaaggacaggtcaggaarggtrgggacaggggctcgaccggctcagatccaagatggtgccacgcttgcttgctgagtcccccatgagctggggtactgcactggggccagcgactagttagacaggaggcagcagcttctcaagaaattccttcacagctgccatctcctgaggggattaagaggggatcacgagaggcacctggctggaggcagagaagtgggagtgggaaatggtccccccactgacctgaggacaggagctgtgcatgacacccgggtatgtcttgaactggaccctggcaggtgtgacaacagaccggagcttctcagccgtcagggccccaaaccgtacgggcaccatggggtccagctccccatggcactggagtatggccaggtccttggcactgccattagctgcctggaggccggacaggactcagggcaaagctagtgctgcagcagtccccaagccacgaggatgcagacacaaagggcgggggggtcagtggggacattcacctgggggaaggcccggtgcagaggcagccagcagctcaacgccacgatgccagccagagggtgggggcaggtgagggccgtgtagagggacagggccccgccctggagggaggagagagaggggtcatgagggcacagctcactcaccggccacccctaccccctaaatcccccccacccctctcccctcacctgtgaaaagcctcccaggacgattcgattggcagggatcccgttcttcatttcatgctcaatcaaggccttgactgggggagggggcatgagtgggtagagggaagctgccaaggggcccaataagggagctaggctgaggaaccgcccagcgctttcctggggggcaggggaaggaggatgtggaggaggggctggggtcttactgttctctgctgccttcttgatgccagcctcgtcctctggggcatctggactcagccccatcaggtcaaaccttgggagtagaggcactggcagctatagaaaaccccagccagccccctgtggctccctcagcccaagtgtcctcgtccccctgcccacccccactcccaaactcaccaggagggcatcaccatcttcatgttgagggtcacagggatcctaggcctggggaaagagagccagagggcccatcatgctcaggaggaatgaggaggccagagctcagagcccggagtggggccgcgccgcccctggtggcccctcccagcaggcagggcctgtgtttaaggtgttgccaggcaacctgccacgtggggctggaggctgtggttggggcaaagcgccagtaatggagaagcagagcccagcgcttggtgtgacggggtcccaggtagtcggtgagtacttggggaaggggcaaagggaggtgtgggttctaggagagctcaggtctaggaggccctagggctgggggctggtgctggaccccactcctgggggctccacaggagctcaggctgaaaatgccacttctgactgccctgagcccaagccccaggatgcaactgacaggagagaacaggcctgggatgacaggaccacccccagatgatccccagcctcagcccctcccttgctggggtgacactcacgcatggggacagatgtacttgacgtgagggagccggatggtggagagggcgtcagcccagctgtgcctgtaggagggacgggagaaaaggctccgatgtggtaggaagagaaggcctctccagtccgctgctgggccaggacccctccttaaggagcacccctcctcagtcacttaccctgtgtctccaagtccatgtaaaaaaataacctggaaaaggatgggaaatggggagacaggaaggcttcccctaggtcctccaacttctgcccacccctcccccacccccaaggacctgggggaacccaggtagcagccaaacagkttactaccccgagcctgctggcctcaggatactccctgctcatcactgccacctccattttcccacaccccctccagccggtcctccagctgctcccacagtgtctggccgtgggtgaaaggggacccttacygcggccgtttcccgctcagctccagacacggtggcagcatcggtgagcaggggcacagacatggtgttaccacacatacaccacacggctccacggcgggggcctgcatacatcggggcggcggtcaagagcaaaaccaggcacaggacacactcctggcccaagaggccaccaggccatcagccccacacagcacccaggttctgtcctgggcacaaagaatagtcaagcaagaagtcccagggcacaggagaagaagtctgcctcagttccagggctgaaaggcagagacagcctccctagtggcccagaacatgtgtctctggttctggcccaaccacaggacctgagcttgctggagacaggcagaggcagggcatagggactgtagggcagggggcagaggggaggcagcggcacgcctgcttcattccccctctaactcctcaggggtgagtgccttccccctcctctccaatcatccctgggtccctgcctccccaactccgggccctatgggaaatggagagaaaagtgccagggaaaggagcttccatcccctactcagtgccgcctccaacccccatctcaacctccccccacccagcccccatccagccttcacagcagtttctggcccatccattcccagacccccagggggctgcccatgtccccagaaagcgtaagaactccacccacccccaaactggtgctccacgcccccctaaacggagctacctgctgctgctgccactgactgcaaacgagccctggcttgaccacgctctgggactcccaaacacacaaaagaatgtcaggctggctggcccctccccatcctcggcgtcctccaaactcgccggaagcttccactacctgcctcaagtgcctgcccacccctcccaactggcctcaccttccatctctgacccctgagggcagctccccacaatgggatcgttcacctgtgacccggggttcctcttcccatggggaatgcacctcctgccctgagctgcgattcccttccttctccaccgtggggacttgcacctcccgcccaggctccctcctcggaggggtgccttccccctgacctgtctctctctatacaccttgagaacttccaccctgacccaggatctcccgctccccacaatgggaacttctgttctgaccaaaggtcaccctacccagtgaaattttctaccctgacccaggactcccacctgcccacaataaagctttgtacctttgactctggggaagcccccgccccacaatgggctcttctatttccgaccctgaagtctgtctctttatactcagacacccccttgcctagccccgctccactcccgaagtccccaagactggacagcgccttcgcacctcactccccacccccatyccccccatcacggttccccctccccgctctccgggaccctcccgaggccgacctccccctacacgcccatcctccgcagccgccggctgggtacctccactccctgggacttccgaggccgcttgggcgattctcctctttctcccgcagacacactcttccccctcggccgcccccgccggaacttccgttcgagtcccgggaacccagccatcgcgctgccggaagtagcctggccgacagtacggaaccmggaagcggggacccggcttcgctggatagaagctgccatgttggaggcggcggggctactccctgtcattcagccgcgcagtcgctgggttctcacccgctcccaccttgtagattcgagacagggcacccaagactcccacttgctaccaccacccatgcgcctcctggaggagggccgaccggaaggagaggcatccctcacactattgtttgcataaactttaccaccttcccatcctcatgggacacacctcttaaggcctcgggtgtctgccactggctttcatgccctattccaggatcatgaatggaatgacacactctgaaccgaagagaccttacagatcatctagttctccagccttgaagatggggaaactgaggctcaaggaaggcatgtaaacagcaacctcgggattccatttaaattctgcctctctggatctgcttcctgatatataaaatggtaataaccaccctgcctccttcrcagctttgttggtaggcttaaatgaggttgtgtgaacatggtttatacagtaaaatcacagcgtgaggtgttaatcacgcaaaaaaggacctaggaaaaatacaaaggccgtatcaggagagctggacaggcactggcagtgttagcgctgcccttcacaagcaatgtcatgcagacagtgcacaaaacgctgccatcaagctgaagtggaaataggtatcagggaccacagaaaagtcagaaggcaggcaaactgagttgaaggagcatgtccctgagaatgtgtggggatctgcaaataggaaatgagtcacacttgaccctcagccgcttaggactcactctcccagcctaacctatactagtgttttctttgaacagaaagaaaacagtacagccaggcgcggtggctcactcctgtaatcccagcactttgggaggctgaggcgggcggatcacgaggtcaggagatcgagaccatcctggctaacacggtgaaaccctgtctctactaaaaatacaaaaaattagcctggcgctgtggcgggcgcctgtagtcctagctactcggggggaggctgaggcaggagaatggcgtgaacccgggaggcggagcttgcagtgagccaagatagtgccactacactccagcctgggcaacaaagcgagactctgtctcaaaaaaaaaaaaaaaaaaaaaagaaagaaaagaaaaagaaaacagtacaaagttggaagctcaacaaagcactttcccccaggcccagaggcactttggtcctaagtactcaacaggtcagggagcctacaataccaggattcggggcaggaaacctttgagcctatgggaccaccacaagccaaggacccaggactgaatgtcaaaagaaaatggagggtaatgtccccacttatggaagaatgaacagttcctcctgcaacctcgatcacctgagacaccatgacacttaaaacaaattcttcagagtgaagcttca

SEQ ID NO: 95696 - DNA, 47611 bp, Homo sapiens
  misc_feature (1)...(47611): n = A,T,C or G
agcacagccaattttaattagatcactttctgcccagaattagagagcaagctgatgataataatattgcttatatggttcttcacagtcttaaagcaacttcatgcacacttctaaaaaaaaaagaaaagaaaatacttggaatgatagtaacactatatattgaaccttataagatgtagctttaaaaataaaagtacttcaggaaaatatagcgttaaatgtttatgttaaaaagaaggctggaaagaagtaatgaaggccaggtacagtggctcacgcctgtaatcctaacactttgggaaggagaggcgggtggatttcttgagtccaggagttccagaccagcctgggcaacatagcaagaccccatctctacagaaaatacaaaaagtaaccaggcgtggtggtgcacacctgtagtctcagctatttggaaggcttaggtgggaggattgcttgagcctgggaggtcgaggctgcagtgagctgagatggatcacaccactagactccagcctgggtgacagatcaaaaccccgtctctaaataataaaatttaaaaagcaaaggaagtaaagggatgtaaggagcagcaaggattaaaccaaactgtcattgttctcaggtgatgaaactgtccacatagaaaacctcaaataatatacaaatgaattattagaattaataagttgttggatcagagacaaaaatcaattacatttctacagtccagaaactagaatacaatgaaaatattccatttatcataaccaaagatataagtaactaaaatgaaattagcaagagttgtgcaagaagcaccaaaccattgcagctccaatggccccaagtttccagcttccatttcccaaaggaaggggatgcaagggtgacaagatggtgccaggcagcctctctcagaccttttggagttttcttgacccagccttgctgactttgtagaatgtgttgagcaaatcctgttgggtgaatccatgaaaaattccaactcctggtggcaaaatcgcaaaattccagccctagaaatgttctcagattttttttttaagacagagtcatgcagtggcatgatcttgacttactgcaacctccacctcccaggttcaagggattcacctgccacagcctcccgagtagctgggattacaggcacgtgtatttttagtagagacggggtttcaccacgttgccaggctgatctcgaactcctgacctcaagtgatctgcccgcctcagcctcccaaagtgctaggattacaggtgtgagccactgcgcctggccaaaatgttctcagctcttaaatcttctagaagacaccaaatgtctggagtggtttacggcatgaatccaggatcatttttatcaagaggagtagaagaaccaagtcctcaaaaatttaattccaaagtatggccccaacactatgtcttcaatacgtccaatgtttcaagtgtacccgtgctcttgggcattattcaatgatggcagctaagaaaactgacagcccaactcctttcaaaatcaagcccccaatgtgtccccaacaataattcaatattgtatccaatgtcattttttttttttgagatggagtttcactcttgttgcccaggctggattgcaatggtttgatcttggctcactgcagcctctgcctcctgggttcaagtgattttcctgcctcagcctcccgagtggctgggattacaggcacccaccaccacacccggctaatttttttgtgtttttagacaagacagggtttcgccatgttgaccaggctggtcttgaactcctattctcaagtgatccgcccacctcagcttcccaaagtgctgggattacaagcgtgagccaccacgcctggctgtatccaatgtcttgagtaaatcagctttgttgagtgttattcaagaatggctgctatgaaaacttggagaaactcctttcaaaattgagtcccaaatgtgtccctaatccttaaatcttcaatgttgcatccaatgtctgaagtaaatccacgctattggatttgattgcaggctagttccaacagagacaggtagatccaactccttgtaaaatcaaatctcaaactgtgttcccatctctgagacccagactgcatctagtatctggagtaaatctgtgctgttggacatgatttcagattccaggatagttatgatagagataagtaatttcagcttcttacaaatcaaggtccaaggtgtgttgtttcctttccctgagcaggtggaataggtctgtggagagtgacgggtgcagatggtttgctgtgaagatgtggatggaaccccttacaaaatggaggtccaaggtgtgtcctggttcttaaacttgaactcctggcctcaagccatcctcccacctccaccttccaaagtgctgggattataggcgtgagctaccacgcctgacctcaattcttaagttttccagactgtatcagatcttgctactaaatctgtatccagtaaatccatgttgcaggatcttccacaatggagataataaattgaatgccttaaaagatttgacctgaactcaaatgtctaaagtcattcagtgttgaaatgaccaggcaaggtcaggatggattgcaatgaagagtgggttgaacgccttataaagacccacagtgtgtctcaactcttcagctagggaccttgggaggccactcactctcatttgccacaaaatcctagcgtgacaaactatttttgcactgtgcttatcttaggaaactccgtctcaaaaaaaatcttattttgcactgtgcttatcttcccaggcaccagaacagaagggaaaacttgtacatagttgcaaataacttcacactactccatcccctctactgccacagaatctactttgaggcactaaggaaaaaaaaagacatcagtttgaaaagtgcccctatcagagcaatatgaattctgctaaaattgaagcaagaacaaacatcaacatttttttttgaggcagtgtcttgctctgtcatccaggcttgagggcagtggcgcaatcacggctcactgcaacctttgcctcccaggttgaagagattctcctgcctcagcctcccaagtagctgggatgacaggcacctgccaccacgcccagccaactttttgtatttttagtagagacggggtttcaccaggttggccaggctggtctcgaactcctgacctcaggtgatctgcctgcctcggccacccaaagtgctggaattacaggcgtgagccaccacacccagacaaacatcagatttatgatgaagcttcagtggaagaaggtgaaatcactgatgctttatgaaaagtttatgagaacaatgcctcaaataaatcagcagtttacaaatggataacttattttaagaaagtgtaagacaatgttgaaggtgaggcctgcagcagcagatcatctatatcaatttttgaggaaaaaattcactttgtgtcccaactgaagagaactggcgattaacagcccaaacaacagccaacatcatagacatctaattggttcggcttacacaattctgactgaaaaagttcagcaaactttccactgaatgggtgctaaaagtattgcacccagataggccaggtgcggtggcccatgcctgtaatcccagcactttgggaggccaaggtggatggatcacaaggtcagggattcgagaccagtctggccattatggtgaaaccctgtctctactaaaaatacaaaaattagcctagtggtgcgtgcctgtagtcccagctactcaggaggctgaggcagaagaattgcttgaactcaggaggtggaagttgcagtgagccaagatcgagccactgcactctagcctgggcagcaagagcgaaacatcgtctcaaaaaaaaataataataataaaataattttttaaactcaccacctcagctttataaagcagaacttttatttatttatttatttatttatttatttatttatttatttttattttttttgaggtggagtcttgctcttgtcgccttaggctggagtgcggtnnnnnnnnnnnnnnnnnnnnnnnnnnnnnnnnnnnnnnnnnnnnnnnnnnnnnnnnnnnnnnnnnnnnnnnnnnnnnnnnnnnnnnnnnnnnnnnnnnnnnnnnnnnnnnnnnnnnnnnnnnnnnnnnnnnnnnnnnnnnnnnnnnnnnnnnnnnnnnnnnnnnnnnnnnnnctgcccgccttggcctcccaatcacttgaacctgggaggaggaggtttcagtgagccgagattgtgccactgcactccagcctgggcaacagagtgagactctgtctcaaaaacaaacaaacagaaaggccagggaaagcttcaccaaagagtacttccccacttcaggacaacgctcctgacttcttattgttttgtaatcttaaaaaaatctttaaaggggccgggygcagtggctcaagcctgtaatcccagcactttgggaggtcgaggcgggcggatcacgaggtcaggagatcgagaccatcctggcgaacacagtgaaaccccgtctctactaaaaatacaaaaattagcccggtgtggtggcaggcacctgtaatctcagctactcaggaggctgaggcacgagaattgcttgaacccgggaagcagaggttgcagtgagccgagattgcgccactgcactcaagcctgggcgacaaagcgagactccaaaaaaaaaaaaaaaaaaaaaaagctggaggccggtagatcacgaggtcaggagatcgagaccatcctgactaacacggtgaaaccccgtctctactaaaaatacaaaaaattagctgggcgtgatggcgggcgcctgtagtcccagctactcgggaggctgaggcaggagaatggcgygaacccggaaggcggagcttgcagtgaaccgagattgtgccactgcactccagcctggacgacagagacagactccgtctcaaaaaaaaaaaaaaaaaaaaaatctttaaaaggcacccatttttcttcagttaataatgcaaaaaagactgcattgacgtggtttaattcccaggaccctctgccctttaaaggtaaactaaatgcatatcatagctttacaaaaatgtcttgcccttgatagagcttatactgagaaatgaggtttatattttttattttaatattttgattccattttccaataagtttttaaagtcccctcatatacctagaggcgaaattactgggtcatatggtaactgtatgtttaaccccttttgttgtgtgtgataaaatatatgtaacataaaacttgtcactttaaacatttttaagtgtacaattcagtggcattattttcacaatgttgtgcaactgaaacgggtaaagttccttttccccctctcagggcgtgcgaggggggtgtggcgtgcgacgggggtgtggcgtgcgaggggggtgtggcgtgcgacgggggtgtggcgtgcgaggggagtgtggcgtgcgagggcggtgtggctcgcttcttcagtgccaggctgctcaaacctctaggggggcatacagacaggcagaggctgtgggcctccaaccccacggcagcatgtaggggtggatgcttacagctcctggagccccagtgggcgtgtgttacagggtgctcttttagttttgctgtctataggcgacttgtgttagttaaccagctcgagtgggctctcaaccttgtcataggacagagagggctttctatatgccgggttcttgccttggtgtaccagaagaattggatcacacctgggcttagagaatgggtgcaaggttttattgagtagaggtagctcttagcagatgttggaagccagaagagaatggagtaggaaggttttcccctggagtggggccactcagcagcccgggacccccttccacagtcccagccaaactctgcgtcgttctgctggtcagcggcctgctggcgtgccagtgcctgctgatgtgctcctctggacgtccagccgcctgtgtgttcctccactgatgtgctcctctccatgtccggctacctgtgtgtctgcctgctaaggtcttgggggtttttataggcacaggatgggggcggggcaggccgggtggtcttgggaaacgcaacattgggacaggaaaacaaaaatgcctgtcctcacctaggtctgtgggggtggagctgcagtcaaggaccacgttctcacgtcctcctctmcccagcacttccttcccacctttccatgtcatttatagggaccatgctcttcttcccttcccagcacttccttcccacctttccatatcatttatagggaccatgctcttcccttcccagcacttccttccctcctttccttatcatttatagggaccaygctcttcccttcccagcacttccttcsctcctttttatgtcatttatagggaccatgctcttcccttcccagcamttccttccctcctttttatgtcatttatagggaccatgctcttcccttcccagcacttccttccctcctttccttatcatttatagggaccatgctcttcccttcccagcacttccttccctcctttccttatcatttatagggacgatgctcttcccttcccagcacttccttccctcctttccttatcatttatagggaccatgctcttcccttcccagtacctcctttcggtatcacaaccgttactgctacgtatttctaaaatttttcattaccccaaacagaaattatacgaccattaagcaataactcaccattcctctccccacaccaccccagcccctgggaacctctaatttactttctgtctttataaatttgccattctaggtattttatataagtggaatcatacaatatttgtcatcttgtgtctggcttattatagcataacatttaacatataatattatagcataatatttcaaggttcacccatgttgtagcaggtatcaaaattttactctttttttaaggttgaataatacttcattgcatgtttatccgttcatcagttgatggacatttcaattgtttatgccttttggcttttgtgaataatgctgcaatgaacattggtgtataagtatgtgtttgagttcctgactttcagttctttggggtatatacctaggagtggaattgctaagtcatatggtgagtccgtggttagcgttttgaggaaccaccaaactgttttccacaacagttctaccactttacattcccactagcaatgtatgaaggttccaatttctccacatctttgtcaacacttattttctatttttttaattacagccatcctagtgtatgcaaagattcttttatttttaggccacttcttttcagttatgattttctgggaaatatccatttcaacacagttttcagatttattgtccataaatttgtacactaaacatttcagtgtggtggtggttttttgtttttgtttttgttttttctgagacagagtctcgctctgttgcccaggctggagtgcagtggcatgatctcggctcactgtaacctccacctcccgggttcaagcattttcctgtctcagcctccagagtagctgggatcacaggcgcctgccaccacccccgggtaatttttgatttttttttttttttttttttagtggagacnnnnnnnnnnnnnnnnnnnntccctttgaactcctgacctcgtaatccacctgcttcagcctcccaaagtggtgggattacaggtgtgagccaccgcgccccaccttcagtgttcttttaaagggcaataaatgggccgggtgtggtggctcacgcctgtaatcccagcactttgggaggccgaagcgggcggatcacgaggtcaggaaatcgagaccatcctggctaacacggtgaaaccccgcctctactaaaaatacaaaaaaaaaattagatgggcgtggtggcgggcgcctgtagtcccagctactcgagaggctgaggcaggagaatggagtgaacccgggaggcggagcttgcagtgagctgagatagcgccattgcactccagcctgggcaacagagcgatactccgcctcaaaaaataaataaaaaataaaaaaataaagggcaataaacggccgggcacggtggctcaggcccataatcccagcactttgggcggccaaagcaggtggatcacctgaggtcaggagttgaagaccagcctggccaacatggtgaaacctcatctccattaaaaatacaaaaattagcttggtacggtggcacgtgcctgtgatcccagctactcaggaggctgaggcaggagaatcatttgaacctggaggcacaagttgcagtgagctgagatcgctccactgcactgcagcctgggtgacaaagcaagcctctgtctcaaaaataaaaaataaatttaaaaaggcagtaaacatgtatgccttttttgtgatctgttgtgaagcttgtcaattttattagactcaaagaaccaagtttcttttttgttgttgttgttgttggatgatcctctttgttgtaatattttcttattttattcaaatttctaccttttcaggccaggtgcagtggttcatgcctgaaacccakcacttcaggaagttgaggcaggcaaatcgcttgagcccaggagttcatggcgaaaccccctccacaaaaaatacaaaaattagctgggtatgatggtgtatgcctgtagtcccagctactcgagaggttgagacaggaggatcacttgagcccatgaggttgaggcttcagtgagctgtgatcagaccaccacattttactctgggcaacagagcaagatgctgtctcaaaaaacaaacaaatttctgtcttttattttgtcttttattttacttactttttgtctgttgtttttctcacacctttttcttttcttttytttttatttatttatttatttttgagatggagtcttgctctgtcacccaggctggagtgtagcagcatgatctcggctcactgcaacctctgcctcccaggttcaaacgattctcctgcctcagactcccgagtagctgtgactacaggcgtgtgccaacatgcccggttaatttttgtatttttagtagagatagggtttcaccatgttggccaggccagtctcaaactcctgacctcaggtgatctgtctgcctcggcctcctaaaatgctgggattacaggcatgagccactgcatctggcctcacatcttgagttagaaacttcattcactactcttcaactaccttttccaatacaagcatttgtcttttaatatatttccattatcatttaattctaagtatattgtaatttcttttttttttttttttcctttggagatggactcttgctctgtcacccaggctggagtgcagtggtgtgatctcggctcaccgcaacctccgcctcctgggttcaattaattctcctgcctcagcctctgtagtagctgggattatggacatcagccaccatgcccaactaatttttgtatttttaatagagacagggttttgcatgttggtcaggctggtcttgaattcctgacctcaagtgatccacccttctcagcctcccaaagtgctgggattacaggcaggagccgccacacccggcctattataatttctttcttttcttttctttttttttttttagaccgagtcttgctcttcttgcccaggctggagtgcaatggcacaatcttggctcactgcaacctctgcctcccaggttgaagctattctcctgcctcagcctcccaagtagctgggattacaggcacctgccaccacgcccagccaattttttgtatttttagtagagacagggtttcaccatgttggccaggctggtctcaaactcctgacttcaggagatccacctgcctcagcctcccaaagtgctgagattacaggtgtgagccactgtgcctggcctataatttctattttgattttttctttgacccatgagttagggtttttttccccatactttccaagcataaagttatgtctaacttaattgctctaacttgagttttccatcagaattgtgtaaactgaaccaattgagatgtctatggtgttggctactgtttgtgctgttaattgtcggtcctcttcaattaaggcacaaacaagatgagtttattccccaaaaattgatgtgtatgacctgctgctgtgggcttcattttcaacataatctcatctcttcttaaaatgagttatccagttgggtatggtggctcatgcctgcaatcccagcattttgggatgccaaggtgagaggatcacttgagcccaggagttcaagaccagccttggcaacatagtaagaccctcatctctacaaaaaatacaaaacaaaaaatttagctgggcatggtggcatgtgcctgtcatcccagctacttgagaggctgaggtgggaggatcacttgaacccaaaggctcaaggctgcagtgagctatgattgtgccactgcactccagcctgggtgacagagaaagaccctgtctcaaacacacacacacacacacacacacacacacacacacacacacacatttatccatttgtcattaattatggttaattaataggatatacatgtcaccaattttttgaaatttgctttatggaccagaatatcataaacattcataaaagttgacactgactaagttccactactgtaaaaagtctgctattgctctcacaggatttgcagaaaggcagatgttggatttaaacattattattcccacttgcagaagagatgtcatctgcttttaaggaaaagctataaacagaaatttgctgttgtgcattagaaatgcaatctgaggccaggcgtggtggctcatgcctgtaatttcagcactttgggaggccgaggcgggtggatcacctgaggtcaggagtttgagaccaccagcctgaccaatatggtgaaaccccgtctctacaaaaattagccaggtgtggtggtgggcacctgtagtcccagctattggggaggctgagacaggagaatttcttgaacccaggaggtggyggttgcagtgagccaagatcacgccactgcattcctgcctggcgacagagcaagactccgtctcattaaaaaaaaaaaaattaaaaagaaaaaaaaaagtcctgggaaaaaaaactattaccataaaatctgaaggtctgagaaaggtgcacagaattgtggtgaatcttatttactactgcggtcttagcacctagcaccaacttgtgccttaatcacagcagccatctcttttagtaatttggagagaaaggaagaggaaagagggaatagtgttatcatgtagcaaagaaagcattctctagagtcagatttgggtctgaacttacctaccatacatgatcttagaaaagttatttaatgtctcttaagcctcygtttcctcatttctcagatggaaagagtaacatttatgttgcagagtctgattactcatgaaaagttactatatatcacaaccaatacagaaaagatacttaataaatggtaggggctattgttaataattattgtaagctttgtaattgagggtgggttacaatgcaaaaaaggaaacatcttggttaaaataagattccaactaagggtgaccctgagcaaagtctgtaacagttgctagtgttactctttcagtatttacttcatgccaccaaatgtgcctggtattggagacaccacattcaacaaccagttaaagtctctgccctttagtttagacatttgcctcagagctgtgcttgtaagttatttacttttgagaatttgccaacaagggcttttaggggggcaaacagaggaaggagagaagcctcgtgtctgtgacaattaggagtagtagggactggggagctggcaagggtatgccttgcctaagtctttttttcttgtgcagttacttatttttttttattgtttaaaatatatatagcataaagtttaccattttaattcagtgccattaagtacattcacattgttatacaaccatctccactatccagaactccttcatatcccaaactgaaattctgtacccattaaacaataactcccaatttctttccactcccagcccccaataactactattcaactttctttctctatgaatttgactataataaagtcctcattgtaatarttaggattctccagagaaacaaaaccaataaaagatgatatataggccggacccagtggctcacgcctgtaatcccaacacttttggaggctgctggagcacctgaggttaggagttcaagaccagcctggccaacatggtgaaaccccgtctctattaaaaaaaaatgcaaaaattagccaggcgtgttgttgggtgcctgtagtcccagctactcggtaggctgaggcgggagaatcgcttgacccgtggaggttgcagtgagccaagatcgcgccactgcactccagcctgggcaacaagagcaaaactctatcttaaaaaaaaaaaaaaaaaagatatgtatatgtatgaaatatgatctgctgtcagcaagctggagaccaaaaaaagccagtgaggtgtagctccagttgaagcccaggggcctgagaatgagaggaaccaatggtgtagtgtaagtcccagtctgaatgtagaagagagaattcttccttccccacctttttgttctattcaggccttcgaagaattggatgatgccccccacattgagggagtaatctgctttactccctttactgattcaaatgctaacctcattcagaaatgccctcacagacacacccggaaataatgtgtagtcaaatatttggataccctgtggcctagtcaagttgacacataaaattaaccatcacacccacataagtggaatcatgaaatttgcccttttgtgtctggcttagcagaatatttttaaggtttatccatgttgcaacatgtgtcagaattgtatatcttttcaagaatgagtaactattgtaggtatacaatatagcacattttgttcatccatttatctgttaatgcacatgtgcgttctgtacgccttttggccatcacagataatgttactatgagcaacattattgctcattgtgttagacagggttctccagagaaacagaaccaataggagagtttttatatatatatatatatatatatatatatatatatatatatacacacacacacacatatgcatatataataagtatattatatataaatatactatataaaaatatataattataaataaaataaaatataatatatttattatataatttgttatataataatttataagtatatattatatattaatatatttaaaattatatatgtaaatttatatatacataaaagctactcaggaggctgaggtgggagggtcacctgagcccagggaggtggaggctgcagtgagctgtgattgcaccactgcactccagcctaggtgacacagtaagaccctgtctcaaaaaaaaaaaaaaaaattaggctgggcgcggtggctcacacctgtaatcccagcactttgggaggccaaggtggatggatcacttgaggtcagcagttcgagaccaccctgaccaacatggtgaaaccccatctctactaaaaatacaaaaattagccaggtgtggtggtgtatgcctgtaatcccagcttctcgggaggctgaagcatgaaaattgcttgaacccaggaggcggaggttgcagcgagctgagattgcaccactgcactgcagccagggtgatagagtgagactcagtctcaaaaaaataaataaataaaacaaaaataaaaacaaacattaccatatgatccaggaatttcacttctagaaatataytgaaaataattgcaaacaaggaattaaacagatattcacataccaataatgttgctatgttgctcataaatatatattcttgtatatacagaatataaatatatatgtatatttataaataaatttatattctatacattctatatataaatatataaataaatatatttatattctgtatatacaagaatatgtatttatgaggaacatagcaacactattggtatatgtacatatgtttaagtccatgttttcaattattttgggtatattcctagaagtgaaattcctggatcatatggtaatttttatttttattttttatattttttcagacagggtctcactgtcacctaggttggagtgcagtggtgcaatcacagctcactgcagcttccacctccctgacattttaacaatattaagtcttcttggctgggtgctgggactcacatctttaatctcaacactttggggcaccaaaacaagaaagatcacttgagcccaggagttcaagaccagcctgggcaacatggcaagaccattgtcggccaaaaaatttaaaacttagctggttgtgatggtgcatgcaccagtggtcccggctactcaggaggctgaggtgggaggatggcttgagtgcaggaggctgaggctacagtgagctatgattgcactattacactccagcctgggcaagagaatgagtgagaccccatctaaaaaaaaaaaaaaaaggctgggtgtggtggctcacgcctgtaattccagcactttgggaggccgaggagagcggatgacttgaggtcaggagtttgagaccagcctggccaacatggtgaaaccccgtctgtactaaaaatacaaaaattagctgggcgtagtggcaggtgcctgtaatcccagctactcgggaacctgaggcaggagaatcgcttgaacccgggaggcggaggttgcagtgagtcgagattgcgcctctgcactccagcctgggtgacagagtgagactctgtctcaaaaataaataaataagtaaacaaacaataaaataaataacaataaaaataaattaaaaattaaaaaattcaaagcaaaagcaaacaaactaaaaaacagtattaagtcttccaattcatgaacatgggatgtcctaccactatgtcttctttaatttttttcaccaatggtttataattttcagtgtacaagtcttgaaagacatattttaaataataccatgccagtatgtttgggccgagtgcagccctctaacacaggtttgagaattctgtgagtaatgctcccagtgtcatgatagagaaaatttccagtgctgctgaagcctaacagaatawttatcatgtcttgttttttccctagataaaatctgagctccttaaagtcaaggaaagtgccttcactgccttccctgagaataccagacacacaattaacatccaaccagtagcccctgtgactatttaaaaatgcaaattcaatcagatttccctactctaaatcattcaaaatcactgctattaggacagctggtattagtgtgttcaccaaagccctgtgacagttcctgccaaactctccaatcttagtaggaagtccccttcctactccctccccgctctccaatcattccagccttcttttcatcttgctaaaaaggtgttttcaaacaattccaagtgcagcccacagtaagaaatttattttacattgcaaccttgttgatatatataatgaacaaaagttttgcaaagcagtacttggctttactacttttatacattgtattctaatatttttcttatttattattattatttatttagtttttagacrgagactcgttctgtcactcaggctgaagtgcagtggcgtgatctcggctcactgcaacctccgcctcccaggttcaagtgattctcctgtctcagcctcctgagtagctgggattacaggcacgcaccaccatgcccagctaatttttgtatttttagtagagacggggtttcaccatgttggtcaggctggtctcgaactcctgacctcaagtgatccgcccacctcggcctcccaaagtgttgggattacaggcatgagccaccacacctggctatttttcttatttattgaatagacttggggtctcactttattggccagagtggtcttcaagttctgacctcaagtgatcctcccacctcgacctcccaaagtgctggaattactggtgtaagccactgcacccagccttttctcttttattattatttttatttttttagatcactcttttattattttatagagcaatattttatatttggggcctggcacagtggctcacgcctgtaatcccagcactttgggaggccgaggagggtggattgcttcagcccaggccaacatggtgaaatcctccatctctactaaaaatacaaacattatctgggcacggtgatgggcacttgtaatcccagctactccggaggctgaggcaggagaatcgcttgaaccccggggtcagaggttgcagtgagccgagatcacgccaccgcactccagcctgggcaacacagtgagacttcgtcttaataaataaatatagatggatagatagatagatagatagatagatagatagatagatagatgatagatagataaaattctagttcyttgttttaaataaagtttgtacccactaaattgatactgtgaccaattagtggggtacaacatacagtttgaaaacagtgctctggccgggggcggtggctctcgcctgtaatcccagcattttgggaggccaaggcgggcggatcacctgaggtcaggaatttgagaccagcctggccaacacggtgaaacctcgtttctactaaaaacactaaaattagccaggcgtggtggtgcacacctgtaatcccagctactcgggagactgaggcacgagactctcttgaactcgggaggcggaggttgcagtgagccgaaatcgcgccactgcactccaacctgggtgacagagtgagactccatctcaaacaaacaaaacaaaacaaaacaaaccaacaaaacaaaagagagaaaaacagtgttctcagcattttctttgcctcagggccattgcgaatgctacaccgtctggaaagtttttcttgtatcctcttcacctggatagattttttttttttttcagcccttcagaaagtacacctagataaatcttaatcatttttttaaggtatgaaatctaaggatgccccctctctggagctgcctgcctgtgtttgaatcctgaagatcgtgatgcgtgagttaatccgtgctaagaactcggaacagtgagtagcaaatcgttgcttcttatagtgcaagttagaaatgacacaactgtttgtgtaactattaatatgtgtctcctcacacctcccacactctaaacacaagaagccacagaatttggttaatttcttttcatgtttttgtttgtttggttttgggttttttgttttgtttttgacaggctctcactgtgtcgcccaggctggagtgcagtggcacgatctccgctcgctgcaacctcgcctcccgggttcaaacaattctcctgcctcagcttcccaagtagctgggattacaggcgcccaccaccacgcccggctttttttttttttttttttttttttttttttttttgtattttttgtagagacgggggtttcgccatgttagccaggctggtctcgaattcctgacctcaggtgatctacccgcctcggtctcccaaagtgctaggattacatggtgtccaggctgattctgttcatctttatattcctagcgtctcacttggcctggcatggaagaggcgctcggaatcaaaacggagagaggctgggggtggagccagcttcggaagtcackgcggaggggcgggggcggggccgcgcccaccagacgagccatcggtcacgcggggcccagctggactgccgcgggggattctgggccaagatggcagcaatgaggaaggcgcttccgcggcgactggtgggcttggcgtccctccgggctgtaagtgccccgagccgccgaggcggcggccctgcaggcactctgactgtcagggttgggggcttggcccgtggtgactgctctcttagaggcgaggccggacagctctcaggccagagtcgggagggcgttggagtcctggaccctcccttttcccctcaaatcctttgaaggggatgggaaaactgaggtccggagaggtggagtgacttgtctgggtcatggagacctgggacgccatcctaggtgccctgattccccgcccagggccctttccgatgaccctggcccctttctccctctaattgaacttcagacctctccaactcttcattagtgaaaatcaagaacacgcttccatttccttcgtctccatttccaactgttgttgcttttagagatgcttggggaactatcccagcctaccgagcgggacttgcgttgattggagccaagctgtgattcccttggaattgcactttgatcctgttcgatcctgatgttttcccctctcccattctcagcgcagaaaaagtgtgggagacgtagctgtatggagcagaaaaaataaaagctgaagctagggtgtcccaatagttctgccactttctagacttaatgacatagttatttactttctctaaacctcagctctttcgtctgtaaaacggacaacattcccttggggttgttttggaaattagagaaaatgtaagtaacacatctggcagtgttctggctcctaataagtgatcagtcggtggtggtatttttaccttagggagttgagaaggagttataactgtatagagggaaaaatacactcctggcactgggtccctctcagaaagccacgttaatatctttacttggccattcacctgcaccacctgctcatgtgtaaaatgaagatggcaattccaacttggaaagttaaacgcaatagtagatattaataagcttttaagaaatatttggtgtaatgagatggccctccatggggttccaagcataggaaccagtattagtattaggcctagatatgggttcaagtccaagctctgtcactttctaattgtgatttttgggtaacctttctgaggcttagtttcttcacctacggagttgggataataatagtccctggcctgtagtttaacactgggtttagtcagtattcgctgttggtgttgatgcaggtacaccatacctcaggacactgtggcacagtacttgtgtggttagggggaccctctctgagcagagctttacagaggaggaacgggatgtttaaccaggagaagactgtggaccgaacgaacggtggtaaagaggcaacagtggcccagaggttaggagcttgtgctctagagccacactgccaggtttagatattgcctcagtgagtaactccccatgtcacctcgggaagattacttaatctctttgggtctcagatttcttttcttttctttctttttttttttcctgagacggtgtcttgctctgtcatctgtcacccagactggagtgcagtggctcaatctcagctcactgcaacctctgcctcccaggttcaagcgattcttctgcctcagcctcccaagtggggccttagatttcttacagtaaaatggggatgatgatagttcctacctgataagattgttgagaggacagtatgggttaatatgtaaatggctcaccaggcgtggtggctcatgcctataatcctagcactttgggaggctgaggtgggtggatcacttgaggtcgggagttcgggaccagcctggccaacctggtgaaatcctgtctctactaaaatacaaaaaattagccaggtgtggtggtgcrcacctgtagtcccagctactcgggaggctgaggcaggagaatcacttgaacctgggaggtgaaggttgcagtgagccaagatcgcgccactgctctccagcctggagacagaatgagactgtatctcaaataaataaataaataaataaatatatgtaaatggctcttgtatgtgcctggcaaatattaagtgtttaaaaactgaattattatgtgaagagctgttacggggaaggaaggaagtggaattgagtttataatgttctaataaaagcagcttggaagcaggttttagaagcttttttttttttttttttttttgagatgaagaagtctcgctcttgtaccccaggctggagtacaatggcacgatctcagctcactgcaacctcctcctcctgggttcaagcaattctcctgcctcagcctcccgagtagctgggattgcaggcacctgctgccatgcctagctaatttatgtgtttttagtagagatagggcttcaccatgttggctaggctggtctcgaacttctgacctcaggtgatctgcccacctcggcctcccaaagtgctgggattacaggcgtgagccaccacgcttggcctgaagcaggttttagattatttcagcaacactcaactgttatttatcgagcccctattatgtcccaggkccttagaaatacagcattgaataaaacaaagtccctgtctcatgaaacttatgttccagtgagatagttttagggtgatatactagcagaggctgaacatccctgttggagggagattcaagttgcagggaccttccaacttagcctgttgacgtcatgaaattcaatggctcatcgccttagtctctaagaaagcttgttggctaaaacaaggccagtcaggtgagttgtacatgttccagctgcttcctagcagggaattcctgggggacttcaggrggttgagatccttagcggatcacacagtgtgccttccgctttgcctcgttgtagtatatttatccagattaaatctgtaaaacaaagttgatttgaaaagttacagtatcaagacaggtagaggaaagaggaaaaaaaaagtattgtgttacttgatagggaagactaagattttgagctgactttatatagaggagactcagggcattttgtaaaaactgtcttcagctactgggggtgtcacctccccttagacccatgcttgtcatcacccagcctatgactgtaacagaagagagccctcctgcatctcgcccataccccgaaaagtccaggactgactactcctccccacactcagtaattgctctcttctgggacagctgtgtccttcatggtttatgtgttattttaataactttaaagagtggctactttgtaccaaacacggtgccaaacactagggatgaagtggagttgagacagacaaggtccctcaaagagcttatgttctactggaagagacattgagtaggcattctttatcgtgctttgaaggaaataattatagctctgcaatagcgaaaataatgggggtgggaggaatggcagctttgcaaagggtggtcagaggaagcctctctgcaactgaaagatgagagagagatgtragaacagccagtttttttaaaaaaagccagatgaggaaccctggggcagagggaagagaaggcagggagcttagcaacctgttgggtggaggttgggagtggacrgtaggggcgagtgatgawtccaggaggtcagaggaggcaactcatacagtcttktcttttcttaattggaaagcatcaagtgacatatagagtcatttaatttttttttttgagacagggtctcgctctgttgcccaggctggagtgtagtggcacagtcatagctcactgcaggctcaaccttctgggctcaagcgattctcccacctcagcctcttgagtagctgggactacatgtccattccaccacacctggctaatttttctatttttagtagagacggggtttcttcatcatgttggccaggctgatctcgaacctctggcctcaagtgatctgcctgccttggcctcccaaagtgctgggattacaggcatgagccaccgtgcctggcctttttttattttttttggaaatggagtcttcctstgtcgcccaaggtggagtacagtggcacgatcttggctcattgcaacttccacctccctggttcaagcaattctcctgcctcagcctcttgagtagctggagttacaggcgtgcaccaccacacccggctattttttgtgtatttttagtagagatggggtttcaccatgttggtcaggctggtctcaaactcccgacctcaagtgatcgcccgcttcggcctcccaaagtactgggattacaggcatgagccactgccccccgcaatacctggcctttttaaactacttctaacatacatacagcagcatacagagtcctataggccatggtgaataggtgaaatggctcaatgaagttctggcttatgcagtagggtacatgcgatgcctttgacagagatggaaaggatggagtcagatgggctttaggagaaattagagttctgtttcgggactgctatatgaagagatgcgaatagagctgtcaggtaggcagtggaaaaggagtctggacttcaggggagaaccggtactggaaggatgaatctcttgcttgttcctgttactaagtgaaatattctttttgttcttaattctaaaatagaccaaatgtgaattaaatggtgagaaatatttcttcttgtctcattattagtgaagatagatccattctttcatattggtctccctgggaattgtggcaatctcttcctcatactttttgtttyctcttttaaaccaaaggtcagcacctcatctatgggcactttaccaaagcgggtgaaaattgtggaagttggtccccrasrkggactacaaaatgaaaaggtaaagttggaaatgagccaaaaaaacagttttttcaagcatctgctttgagtattacgtgtgataggtgcaatggcagttgacagagctatgcaagatgtgattcctctgcacaagttaggggagagtagaggaggccaaacagggacagacacctgtgacagttaaatgatctaaaatggtggggcaagctggatgggtggctcatgcctgtcatccctaattacttgggaggctgaggtgggaggatggcttgagcccaggagtttgagaccagtctgggcaatatagcaagactctatcttattaaaaaatatatgtatatatataaactgaatggtggtgcaacaggtttggtgtccccaggtccacagcccagtggggtggggtagacccagcaattccatgtaaggggatttatccaaagcaagtcacgaaggccaaatgtagagatttagccttgggggtgttccttacaaacctgtttggtaagcacagaacagttggaaacaacttaaatatttagtatgaggaaagttgggtcagatacactatggactttttataaaatgaaatattatgaagccattaataacataggtatatataaagtgactcaagcagtttataaaatagtacatgtgactgggcatggtggtggctcatgcctgtaatcccagcacttcaggaggctgaggcagagcacgattctgtctccaaacaaaaacaaatagtgcatgtgcgcgtacgcacgcgcgcgtgtgtgtgtgtgtgtttttgggagatggcatctcactctgtcacccaggctggagtgcaatggcgcaatctcggctcacctcaacctcctcctcccgggttcaagtgattctcctgcctcagcctcccgaatagctaggattacaggcccctgccaccatgcccagctaatttttgtatttttagtagagatggggtttcaccaggttggccgggctggtcttgaactcccgacctcaggtgatccacctgcctcagcctcccaaagtgctgggattacaggcatgagccaatgcgcctggccatgtattttttaatcttaacacttttatgtaagaaaaaagtttatatatgtatgggagcatttatctagactaggacctagaccagcactttctgtgaagatggaaatattctggacctgagcttttccatgtggtggccactatacccatgtggcccttgagaacttgagatgtgactagtgtggccaaggaattgtatttttatttttatacaatttttattaaatttaaataaccacatgtgactagtgacatattgggctgcacagatctagaaagttacacaccagggtgttaatagcgttatcactgggagattctaagggtggttttcttttgtttttggcatgtttttctgaaagaatcatatattgattattttttcaataagaaaagcttttttctttttctcttttttttttttttttttttttttttagcacgtccatcctagctttaatagtgagtgcttgttggaaacaatagtgtgtaagttcccgaagggcagaatcctgtctgttctgcttctgcttactgctatatccccggcacctagcacaatgcctgcaacatggagggctttcaaaaattatttgacaggctgggcatgatggctcatgcctgtaatactggcactttgggaggctgaggcaggcagatcacctgaggtcaggagtttgagaccagcctggccaacatggtgaaaccccatctctactaaaataaatgagctggggtggtggcatgcttgtgtaatcccatctactctggaggctgaggcaggagaatcgcttgaacccggaaggcggaggtcgcagtgagctgagattgtgccactgcactccactctgggcaatacagtgagactccatctcaaaaaaaaaaaawttttgtggaaagattaagttagagcagtgggagagaaactggagaaggcaggcaaggggaggacctagcgagaaggacctggagtatttttgtgtgttctttttgtttgagacagggtcttgctctgtgtcactcagtgcagtggcacaatcattgctcactgcagcctcgacttcccaggctccagtgatccacctcagcctcctgagtagctggatcacagacacgtgccaccacgcctggctaatttttgtattttttgtagagagggggtttcgccatgttgcccaggctggtctcaaactcctaagcttaaatgatctgcctgtctcagcctcccaaagtgctgggattacaggcgtgagccaatgtgtccgcctggacctggagttcttagaattttttgcgtaatcctgtaaatattagggagccatagaaagcttttgatgcaagagaatggaaggttggaagctgcattttaggaggattcctgtgtaagatgaattagtggcttgagactatgccatgttatatacaggataatgatggtagatttggaaagaggaatccatggaatctgttgagctactggacatggtggggaggaagataaagaagctatacgctgaacacatgaggctgaagtcctatgccaattgggagacagaagcgaggagggtgtgatactttgggggccccatcccatactccccagagggttagtcatctctgccctttcaggccatcacacattgctctcagtttgtttatgatgggattataaattaacacacatttacttacgggaaagcctgcatggcagaataatgtttctatgtaaataactccttttcaggtgagaagctgcrtccactgcaaaaaattatctatagtacttgaactaacaggtactgcattttgaggctgttttgttactaactttgctgccttggtgtttctctctccactatagaatatcgtatctactccagtgaaaatcaagctgatagacatgctttctgaagcaggactctctsttatagaaaccaccagctttgtgtctcctaagtgggttccccaggtgagccctagccctcaatgaaaggcctttctcyagggatgaaaagttttgcatttgcctttgaagcaagtagaagttgagaacataggtttccaagcccctggctttgagaggtctcaggtgattcatagcactgtgttgcagcaaaagaacatgacccaggattcagggccttgggttcagtcttggctctgctctgacttgctcagtgacattgctaaggccttcccctcctcagtgttagagatgacctcttctagccctaaagtctaaaaccctctatgcctgtctgtggtttctttgtttgtaaaagaggaagactgacaactcctgcttcacaaagatagttaagtgaagaagaaacatcctgttacaaaggagtgcttaacacagagctgagctcagtgcctggcccagagtacattctcaataaatggctggtagtagtattcctgctgtttctgcatatgtaaagctggcagtatgggccatatggagaaattgggatctcagccaaaccaagggcccttctgagccatcagcagtcaaacaaacagtaaaagtattggagagactcagctctgcagaaggaattactygctaagagttctggagaacagaggttttgtgatgaaaaggttttctctaactgaactctctgtctgctcttggtgatgacttggcaatgtctcccttggttcctagatgggtgaccacactgaagtcttgaagggcattcagaagtttcctggcatcaactacccagtcctgaccccaaatttgaaaggcttcgaggcagcggtaagaggatagcttgttggtgggggctcctgaaatgagattgatggcattggtccctgccttgtcttggcgcctcagtcccctgtcctgggatgtccatctgaatagcttgtctgtcagccagaccctggggcaaacctggccctgccactcactgctctgtgatcttgacaagttgacaagcctataaaatagggctaaatgatagtacctgaagttgtgagcatttcagaagataggatgcatgtacattgcttagcaagagccagataaaaggtaactgcttaataaatgttagctcttttgattatccacttctttagagaaatgtaaccaaactctccacaagagtttcaacagtagttgctggcatctgccaactttcttacaattttagacaagaacatctttggaggcgttggttctgtatttaggcaaaaacctttttttggctgggcacagtggctcacacctataatcccagcactttgggaggctgaggccggagaacagcttgaggccagaagcttgagaccagcctgagcaacataaggagaccttgtctctacaaaaaaaaaaaaaaaaatcaattagctggctgtgatggcatgcacctgtagtcctagctactcgggagactgaggcacaggatggcttgagactaggagttcgaggctgcagtgagccatgataataccgctgcactcttccagcctgggtgacacagcaagaaaaaaaaaaaagctttttctcaagagtgacttccagggtggtgatggcagtggtggtggtttccttggggaaaatcaaagtttttttttttttaattaagagaaattactgtgtttgtttcctagtgctactgtaagaaagcactacaggccgggcgcggtggctcacgcctgtaatcctagcactttgggagaccagggcgggcggatcatgaggtcaggagatcgagaccatcctggctaacacgatgaaaccccgtctctactaaaaatacaaaaaattagccaggcttggtggcaggtacctgtaatcctagctactcaggaggctgaggcaggagaatcacttgaacccggaaggcggaggttgcagtgagccaagatcatgccactgcattccagcctgggtgacagagcaagactttgtctcaaaaaaagaaaaaagaaaaaaaaaaagaaagcactacaaattgggtggcttaaaaacaacagaaatttattctctcacagtctggaggccagaagtcccaaatcaaggtgtcagcaggattggttccttctgaggcctctgggagaatctgtcctatgcctctctgctggggtctggtggtggccagcagtccttggcattgcctggcttgtagatgcatctctccagtctttgcctccgttttcccagggccaccttttctgtgtctctgtgtcttcacttggccatcttttgtttttgttttttttagacagagtcttgctctgtcgcccaggctggagtacagtggcatgatctcggctcactgcaagctccacctcccaggttcaagtgattctcccacctcagcctcccgagtagctgggactacaggcgtgtgccaccacgaccggctaattttttgtatttttagtagagatggggtttcactgtgttagccaggatggtctcgatctcctgacctcatgatctgcccgcctcggcctcccaaagtgctgagattacaagcgtgagccactgcgcccggctggccatctttttttaaggtcaccagtcgtatgggattaggggcccaccctattccagtatggcttcatcttaactaatgatatctgcaatgacgctgtttccaaataaggtcacattctgaggtgctgggttttaatccttcaacatatatttttaggaggacacaattcaacccataacattcacataacataaaatttaccttaagagaaattttttgctactctgtgtcagtgttctttaaagagaaaagtgctggccgggcatgatggctgacacctgtaatctcagcactttgggaggctgaggtgggtggatcacaaggtcaggagttcgaaaccagcctgaccaacatggtgaaacgctgtctctactaaaaatacaaaaattagccgggcgtggtgrtgggctcctgtaatcccagctactcaggaggctgaggcaggagaatcgcttgaacccaggaggtggaggttgcagtgagccgagatcatgccactgcactccagcctgggcaacaaagcaagactccatctcaaacaaaaaaagagaaaagtgctgaaaggagttcacctggatgttggcaggttgctgctggagccaaggaagtagtcatctttggagctgcctcrgagctcttcaccaagaagaacatcaattgttccatagaggagagttttcagaggtttgacgcaatcctgaaggcagcgcagtcagccaatatttctgtgcgggggtgagtcagagcacattggtatcctttcctctgtaccrttctggaatggggctagactctgactcaagtggtcctcctgccacaaacttcttatcctgggtgggggcagcctgagctccacacctagacatcttttcccaaataagtgtggtcagaagaaatcctaggaagtactttctctcaaacctgaattttgggtcagtttaccagctagccatgatagcatgcgcctgtagtcctagcaacttgggagactgaggcagaggatggcttgagaccaggagtttgaggctgcagtgagccatgatagcaccactgctatcatgctaaaggaatctagcaggacaggacactaacgggtttgtggaggtcagttgagtcctggctttatcactagctcttcacacatccctggagaattacctaggcttctatgtttccaacatcacatctctaatatcagtggttccaggcattgtgtgtgtattatctataataattgaaacctcacaatagcccagcagggagtaggttatcctcactttataaattacaaaaccgaggcccaggaagggcgaatactctactgtaaggtcacactgctgtgcaaattgcagccagaggccgggcatggtggctcacacctgtaatcccagcactttgggaggacaaggcaggtggatcacctgaggtcaagagttcaagaccagcctggccgacatggtgaaaccccatctctactaaaaatacaaaaattagctgggcgtggtagtggatagaaaccccgtctttactaaaaatacaaaaattagctgtaattccakctacttgggaggctgaggcaggagaatcacttgaatctgggaggcggaggttgtggtgagccgagatcacaccactgtactccggcctgggtgacagagcaaaactccatctcaaaaaaaaaaaaaaaaaaaaaaaaacattgcagccagaatgatcgttgaaaagtgcacatctgggctgaacatggtggctcatgcctgtaatcccagcactttgggaggccgaggcgggcagatcacctgaggtaaggagtttgaaaccagcctggccaacatggggaaaccccatctctactaaaaatacaaaaattagccgggcgtagtggcatgcacctgtaatcccagctactcaggaggctgaggcgggagaatcacttgaacccaggaggcagaggttgcagtgagccaagatcacgccactgcactccagcctaggtgacagagtgagactctgtctcaaaaacaaaaaccaaaaaaaccccacaaaagtgcacatctgatcacatccctcctggttaaaaagctttcagtgactaatcaagtgcagactttttaatgaggtttacaaaccytgcatgatttggtcccggctcttttctgtagccgtaccgttcaagttcccttctggcccctgcttcctcttcatggtacactccagcccaactggaacttctttctgtttgtcacatgcctccactcttgcctctgggcctttgcacgtgctctctctagactcagaacaaccttccttgggaggccaaggtgggcaggttgcttcagcccaggagtttgtgactggcttgggcctgggcaacatggtgaaaccccagctctacaaaaaaaaagccaggtgtggttgcatgtgcctgtagtcccagctactcaggaggctaaggtgggaagatcacctgagcctgggaggtccaagctgaagtgagccaaaatcatgccactgcacaccagcatgggtgaaagagtaagactctgtctccaaaaaataaagaacacttcctccacatcatgcttctcggggataactcctgctcatccttcaggtcttcttgtgggagtcagttcctctgagaagctgctccagtccttcagctggagttagtgcccttctctgggaccccatggtgtcgggacatcctctaaatgtagcacttagctgcttgttaaattccctccctgccccaccccactagaccgtgcactccatgagggcaaagcccacatctctcccagtccctggggtgctccactctcccagcttggggcctagccacagtgggcactcagtcactgacgggcaggtggatgaatggggaagcaggtgctccagtaacattggcccaactcccagatctgtgtctttctaagcatctctcttacctttttcttgctcagcagtggttggagaataagtgggagcatcaaaatggaaaagtacactgagatctttgagtctgaaattatttatctgttgaacatttattatgcctcttaatatgcagaatttgcttgactctaaagggttttaaagacagctcccaaaagggcaggtgggaatagaagtcacctacatcccaaatccaccctccttaccatagccctaagacccatgatcagacctgtgcccaccttgctgacctcctcatctcatacttcctttccccttgctctgtctgcctcagctgtcctttgttctgtctggagcatgcctggctcttctgtctcagggctttgcccaggtcttccctctgcctggaatgctcttctcacagaccacccccggctcctctcggctccagcatcctgtcctcagagggatctttcctggaccctcactagttggcctcctccacttgttcctatcatttcccatctttcctctgtggcacatcacttctgagattttctccattacttacttggttgcttttttattggccatctccctaacttgagataagctctgagagggcaggaaccttatcagtcttgcccactgctctgtgccagtgcctggcacatagcaggcaactcagtaaacatcaggtgaataaatgaatgaatgaatcctctagcatctcactggggcagctcatcccttggtcctcaggccagcccagcctgttactgactcatatccaactcagctcttgttctgagtttggttttacccagtctttggtctccttttggagtactggccccagctcctctggcacgtagttttgctccatctccccaccttacaacccagctgcttactctccttgccctctctagctcctcctccgcttattgtaaatccttggctgcctctcctgaggcctgtgcaacttctgcttcctcaattgtaggtccattgtcccccagttccctgccattgctctctactgcctcctcctggcactgaattgtaccatccctgcccttactccgcccagctgcaggtgttgattgcacactgatcagaaatgtgtgttaaacagccctgcctcagttctgctagccaaaaagctcaggacactgacctcattcctcccctgtcttcccacaggtacgtctcctgtgctcttggctgcccttatgaagggaagatctccccagcwaaagtagctgaggtgtgtgcatgtgtcagggcggggggtttggtgagggttggccaccttgtctgcccctgagcgcataggttcctctccccaccctttctggcaggttcctgacttcattcattcacccagctccttcattaagctcctgctgtgagcacagccctgcacttgctccctagaggcccccctcctagccgaacatgtagtccttgaagcccctggcctctatccagcctgaaaacctccaattcagtttccagtctggtcgttgaggtgattctctgaggaggggctccttacccaggagttcccatagttccttgtagtgattgaaaggccacaaccctgatgtcctctgaacagtcaccaggtcaacactgagaagaacatggcatgggaattgagtttgaccagcccaagaacttatgtcatttagtcctcaaaaccactgtgcaaatttggtattattattcccttttacagttgagaaaactgacactaaataacttgccacacaggttacaaatggtgaaatcaggtatcaaaccccattttttctctctccaaagcccacttcttcccaggatactttgtggcatccagataggtggaatggtaacagtagcaactgtttcttgagagcagctgccctgctccaggtcttagcctcagttgccacaatccttgccrtatgaccaaagggtcatcaccatttttcagaagcagaaattgaagctcagaaaagtgaagttgcttgccaaggcccacagctagtgaacagcagaactaggactttaacccagcatctcgtgacttcaaaggcctgctccttcccctgcaccctgctgccccctaaaggccagccactgccgccccacactctgcagggccactggggaagcgacgtcaccatttcatttatttagcagatcactggtgtcttctggtcccctttccctgccacatccctctgcaccttgtccagcagccccgtgtgggcagcagctccttgggtgaggccatctttttttaagttcaccagtcgtatgggattaggggcccaccctattccagtatggcttattccaattggacccatattggacctattccaatatggacccattttgcagtggttttagagatgtgcaaatgggcttccaaaaatttaaatagtgatgtacctctattaaaaaatataactattggccgggcacggtggctcacrcctgtaatcccagcactttgggaggctgagatgggcagatcacaaggtcaggagatcgagaccatcctggctaacatggtgcaaccccgtctctactaaaaatacaaaaaattagccgggggtggtggtgggcgccggtagtcccagctactcgggaggctgagaaaggagaatggcgtgaacccgggaggcggagcttgcagtgagctgagattgcgccaccgcactccagcctgggcaacagagggagactccatctaaaaaaaaaaaaaaatatatatatatatatatatatatatatggactattgattggccgggtatggtggctcatgactgtaatcccagcacttcgggaggccgaagcatgtggatcacctgaggtcaggagttcaagaccagcctggccaacatggtgaaactccgtctctactaaaaatacaaaaaatagtggggcgtggtggtaggtgcctatgatcccagctacttgggagactgagacaggagaatcacttgaacccaggaggcagagcttgcagtgagccgagattgtgccactgcactccagcctgggcgacagagtgagactctgtctcaaaaaatatatatatgtaaaatatatacatttttatacatatggtccaagctacttgggaggctgaggtgggaggattgcttgagtctgagaggccaaggttgcagtaagccgagatcacamcactgcactctagccgaatgacagagtgagacccggtctcaaaaaaaaaaaaaaaaagaaaaaaaatataactagcatctcagacccatgatttcatggattttattgctgaggataaaacgacatggaaggaatcaacttcactgattccagcacctgggtctgacagtatgatgtgacagccgtaagtgagactgaagtctgaggggcacaggtagggaggaaagcacgggggttggagcttcaggactgtgggctggctccagcggctggctctgccccttacgcctcagtctcctgatcatagattgaggatcatcattcccagttggagtggtgaggagcatgtaatccagtaggaactgagtgcgtcatacccagaagtgttctgcccaggcaaaggccccctcttctgagtgcatggatcccctggctggtggattctgtatcctccaagtgcctgcttgcttccttaggtcaccaagaagttctactcaatgggctgctacgagatctccctgggggacaccattggtgtgggcaccccagggatcatgaaagacatgctrtctgctgtcatgcaggaagtgcctctggctgccctggctgtccactgccatgacacctatggtcaagccctggccaacaccttgatggccctgcaggtaatcaaaagcatatgcccattctcccaaaggtcacggtgggcaggacagcttgttatcatttattctttcagcaaacatttactgatgccagtatgccaggttccaagctggcaatggtggacacagtcatggtgaccctgcccagatgtgaagtgtacarctctgtgttggggagacagtcaagggagttacatggcaatcccactgcattatgacagatgccatgaagggaggaagcatggggctcaggaagcctagaggggccccatcccagctgaggagatctgggaggatttgcaaaagaggcctcagtgaagcttgaagaacataaagtaagctgctgttgagggaagaggaaagatgactaggcagaattgcacctcaggactgatgtggggttcagggaggactcatacaatatacagggttttcagtgtgcgggtgtgtagcagaagcagatgaggaagcaggaggtagagaagctagcagaggtcactcagagggagaggctttaatgccgttccccacagattgagctaagacctcagattagtttcctttgaggtttgcttctcgtgggctggtccagaatggagatccattggctggcagccagatagaaggagcattcttagtgtctgaccacagctaccttgctgtagcattggcctaaccttccatctctaggatagtgatggcagttccagccactttttttttcctctcaattatcccctagaggttcgtgtctaagccaggtgagtctgttatgttctgggtcggtttcctcagagttgtggctgtcaaggttaaggttcgtagttctgtggtctcctcatttttcagcttactgtgataccctgccctggttcctgggctttccttcagctcatgcgtttcccagccaggcagacaggaagagtgacttcctctcctatgccttgccaggcaggtaaaggggaattctgcacagctgaggtgagtctgaggcaaaacttcatcctgatcaygctcaggacactcctgctcctctgtgcttctctgtttcatggcagtgatatctcagaatcccctttttgaaaatttatcagggaacaggttgagctgtgtgacgtctggcagtagcttcctctgacctccctcttccatcagttacttcggaaatatggatcgatgtgccaggttaagtgctgacttagacaatggtaacaagacccaatccctgccctctgggagctcatgttatggtgggtggggaagacagatggaagattacaggcgtgtaaatagcacattgtaagaccatttattcacctattaaaacctaacctaacggtgcctagtgtgctaggcactgttctcagcattaaggattcagctgtgaccaaaacagagtctctgccctcatgaggctgacactctagtactatgagacagataataaataaacaaacatacagcaggccaggtgttcataaacactgtggagaaaaaatgaagcaggttaaggcagtgccaggcctttctgtagagtggcctcactcagaaggtagcatttgagagagacctgagggaagcgagggagtgagccctgcggatccctagcagggagggggagggaagggagccccacccaggaaagcaggcgcagagccctgagggaggagtgtgcttgctgtgttcagggatcaggaggaggcatgtggcgggagcagtgtgactgaggagaggggggcagagatgtcagggttagaggaaggccagatcgggggccttgtaggactttgactctttcagactgagctgggaagctaacagagagtcttgagcaggggcrgggagggagatgatctgaaatgttccgtttgagaggctcctcggctgggcacagtggctcacacctgtaatcccagcactttgggaggctgaggcaggtggatcacttgaggtcaggagttttgagaccagcctggccaacatggtgaaaccctgtctcaactaaaaatataaaaattagctgggcgtggtggcgtgagcctgtaatcccagctatttgcgaggctgaggcatgagaatcacttgagcccgggaggtggaggttgcagtgatttgcagtgagctgagatggcgccagtgcactccagcctaggcaacagagtgagacttcttatcaaaaaaaaaaaagaggctcctctgggtgctgtgtagagaatacactgtagagagaagaaccagtttggagcctacagcaatccaggtgagagacatggcaaggaggcctggagggcagaggtgcgtgaccggatctcagcagttygtgttctgatctgtgaagctcgagacatctataggcaggtgtgttaacctgggtgcagttaactgggagtgagtggagatagagaagctgtctgaggaatgagcagtaagggctccaaccgagatcagggaggtgaggaagagccagcaaagactggatcgaggcctcaggagaggctagagcactaggaggaaaaccaagggatgtggagccctggaagccacatggagaaggtgtccaagatgatgcggctagtcaagtgcaaagatgaagagacttgacctttgtacttagctacatggaggccaccagtggccttgactagagctgtttcagtggaggagttgtggggacgcaaacctgtttcgaatgggttcaaatgagaatggtagatgttaaatgggaacagctcttttgagggactttgctttgaatggggggaaagaaattggaggttagagggttccaaaaaggtttgtaaaagatgggagagatcgcaggctgtgtgaagatgacccagtggaggggagtaacaggttgcagcagagagggagagacttactggagcacatcctgaagcaggtgggaatgggcctcacgccaaggtggaggggttggccttggctaggagctcrgggtccatctcaggcagcatgagggacagtgggtctgtaggcccagatgtaggcaggtgggtagatgtgatggtgggaatcaatggagacatctcttgattgcatccatttccataaagcagcagatgagaatgaggatggggaagggggtgatagaggtttaagaagagaggagaaagtgaaatagtcatttgggatagtgggaggtgactgacctgggaagatgggatgtggccctcgtgtggcaaggccctgactgagtgagagtagcctggaggtggtggggggtaagtggggggggggtaataaatgaatcacagtaaacaacaggggtctgaaatctcagcagtgggagggggttaggctggtgatcagaaaaggtctccctgagcaggtggctttcagactggaacctaaagaatgagagttcaccatgaaaggaaagatactgctggcagaggaaacagtttaacagaaactaaaaggagaagcactgtctctttctgtgggattgtcatgtcaacagaatcataagccaaagcaaagaatgactctagaatttcaggcaacagacgattgggaggtttgcaaggctcatctctgtggcctcttgtccccagcaacaactgtgtttcaccatccttatgtttctagatgggagtgagtgtcgtggactcttctgtggcaggacttggaggctgtccctacgcacagggggcatcaggaaacttggccacaraagacctggtctacatgctagagggcttgggcattcacacggtaagcccacccaccccctggtggcgacagccccgaactgaccagggggcctgaagctgagaacaaaagtggaygggggtatttggggttgttaaggtgctgaggagtaaagagggaaagggttagccaggcgcagtggctcatgcctgtaatctcagcactttgggaggctgaggcaggagggtcacttgagcccaggagtttgaggctgcagtgagctatgatcctgccagtgtactccagcctgggtgaaacagcaagaccctatctcttcaaaacaaaacaaaagaggggaagggtgttggggattatggatatttgatctaatattttaatgtttgtgagagtagggttgagtgaggccacacgcatgggcataagaaggctggagtgtcagggtgactttgacagttcagtcctaggagacaccaggaacatggaaggggccctgggaagggtcaggttcatgacctgaaatgagtcagttctctcttggctttgttttgttctctgtaaaatgaggacagtagcgttagacagctcaccagggatccgccagagtccaccagggccctcagtggcgggacggaagcagaatagcatctgtgcttaaagatcagatggaactgggtttaaagcctactcctgccactcccaggctatgagacctcagacaaattatttcatctctctgaacctaagaaatgggaataataatgccatccatctcatggagccattgtgaggattaagtaagaaaacgtacgtagagggccaggcgcacgcctgtaatcccagcactttgggaagccaaggcgggtggatcacctgaggtcaagagtttgagaccagcctggccaatatggtgaaacactgtctccactaacaatagaaaaattgctgggcacggtggctcacgcccgtaatcccagcactttgggaggccagggtgggcagatcacctgaggtcaggagttcgagaccagcttggccgacatggtgaaaccccatctctactaaaaatacaaaaattagctgggtgtggtggcacgcacctgtaatcccagctactcgggagactgaggcaggagaattgcttgaacccaggagtcagaggttgcagtgagccaagatcacgccactgtactccagcctggcgacacagtgagactccctctcaaaaaaaagaaaagaaaaattagctgggtgtggtggcacacacctgtaaccccagctactcgggaggctgaggcaggagaatcacttgaacccgggaggcagaggttgcagtgagctgagagcgtgccattgcactccagcctgggcgacaagagcaaactctgtctccaaaaaaaaaaagaaagaaaagttatgtagaatgcttatcacagagctgagcacagagtgcacttcagcaaatatgagctactgtatgaacagagggtttctgtctggccctttcagttggtgtttttatccctccctctctgcctcacaattgtcacttgaatatcagttttttacctctgtgggccaggccctgtgctgggccctgaagagggagtactgaacaagactgataagatctgtgccctggtagtggcactacaaaccatgacagagattgggcatcttacatgagggggagtcagaggaataacccaggtgccagacagacaggagctcacaggcagctggtgcccygctgtcaaggaaaaagcctgtttatcttcacctttacttttcagtatcacagttgtctgyccatgctgatgttttccctggtgttgagggcataccatgacttaccgcatcctctaacttgtttctcaaagggtgtgaatctccagaagcttctggaagctggaaactttatctgtyaagccctgaacagaaaaactagctccaaagtggctcaggctacctgtaaactctgagccccttgcccacctgaagccctggggatgatgtggaaataggggcacacacagatgattcatggatggggacatggaaatgagaataggttaaatggtgcaggtacctcatagccagctctacacagaggtctctcctggcagaaagcaggcgaagggcaggaggagctgcttggcagaaggacctcctgcccagacctgaggagtgagaggctttgagggctgaagtctccctttgttacggaccctggcccaggagttgaatgcctgaggacgtgtgggaaccccgttccctacttagcatgatccttgagtctcctctctggatggaatccgcgagctggccacctggccaccctytacacggctccaccctgccatggccgtggggcccttgctctctgacttctcaggacacaggtcatggaggttcttcccaagctggcagaggccatttgtggaaagtggaragctacgtggtggccrtctgccaactccagcatctyyggaaaatctccacgctgaatgtgatttttgaaaacagcttatgtaattaaaggttgaatggcacatcataattccagcattcggttgtgcagctgtgtgtatacatgcgcgtgggggagtaaaatactttaccatgttgcactctgagaggaaaatggagactatgaactagtttattaatctttggatttcctccctgtttccccacctgagccccaaatccatagtgactggaaatcagtggttttgggcttactcaggaggctgcttgcggcagttgctggccagaacacccgacggggttgtttctgagctttgcctctgtgactggggctattgcacaagctcccctgaggacacacttgctgctttgggcctcggtggcccggcctctccctggcgctcccgggcccgggagcgctcacctgtcggttccctggactctgcgggcaggcgctggctgattcccggctgcgcggacacctgtgcgctcctgcatttagggctcctttgctctggtttcatcacgcaggatgtcacattttgtgcatattattctctagctctactacttttcattgkaaacaaacaatcattttctaacctgccgtcgtggaaggcagagtgcagaccgacccttcccggcaggtgggggctgagagccaagagcgctggaaccgctagtgtggcctgacagcttcctccagctccttggtttatttgcaaactggacttccagcaccaggccccctgcgaccccctcctgccttagtcccgtgggatcgggtagttcaagattttgaattcatggtttggcacacaccggcaagtctgaaaacctgcgggtcagagtggggcggaggcgtgggccccctaccctctgccccctgccccctcggaagcgcagccctcttccaggggttgggacgagctagcgcggggacccggggcaccggcaaggacccacccgctactgggacctggcgccggcggcgcctctcgcggggtggcaccgcccacttccgccttccgcgggcgcgcgctgcgcagtcttcgtcacagcgcggaggccttttgtcctcccgccctccccgtagtggccgtaacccgagtgacatgtttccttgggggcgtggaggggcggggtcggggccggagtgggccgtcagcacttaaagggcccgcggctcgggcgtaggaggcggtgcctctgcagcaagcgtggggcgcgggaacccgagcaggttcgggagacggaatgaagggccgggtgggctcgcgaggggccggggagtccgcggggagcgagggagtttccgaggggcgggtcgtgttcctggcagcgtccctccagggcaggcccgccccctttgtcccagttccccgctgcccgggctggggcggccggggttcattcattgccggcctgaggactcctagctcggccccgctccgcgctacagcccaaagcccagcctgagacccagccgccctcgtatgcccacggcctagctccccttccctccaacagacagactgggaaaaccgagtgggcgacggctgagcaaggtcactccgctgtcgggggcgcagccggcctcagaccagctttcgtgcttcccagggcctctctgcgaccactttcggggtccgcgccaggcgcggggcgggggcgggggcggcttcggcgcggcgggcagagtccagcgggcagcggtgggggaagggcgagccgcctggggagagggccgggctgcgagcctggcgatccagattccagcccgctgtcgccagctgtgggaccgaagggcaactgtttcacctctctggccctagtatctgtatctgtaaagtgccagtgataacacctgtctcaccgagatgctgggggaattcaggaaaatcatgcaaaagtgcctggtacggagcctggcacgcagagggctcttggtcaagtgggttggagctgcgtgagcccagaaggggatagaggcagcgtggaggaaggcggcagcgggcccggtcgctgggaatgaaaggcctcagtgtctggggcttcctccccgtactacccgcagagtttgttcagggtggaggtgcgcacctggccaagtccacgtctacacggcccacccagagtagcctaagttgggcgggattcctaactctgagccaggagtgaccgggctggccctggcatgggcagaggctgagcgggggttggggtggggccccctccaggaccaaccacggtgtggttgcccctgagctggcctcagcctgcctggcaaaggacctcacccttgaggccatgtgatctatttcctgcttcctcccagctgacccttgagggaaagggggtgggggccgcctagagcaggaggtattagtcactgcgcccaggagccagtttacacctagcgaaggcggaggcattggacaagcctgggtctgagcagacagaacccyttcctgcgaccctggagtcccaatcgtgctgccattttccttctgcccaggactctccagtcctcagtcaccttggacaaagaagtgtggatcctcagattccatcttttccaactccaaggcaagtggaactagaaaataaggtgcctgtgtgtcaggtctccccagctctgctgtggcgggcccttaagatcacctcactgaaccctcacgctgcctcatgaagtttatacaattattagctctgttttacagagatagaaactgaggccaagaggctaattaatttccaaagcctaaggccagaaagtgatggtacccagacttgccccagggctgacttctgagccagtctggtacctagggcacactgccgcctccttccaaagcgagcttagggggcaggattccagtgggaaggaagctctgagcaggcagcctcagccacctctgagactctgtatcctgggccaggtgccatggcagagaaggtgctggtaacaggtggggctggctacattggcagccacacggtgctggagctgctggaggctggctacttgcctgtggtcatcgatarcttccataatgccttccgtggtgagcggggcagtggggctggggctacttgaggggatggcagaagcaaaaccctgggttccacctccaccaccgggcggggaatgtgtgtctggctagtccctgggaacacagcaccccatgtcgtgatgatgtggcctacatgtaccctaccaggagggggctccctgcctgagagcctgcggcgggtccaggagctgacaggccgctctgtggagtttgaggagatggacattttggaccagggagccctacagcgtctcttcaaaaaggtgggtgcaggctgggcacggtggctcacgcctgtaattccagcactttggaaggccgaggtgaggagatcacttgagcccaggtgttcaagaccagcctgctcaacacagtgaaaccccatctctacagaaaaatacaaaaattagctgggcatggtagcccatacctgtggtcccagctactcgggaggctggcatgggaggatggcttgagcctgggaggtggaggttgcggtgagctgagatggcaccactgtactccagcctggacaacagagcgagactgtcaaaaaaaaaaaaaaaggtgagtgcaggcaggcaggctgagggcattgccaaggactaaaaccagtagagcaacctctggccatgtcacccctgcagtacagctttatggcggtcatccactttgcggggctcaaggccrtgggcgagtcggtgcagaagcctctggrttattacagagttaacctgaccgggaccatccagcttctggaggtgagaggcatgggacagggcacagacactaggagggtgtccagctggaccccagcctggcaggcagtgccaaacacagagcccaagctgtatcatcctggactcatgtctttacctcccagtctcagtttccccatctgtaaatgagagtgctcatcacctcagccccattctcctgtggaggagtaacagggtgggagtaatgtgtgaggcagaggtcactgatgccatctctccacggccagatcatgaaggcccacggggtgaagaacctggtgttcagcagctcagccactgtgtacgggaacccccagtacctgccccttgatgaggcccaccccacgggtggttgtaccaacccttacggcaagtccaagttcttcatcgaggaaatgatccgggacctgtgccaggcagacaaggtgagggcccccttgacagtgccctggctccactgatcgatggactcctcagggcccaccctgagcccaggggtgggattccgaacacccccactaaggaggaagctaaggctcaggcagttgcagtggagggccccatcccctgcttgtttctaaagataataaatagacaactggccgggcgcagtggctcatacctgtaatctcagcactttgggaggcccaggtgggcagatcacctgaggtcaggagttcaagaccagcctggacaacatggtaaaacccccatctctactaaaaatacaaacattagccggccatggtggtgtgtgcctgtggtcccagctattcgggaggctgaggcacaagaattgcttgaacctggaaggcagaggttgaagtgagccaaatcaggccactacactccagcctgggccatagtgagactccatctcaaaaaaacagaataggcatgaggagggctctgggttcagctgggacacgctgcctgtgcctctggcctcaccacctgacccacatcccacagacttggaacgcagtgctgcygcgctatttcaaccccacaggtgcccatgcctctggctgcattggtgaggatccccagggcatacccaacaacctcatgccttatgtctcccaggtaaggcaaaagggaagggacagaggagtggccctggggttaaagctggtgcctgggatctgggacgaactgacctgatctccacctccagktggcgatcgggcgacgkgaggccctgaatgtctttgscaatgactatkacacagaggatgscacaggtgagcctaggaccagggggacctaggagtgggagccaggaaggagagtcagggggaacagactccccatccaacacactcccttctctgcaggtgtccgggattacatccatgtcgtggatctggccaagggccacattgcagccttaaggaagctgaaagaacagtgtggctgccgggtaggaagagaagggagaagtgagggaggggagggaccagatccaggcagagcggcccagaggcgtggtcagtccagcccgctccataaaccctgttctccgtgggccagatctacaacctgggcacgggcacaggctattcaggttgttgggtatgccttgaggatcctcaccaaggcctcagaggcatgggtacgcccccccgccccacccacctcacccacctcaccccacccagctctcagcaacagagcagctttggcccttcccactcacctctctggagggtacctggcactgcccagtctcctcagcctgcctagcacccggtgcctgcgggccagccgctgctctgcacttctgcttcttaaagacctggccagcagctgggccagggccggctcagctaagctccaactacctcctgtcttgcagatcccgtacaaggtggtkgcmcggcgggaaggtgatgtggcagcctgttacgccaacccmagchtggcccaagaggagctkgggtggacagcagccttagggctggacaggatgtgtgagtgctggcctgacccctgcagttaggggccagggaggggctaaatcagatctgggcatgcccacccagggcgggctgtggggtgggggaggctctgcattccaccgtgggccctgagcacacacctcgccgtgttgcaggtkaggatctctggcgctggcagaagcagaatccttcaggctttggcacgcaagcctgaggaccctcccctaccaaggaccaggaaaagcagcagctgcctgctctccagcctctggcaggaact

SEQ ID NO: 95697 - DNA, 56482 bp, Homo sapiens
  misc_feature (1)...(56482): n = A,T,C or G
gtgtccacaggggacaaattttaccatttatataagttcttccaaatcgcagacctagtggcaattctggatcttgtctctaaattttgatgatatattgtaattgaggcctgcagcttcccatgagttatttaactgttaacaccaacaaaatgtatgtactgctagaaaacagatcatttctagcctttcatggactggatcctagagttttagaagcagctggtattttctctctcaatggctcactttatgaaaagccaaagtatatgtagtaaaattgtatcttggaggccagaaaaatatttttagcataattttgttcattgttttctggatcttcttgctacgttggttcagatgaaaacagttttttctttccttacatagcaatatgttgtttatattcttgtataagtttgtgttaaggattgaagcttcatttaattactgcagtcatctcttaaaattctcctttcactgtagaattctttccctaggaacagggcagcaaatgtgagctgtgtcatcagaaaccaagatttcttgattttctttcttgtaggtagcttcctttctttgtatcacaggccaatctgaaagtattcttccagaaattctgtatgtttgatacgaaggcatgcaaagccaacttttttttttatactttaagttctagggtacatgtgcacaacgtgcaggtttgttacataggtatacatgggccatgttggtgtgctgcacccattaactcatcatttacattaggtatttctcctaatgctatccctcccccattcccccaccccacgacaggccccagtgtgtgatgttccccgctctgtgtccaagtgttctcattgttcaattcccatctgtgagtgagaacatgcagtgtttggttttctgtctttgtgatagtttgctcagaatgatgcaaaaccaactttcagaataaaatggtgagcaaaaacctgcttaggagaaagaatttaggtctgaaatttgcttgatacttacagttaggccaaagaaagttggataatcctgagaaaatgtcagcaaatgattgtaacttgtttcttttctttcactctagtattctatattttggagtcaatctcatgcagtaattaatcgcaaagactctgaaggctgactactgggttcaaatattggatcttctgcttgctaggtttgagaccttggcaaattaaaatcttgagtgagtaccaggtacacgataaactcaaatgtccgtstttgctattattagtcctctgtggagtcctagaaattttctgacaccttcttattctccaaaatttcctttttctagacttcatgaggaaaacacacctcttcagattaatctgtttttgagatataagaaaattccaaatatacaaattcctttaataggtatattttggttgcctcttcttgataactgctaggaagacactttaatctcaccaaaaaaaaaaaaattctctctaaattacacttttgtttgcattttcttagtacctataaatagtaagtccatcctgtgacctgggattatcagaatgggtggccttcctttgatctgagaattttgcctttcttgctagacttggggacaaaggtaacttgtgtacctgtaactctcagcccatgagctctgtgcctttttggacttagttttcattcaattatcatgtaagacagagaaatgtcttcagggggaaaattctgtcatgaaataatagagtaggaagtgacttcagaggtcaccaggacatctcttttcttttccaagaactgaggttcagagaggagacatgactcttttggggaacacaggacagggcacaggcaaaggtgggacttactgcacagtccttcctcctacagcacaagttgtaatggtacagaggtgacattaattgattccgaaaaaaccttgaaaaacaaattaacttaatgcttattttcttcattcttgacagaagaaaaaacataaaatcttgtgaatgagattcaaatgtctgagaaattttctatctataaatgctttcatgacaaggcccagtcagttatgcaattacactcaagggtgcatgcactatttgtgatgttgttttgtaggcattcaatgaggtaatacaagacaagtgcttggttcaatgcttggcccacaggaaatacttaatgaattttagctatttctattactattatttgcctacatataggaatcctcttttagccaaaaggctaggtagtgaaagatttgctcataatcttggatataattaccatatcattcttcacagtatctgaagaggcagacttcagataatagcattatcattattgaaatctgggaaaacacagacactaaaatatttgcaggcatgtttcaattactcaagtaggttagaagcagaaaaacatattctttatttcctgtattttcaaccccaggtttaaatacgtcacttttacatgtttttagtttttcaaataactaactataaaaaggaaaactgttttattaaataaaatatacaaaagtaaaccagaccactctagaatctgagcaaaggaagttttgtgggcttctcctggatacttctccccttccccatcaacagacaagctagaaaaggagaaataggtttgtttgaacacttctcttttacaaaaataaataaagaggaacaaatatgtgggccacgttttaaaaattgtatgtgtttttccattacttatcgagcaactgcttgctaagcaaggcactaagtgacttaaatgcacaaactcattgaatcctttcaactctgagtagaatgatttttatcatcaccattttacagataaggaaactaaggcagctgcctaaagtcccagagcttgcaaataatggagtggagattcctctaagaggtcatgattccaggatgaaactctttaatcactatcttgtatagtcacattactacacaggtgggcaaataaagaaaacaaggacagaaatggactatgatttaacgttggatttttaacagcagttaggaatttgctaattcaataccacaggattaaaagttttccaactaggaagccccagagaaaatgaagacatatttattaaattataataggcctttaaatgactgtgtggacatgatcatacaacttgacacgttttttcacgggtatttctcatgcagtccagtctggatccacaacatgctcctgaagggtgtgtggcatgaagaagtcactgccctggagagcagggaactgagaggtaacaatccatgaggggttttcactttgcccttgcccttttcctcctccctattccagtagacacttggctccgtgctcatttcctcagaagaggatgaagcagggtgaaaaatgaaagttgcctgacagctacttctctttctgctgttagtgcccaaacccaaccacagaaaaggaaagaattcttgagcatagattcttgaagggaaacgattttcccttcaggtgaactgctaataatattaacaattgctctcactcatggatccctaactatgcattaggcacactttgaagcacatatctgtgtactcatttaattctgtaaaagcttatgagagagttattactaatattgttagaatgctccatgaagatttgtttttgtctgattttatttagtgctatatctctatttatttacttatttatttttgagatggagtctcgctctgtcgccaggctggagtgtagtggcacgctctcggctcactgcaatctctgcctcccgggttcaagcgattctcctgcctcacactcccgcgtagctgggattacaggcgtgggccaccacacctggctgatttttgtatttttagtagagatggagtttcaccatgttgaccaggatggtctccatctcctgaccttgtgatccacctgcctcggcctcccaaagtgctgggattacaggagtgagccaccgcgcccagccttatttactgctatatctctagcgttcagaacaatacctggcaaagattaggaacaaataaatatttattgtagaatcaatctccatctaaaggtgaaggagctcaggcacagagagattaagttacctgcccaaaggcccacagctggtagaagactaggagagttagagcacccccacctgggctgggagaagagacaagaggatgggaaagctgtgcttcccgagtagaggagatctgggaccctctcctgggaccctcttgtgcctccagggaggtagaaagaccacagagaagaagtggctctgttgggtactgggcaggtggaatctcaggcagcgttgtgatgaaaccaccacactggggcaagaaggtagcaaaatgagaatgctacaggagctgcagagagctcctggcgtggaggccatgcacacaaggacaatggatgcctctagagcagcctctgttgatcggtgaccaaggatcaagtggctgctccttccccaatccttgatgtgttactctgctttcctccagccaaaacaactggtcgtaaaagataaaattgtaatacaaaatgagaaaagtgttattttttgtatacttgatttttttttaactgaagcagtctcgtattatatataggcagcattatgtaaggaaaaatattaaatgtgtcatcagaaggcctagattttaatcctagcttgtcccaacaaaaattcgcaggcaatttacctaatttccctatgtctcagtttcctcatttataaaaatagggattaaaaatcattgaggtgaggataaaaagatttttttgaaaatataagttaaagctgtcaaagataataaatgcattgtgttaattttgtatagctcccactcccatcccatttgcacttgattttgacacacatgtatccttttttggtgggtaaagggctacacttgcgtcttctctttttacatactagtatttacatttattttcatttctgacgtttatactaagtggatgtaaacatatttttcaaaattaaaagcactttagaaataagaaatattaaatgattgatatgttgctattgttgcctgtgggagtaattttctggaagttgaaagccagctggtcattgaaatgtttcatggataatcctcaggctcagtaaggcccaggcaggcattttattggatcttttcactgagctgtcctaatattatagataaaaataattcctgcactaagaagtgaaacaataaatttctaaaatgtcaggcatttgttactaaattgtaaaaggatcacaaacaagatgaattggaaacttctacaccaggtttactttaaacactttggcttttctgagaaatgagagtaaatgaaataaaccagcaacaatgcaaatttacagtccttgcaaaaacgtgaactataaattagggttattctatcatcagatgtatattagtggtcatgacatgcctggcactcctcttagaactgaggagacaatagtgaaaaagacagtgaagtgcctgcctttacagagcttacattccactgggagaaaccaaaaacaaacaagttaaatacaccacattgttagacactgcctcgaaggaacatacagcaggtacaggagagactgtttctaaaatagagaagcaagtcatgtgcacatctgcaaagatgatttcattacattcaggttttcttattctccaggagcctatggtgtaaaactgaaaataagtgaacatgtaacagtgggcatacatatgcagctataactttgactttaccttgtatacaaatgtgttggtttatttatacccagatatcctgtataaccagcagtcttcgcaggcttgaactgcctggcatgcatgttttatctaagaaaagaaggaagagcgttaggtagaaggaagttgcctgtcctctcactggctcgtgattatcacttactcgtcatataaacccaaggcacagtcacatacccagggatacaagacactgcagactcccgagagacataacacaggtaagtcatattactgaactccacataggtaataaatgagatatgctttactctttacttcagagtttttattattctcatatcctgtttgtgactaactgtcttgtgagctattttcatgatggtgctcactctgaccttgtcttacccagaacctctccatatatgcgaatatgtgaaactcaaatagtcatttttaaggaaatataggtacaggagatttaagaagatctcttcaagtggattttaacatagaaaatataatcaatgctagaggaaaaatcctgtcttaatcagggtttgttactacttccagaattttcccaagtgattcttcaataacttggattgatggagtagagaatattatctcatggctgttcaatttctttcctttgctttaaagtttaagacttttactggtaatattttatattattttaaggcacattttgttgaagcatctccatgttttgataagaattgcaacctatcatcttttggcttcagagatggtttaagggatttaccccaggccaggaatttcaactcacagctcccaaaggatatttcagttattcctcttgctttggctttaatgtgaaacagtcacttaaaatgacatttagttgatatttgataaaaaaaaaaaaaatagagctttcagcttgctaattcaaagttaaacatccagtgcttgattgaaatcaatatcttactcagtcaacaacaattcttctatttctctattgtcctataatttaactccaacctggcaacttttccagaattgaacttgaaatgcccagggacactgtgaaatgagggaaattaacattctttaccatcaaatgttaggggtaataaaaagctgttttaatgtcagtatatgcaagaagttcccctgtgaacaatagtatctcacatgattgctgtctgaatccaatttttacatttcagaacaccagggtctatataataggagtgtaaacatgctctaggccattacattttgtataagtttattactgggcaagttaagatctgcatcttaaactcaaagaagagctatagcaaattcacaagtaatctttgtttttatatctctaactcagattattgcgcaattactaagcatgtaaaaaactgtgtctggaatgcccaaatatgtttgaattcttgatgtgtcgtatttaagagtaagagcttacgttggctaacattttgtattgaactgtagaatggtcaatacttaattcctcatttgtaagttttctatcyaacaaaattattccaaaagttctcttttttgaactaaaaatatttcggctgaagtctttattaagatgtttagtataggcattggatattgattagcctgtgttgtcagagagttgaaattggattgttgtcatctttctggcacagagactagaatttttgagactattttttactgtgcttttacagcagtatacggaataatatattgttaaattgttttattataaaagtttgtaattttttcaatgattatgttaaaattgcctctgggattgaattaatcagatgaaataaatcagcattgtattagttagttttcacgctgctgattaagacatacctgagactgggtaatttataaagaaaaaaaagtttggccgggcgaggtggctcagcctgtaatcccaacattttgggaggccgaggctggcggatcacctgaggttaggaggtcctggccaacatggcgaaaccacgtctctactaaaaatacaaaaattagctgggcgcggtggtgggcgtctgtaatcccagctactggggaggctgaggcagggagaatcgcttgaacccgggaggcggatgctgcagtgagccgagattgcgccactgcactccagcctgggcgacagagcaagactccrtctcaaaaaaaaaaaaagaaagaaaaaaaaaaagaaaaaaatttgccgggcgtggtggttggtgcctgtaatcccagctactctggtggctgcggcaggagaatcgcttgaacccgggaggcagaggctgcggtgagacgagatcacgccattgcactccagggtgggcgacaagagtaaaactccgtctcaaaaaaaaaaaaaaaaaaaaaaaaagggaggggggcgggccgggcgcggtggctcacgcctgtaaacccagcactttgggaggctgaggcaggcggatcacgaggtcaggagatcgagaccaccccggctaacacggtgaaaccccatctctattaaatatacaaaaaattagctgggcgtggtggcgcgtgcctgtagtcccagctactcgggaagctgaggcaggagaatggcgtgaacccgggaggtggagcttgcagtgagtggagatcacgccactgcactccagcctgggcgacagagagagactccgtctcaaaaaaaaaaaaaaaaaaaaaaaaaaaaaaaaaaaaaaaaaaaaagagaaagaaagaaagaaagaaagaaagaaagaaagaaagaaagaaagaaaggtttagaccaggcacagtggctcacacctgtaatcccagcactttgggaggcccaggcaggcggatcacaaggtcagatgatcgagaccatcctggccaacatggtgaaaccccatctccactaaaaaataaaatacaaaaattagctgtatgtggtggcgcacacctataatcctagctacttgggagactgaggcaggataatcgcttgaacccaggaggcggagatttcagtgagcccagattgcgccactgcactgcagttccacatggctggggagacctcaccatcatagcggaagaggaagggatgtcttacatggcagcaggcaagacagaaccagagccaagttaaaggggaaatcccttataaaatgatcagatctcgtgagacttatttactaccatgaagtcagtatgggggaaaccgcccccatgattcaattatctcccaccgggtccctcccatgacaagtgggaattatgggagctacaattcaagatgagattctggtggggatatagccaaaccataacaagcattctataaagtaaaaaaaagctacaagaaagaaagrgaaagaaaggaagtacccaagatagtactttaaaaacactgttatttcccatataaaagagcttatttcctaatgcatatattaatattaaaagttaaatcttctgcagtggatagctatgttcatatgagtttatatgtctaagtttytatccagggtatttattagtcgtttatgtgttctttgataaaccgtataggttatttttcaaacagaattctaaatgagctttttatctatctgctgaattagtaactttacacgatatactttggggtgtaaggaagccagtggttaattttagatgcaaagatctttagatgtaaatatcttcaaacacaatcagcttttaaacttcaggcttctgtatcatttcaggaaacatgcagttttctctacatgagattcttaacacaacgacagtggaagggttcagaaatgaagctaacaggaaataagggaccagaatgatactgcagttttgctatgctagtcaaatcataccaagataacctagatgttatttctgtgtwtgatagaaagttggggtctaattatgcttattttccctctattgtctcagaaccattttagtctagtttcagtctcagaaccatttagtcctcactctatgtcatgtctgtcctatatatgaggttctgttttaagacaatgcacctctgagcaaataccgcattacaaggctttttatctaagtcttgctatctggtacatcaggtcctcctctcctgttctctttttttstttgtcttggctattttggtccttagcatttccatttgaaatctaggatccagtttatctgtagaatctctcgaagtttaaatatagacaatcattttggacacagcaaatggatgctgtgtcgctcccttcctactacttaacaaatgttatttattgttgtcttacattattgaattagctaggctgtccagcattatgctgaatagtagatgttatagtgggattcttgttacttctgacattaaagaaaatgcttttattgattcaccattatgtattatatttgctataagtttttagtagagactctttatatggttaaggaagtattcttctattgctagtttgataagaggtattttattttgttttttcattttgctaagaattttgatcacaaatgagtgataatgttataaatgctttttaaaagcatttagtatctattgagatgatagtatgtttcatgataattctgtttcttatttttgagagagagtgtctcactgtcgcccaggctggagtgaagtgtcgcggtcttggctcactgcaacctctgcctcccaggttcaagcaattctcgtgccttagccacctgagtagctggaatyacaggctcacaccaccacatccagctaatttgtatatttttttgtagagacggggtttcaccatgttggccaggctggtctcaaactcctgacctcaagtgatctgcccgcctcggcctcccaaagtgccgggattacagacgtgagccactgcacccggcctgatttttctcttttaatgtagtttattatacagatggatgttctgatataacatctkgtattcctgagacaaacagaaaatataattatgcaaataactacagaaatgtcatgtaaaaagtacagcttcattaatgagttacaactgttgaaagaatattttaaaaggaaagataagcatttgttagctgctattgggcctctgccaaatcttagacttcaagatatttttgcagagaaatatagatagctaccaacctatgctgagaatttttaaatgtcttctttacttgagtgaaatacaatataaaatagcatgattttgaaaattaacaataataaaaaacaatcactttgttttcatgcagaattcaacaggtggacactggtatctatgtggtaattgactgaatgagaaaaggttgtatgtttaacttttaatgctgttaactttttttctttttcgannnnnnnnnnnnnnnnnnnnnnnnnnnnnnnnnnnnnnnnnnnnnnnnnnnnnnnnnnnnnnnnnnnnnnnnnnnnnnnnnnnnnnnnnnnnnnnnnnnnnnnnnnnnnnnnnnnnnnnnnnnnnnnnnnnnnnnnnnnnnnnnnnnnnnnnnnnnnnnnnnnnnnnnnnnnnnnnnnnnnnnnnnnnnnnnnnnnnnnnnnnnnnnnnnnnnnnnnnnnnnnnnnnnnnnnnnnnnnnnnnnnnnnnnnnnnnnnnnnnnnnnnnnnnnnnnnnnnnnnnnnnnnnnnnnnnnnnnnnnnnnnnnnnnnnnnnnnnnnnnnnnnnnnnnnnnnnnnnnnnnnnnnnnnnnncacacctgtaatcccagcactttgggaggccaaggggggtggattacctgaggttgggagaccaatctgagaccagtctggccaacataagtgaaaccccatctctactagaaatagaaaaattagccaggcatgatggtgcatgcctgtaatcccagctactcaggaggctgaggcaggagaattgcttgaatccaggaggcggaggttgcagtgagcccagattgagccactgcactccagaactgggggacagagtgagactgtgctgcaacaaaacaaaacgaaacaaaacgaaacaccaaatagaaaccacaactaataatcaaactttttccactctgtaggcttttaaaaattgttttgatatttaaaacaaatacgtccaggaattataactatcatgcttttcctggataagaataatctcttaattattatgttttttatttactattttcgtgctcttagaccttttccactatttatttctaagctcaacatttctaagtaacctggaaaacagttccattgttctgatgggcatttcatttagtctcccaaatttgaactcctttatatgtatagttctccctgaaagaaatttatggctgtaaatcatggaattcttatttatttagttaattcttgtctctttcaaggacatttccccacatatctatatatgcggtgaatgctacatctcagttgggtggggactggactggctgatgcaaactgggcaggaatgattggcagtagctctctcgttttagcaaggagcaccagcttcactccacaacatctggacacagaagccagggccagaaaaaatggttttkctaggaattaccatcaccgtcacttcctgaacctgggagcttctagataggcaaccagttatttccaggtcatcctcttcccactagactccaggaatatataaacttaaagtcaagacttggcaagctagatttttatgattcgtgtttaaccttttatgtggtgtgatttctttctttcttttttttttttttttgagacggcgtctcactctgctgcccagtctggagtgcagtggcgtgatcttgggtcactgcaacctccacctctggggttcaagcgattctcctgcctcagcctcctgaatagctgggattacaggcgcgcaccaccacacctggctaatttttgtatttttagtagagatggggtttcaccatgttggccaggctggtctcgaactcctggcttcaggtgatccgcctgccttggcctcccaaagttctgggattacaggcatgagccaccgtgcctggtctgtgatgtgatttttgatgaaactttgttttgaggcttgagcccaactttcccttttatctaattagtattccattaatattctttaaaaactttcttagtagtgaataaactatttaaactcaccactttaaataaataatcatcattatatgcttttattcatttagttaccataattattatttatctttagtgtgctgtattcatagtgtttattcttgactacagaatgagatcaaagtcattattactgatgctaatgattaagtttgccattgtgctacgtaccttatatgtattacctcattaatttacaaatccatgttaatatcactatttataaaaagtggtctttgaaattcagggagattttaactggccaaagcccaaattcaaagaattgaatttcaaatgaaaacatttytttctcagttgtttgatcttacgaaattaaaatatattccactacgagtgcttaaagtcattaaccatttataaacaatgaaaatgaaaagatacaaatcactgaaaacccataaaattataatgactgaattcgtcggtattagcaaacgttttgaaatgtaagagtacttggctttcttcctctacagagggaatgaaggaagattgccccatctctgcagaggtctggagatggggtgtgttttgtggtgcaggtaacccagtaaaacccagtagcgtggatgtagtcagagggaaccagagagcagtgtttccctaggccttggatgcctagagggaaagccacaggtgaggaaagagaggcaaagacaggttggcatggcactcacattcctcttgcatgtgcccagcccttggctgtccttacccagatgtcctcataaactctgagctgtgtcacaagrgcaaacaaaacaggcaaaatatcaaatattacacattaccagtgactaaaaggagggtaaaatcatcttaaagtgggaagwtttttttgctccatgctctgaaggttggggtgtagttaccctcttaatctgaatatttttataaataaagtttgaatttggttatttcactgtaatgttctaagtagtgccaagagagagtcatgatcygatttcaaccaagtttccccgtatgtaattagatagtgatttataattttggttttgaaatatyctstaatgtctccagtaatctcaagagatgccataaagttttccaaaaaattctgaagaaaaatattgaggcatctctagagggctcttaaaataatccctccytttttctttttccagaattgcaccatgccaaactacaaactcacttattttaatatgagggggagagcagaaattattcgttacatatttgcttatttggacatacagtatgaagaccacagaatagaacaagctgactggcctgaaatcaaatcaagtaagtagcamaaataataaatgtaggaaaaatatgctttcagaaccttttgtttttcctcagggaaatgaaaaaaaaatcaaggttttcgaagctcatgtagctttaaattgaaaagcagcagttcagactaaataaatgctgtgtgatcaagcaaatttcctattagaggtgaaaacacaaaacttacagaaagagaatataaaggtaaaccagtataaagctttagcagacaatatgagctgaaataaacatgcgacattgtttgtttgtttgtttttctattttgtcactgggatagctgaagtgcacagagtttaggtaatttttccagtttcacgaccctagcaagtagaactgagtttcaaayccaggtcagtttaataccaggctcaagctatttgcactagacaatgccaaaacaacactactatgrtaacaggcatattaacaatgaattgccacagcctttggaagcatgagctccttaaaagtcattgcccttataaccattctttttcttagcagagacctcttctctggtgagatagtgtatcttatttcttattctcatgatactttaccattaatatccaaatgtttcttccgatattggaatttacacatgggattttaagacagtgaatatataataggtgaacattacttttatccactaattaattagaccaacatggatagaaaggtgcagatattacatgtaataaattttgcctgttagctttgaaatataagttcactgagtgcctcattccctattctacctgaacttttcattgttactaaaaatggaatttctgtattttcttaatatttccatagattttcagagttgaaaggaatcttaaagttcatgatggttaggatatagtttcaaatgttttaatagacaaagaygcaatgtaaaattttcttagaaaggacagaaatttcatttacacaaaaccccaagtgggtatcatgattttgctccatacagttgtcaaagattaggtttcttgttgatctgccaccccttggtgtcttattgacacagtgtgagatagctcacattccttccacattgtagctcagagaaagtgtgaaagagggaggggacacaccccttccttttactagaaagttgcatacgtcacttggtaagcccaacggtcacatattactacaaggaaaattgagagatgctgatttaattgtggataatcatttgcacaggtaaaaatccagagttttattactctaagaagaaaggaaagaacaggtactactaaggagcagtttctattacaaatgttatttggtctcatctgctgtccagtttagcagtgctctctggtgcttgaaacctgctacgacactccctctgctagaacctagaaaatctccagtcaacacattccatcactggatacttttattaaaatgttctcctggacaaacttggtaaattgcacatatgagtttacattttctccctttaaaacgttttttctctcctttaataacactgaagtactttaaaaaagggccaaagtccataaggacaaagaaataaagcttgaatgtagatatgatagcacacaattctggaagctaaaaagcaggccaaagcatggtaaagtgacttagtaggcccagagttcaaacataaaccttgaggagcagaaggcaagctaaatcaccagagatacagaaaaaggctcatgaatttgtagtagcagataactcgaaaagttgagctgacataggattgactagaaaaatgttgatggagaatttttcttgacccctttgtcggacttgtgatggggtgccccatttacttggcccactgcactcaatcccttgtgggagggagcacgtgagcaagcaagcatgggatccagctgaccgctttgggcgctggcaggagcaagctctgtgtgggccctgcagcagcacccaggttggggtgcctgcgacccctgaagccccagaggcatgttacaatgctctcttagccctgccatccatggacagcggtgtgttatcagctcagtgggcctcttgcctcatcacatggggtggctgccccccaccagcaagggcaaaaggccagtgcgacagccttttttggttccctgtacttggtgggtccctgcacttagtgggtcccaagctgttgtccagcgtccgaagaactacgttgtccagacacttgaaagatggtgaaggcagaacattttattaagtggtggaaatggctctcagcagagaggggagctggagagaggacagggtgggcaggtagtcttcccctgaagtcaagtcatctctcctccgaagtccagccatctctctaaagtcaagtcaactctctccagytgggccgcttttctttcctctaccaactgagtctgaagtatttataggcacacgattgtggggcagggtgggctataggtagttttggaaaaggcaacattcaattggtaaaaaagcattattcagaaagaaccaatcaggagacagcaggcaaacaggaatagattttcttatgttgggccgcaggtttcaggctttttggcttgaaggtggggtttcactggggacctgctgctgtctgcctagaatttctctgcctcctgcctctatcaatgtgaagaagcactgtgaccaccatatcccttctcgtccctagaataagcatggaggttactctcaggggaggatagaccagaggcttctgggacaacagacatgtcttgaggacacaatgctataataaaggtgggattcagtggaagtatagaaactaaatggtgagatccatagcacctttcccctgctctacaatcagaaggctacaaccaggctaatattccttgagcagaaattcctctctggggaagctgatcagctcaagttaatgaacgatcgagagtttcttaatgaaacagcccagcccaatctgttggcaagcccctcccatgcacactgagcttacaggtagtttttatttctttgccttttaagacataaatggcaatcaaaaatcaatagatatttgagaaaaatctaacagaaaacatacctaaacaaagaagcagaaaaaaagcaactctgaggaaaccaagatgatttagcgagaaaaaaataccacttcaaacattttttaaaatcctcagagaaataagagaagatattctatccatgaaacaagaacactgtaatagcaaactaaatatggcctgagaaggactctgtactactatatttgagtccctgtagatgaactgtaacctaacttagtaagtagacaagattaaaacctaacttaggaatatgcacctataagaagagctgagtcttggccaatcccagcagccacacttcaaccactcatatactgctgagtgttcaaactgtgttcaaataaggcaaactctgggctgtaaccaatctggttgtttctgtacctcacttctgatttttgtgtgtcactttactttttttgtctataaatttgttctgatcatgaggcctcccctggaggctctgtgattctgctgtgattctggggacttcccaattggcaaatcgttcattgctcagttaaactcctttaaatttaattcggctgaagtttttcttttaacaacagggtgctgtcaaaagaaatattcagagacaaacagttcttgaaaattaaaactatgatacaaacacatcaataaaatgacaaaaataaggatatttttcccaaaagtacaaaaataggacaaataaatgaaaaataaaagaagaaagaaaggaaacttgaggctcagtttaggaggtccaactttcaaataaaattctggaaagagagaacagaaaatagaagggagactaattttgaaagactattccttatacaaagttgagatctgtctccttatagctttcatagattggtcttgtacttaataattttaatccatggagaaccagattactccttcttttacaaccaaatatttaaagaaacctagtttctttaaagacgtcatggaaaaaaaagctatttctgagtggttagttcaatacaaatgtgctgagtgaagataaaggtctttggcagaatttgtaattgggtcccatttaattcatgcatctgtacctctaactagttaacaaattttggaacttccttgttagtttctctgatcatcattgtgaattttagtccaactttcccatccctgactctacttcttgatttagatgccattcttccctggaccatctgtgatttacaattttacaatcacacccaggtccaaaggacaattaagttttcttccttgagtgctcatttatattccctgatttgcatttcttcaccactcacgtaggtatcctccaaacaagttcctgttactgtacatctgccatttaaggtgtgatacctatggagaacacagtgtttaaggtacaagaacagcacagagcaaaatgggaccatcattcctgtcacaagactagacatcattgtaagacattttaccaagatcactgtagttattttgccagccacatcacattgaggcctcatattcagtgtaacaaaattccttaatgccttttaagctttagaatacttctgttgacacctccaacaacactgggattattattttttctggaatcaaatgaaggacttagcatttgccttcttaaatgtcttcttgttagatgcagcccagtgttccagttgtgggcagttatcccaaggttggctcaaacacttccagtagctaaaagctcactatctcacaagaaaacacattctgttgtcaatggctctaatgcgaacaaaattattcttcatctgccctttattctactaccctttgattctagtttcacatttcagaggtactcagaataagtcaaatttttcttctatttgatagttctgtcctatttgaggtggttatgttccacttagctagttttatctcctccaggtgaagagtgccaaggttcttcaaccaatcctcaaaaaaataagattttcaaatctctcactaatttggagactattctctgagcttgctctgatttttaatatctttctcaaaacatggctcatagaactaagaaaacagctgagcaagggttccaagtgacctcagtgtgaagcctamctttaccaggtgtgtgaccagggcaatttatataacctcttaacttcatcccttcatttataaaatgagatagttatcacctacttcataaggttgttgtaggtaaaagaagacctaatgggcatgctaaatatttagtacaatgcctagcacaaaaaaaaacctctccctgacaaaaaaattacgcattttgattccttcttgttcacatattttgcttcaaataaggcatcccaactcatgtcaatttcatttgagactttgttttgctcactgaagtatctcaggcaccaaaaatagtagttgggacactcattacttaaaggtaagtacttaaaggtatttttattccagatgtgaagtatagttctcatatacttatttaggtgtgcatatgaaagatacttgaaggagacacacaaagttgattctagtagttgtatgagggtcatcagagtgtgactggcactttattattttctctcttttaaaataattttatgtccaaaactaaggcactggttgggaaagttgtggtcaatacacatggcaaagtattacgtagtcattaaaaagatgatgtttcattgatttagaaagatgtttaaaagatactgtgaaatgaaaagtgatttacaaaacttgaaatgaaaagtgatttacatgcattataatttgttttaaaatatatatgagaaatcaattaaaatattaaaatggttaaaactatgtggctgaattattttcatttatcagtttataatttttctataataaatgtatattactttgtgacaaaaatataataggtttagataagaaaacagtaggatttacagataaaatattaatatggtatctgctatcagtctgtccgatatttgtgcaaaaatgcttgctgccttgctatacatttcaaatagtccctcatcaaaatgaagtggggcttcaaaattaatgactagaggtaactgacactcatctcctcaaagaaggatcaaaatagcaagtagataaccacacatctaatagagcatctaagagagaagactggaattcagctgggaagtgatgggaaacctctgaggcacagaaagaaaaggaagcgaagcagctgatgtggctggaatcagcttggagccgggagggactccccattgtggggaaaargtaagagagatatccccagtggtccacatttactccgcagactcctgcaattctagccatgggagagcccccttgggccttatgggccctgagactaggatagggagtgcctggagtccatgtgagaacattgttccagagtggaagtttgtgctgtgtcctacacaccccctgagacccaagtagctgcatcatggtgccacttggagagcccagtccccaccagactatatcttgccttggaacccaaaagcccgtgcatctccacatccctggagcccttctgacatccccccacaacaacccagagggctgcagcattgcaatgctggcttcacttaagtgttgtggctgggtgcctagccctttagcccatgtagtgtcccaaaccttggggaagagacagtgtagcataccagacaggctgctgctgtaacacaggaagctaaagcacgcactctccagagtctgagagctgcctgcctggggctgttgccacagacagcaaccataccttctctagtatcagggccacaatgtaccttcatgcacctttatgaagcccggggaccagctcaccaatatgccattccaggacctgaggatagtactgccacacttatcaccactagcatttatgtgcaccatctgcatgcctgaggaccagcccaccccacccactaccactgccactggcacccaagcacattatccaggggtctggggatcaacgtgccctgcctgctgccactggtgcaaacatgcactctcaggagacctgagaacaagcctatcttgcctgtcactgctgctgccaattcctgaatgcattgtccagtggcctgaggatcaacctactccaccagccaccaccagtgcttgtgcacatcatccaggggcctgaggtcaccttttctgcttgccactgtcattgggactcacaagcattgtctggggggctggatctgccttacccagcactgctggtaccagtgcatcccattcaggggcctaggaatccacacacccaggccactgtagccaccactagtgcctgaggatgagtccacttggcatccccctccccagcaaagactcaccacagcctcactaataactacagcctaagccactgagaaactcacagacaccactgatgctgactatagctgaagaaatcatatgaagactacattattgcacctacttagaatcaaagctaaagtaccctacccaaccaacactatagatatatctataggaaaaagggtttccctacaaaaatcaatccataaaactgaaaggagcgactactataccagatacacagaaatcaacataaagacacaagaaatatgaaaaagcaaggaaacaagacatctccaaaggaacccaataattctccagtaaccaattccataaaaaaggaaatacatgaaatgcctgaaaaagaattgacaataatggtattaaagaaactcagtgagatacaaaagaatacagataatacaaagaaatcaggaagacaatgatctgaatgagaaattcaatataacagatagatattataaaaaaaatccaaacaattctggagctaaagaattcaatgaatgaaatttaaaaaatacaactagagcttcaatagactaggtcaagcgaagaatttctgaacttgaagacaggtcttttgaaataacccagtcagaccaaagaaaaaaataaaagaatgaaaaaaggatgaagaaagcctgtattacatcatttgggaaaccataaagcacccaaatgtttgaatttggggattttgggaattccagaaggagaagagatggacaaaggcatagaaaaccaattaacaaaatgatagttaaaacttcccaagtctagcaagagattcagacatccagatacatgaagctcaggtatagattcaacattaaagtcattaaacattaaagtcaaactgtcaagcttgtcaagttgtcaagtttgactttgtcctcaaggacaaagagaattccaaaaatagtgacagaaaagtgtcaagtcatacataaaggaatccccatcagactgacagcagatttctcagcagaaattttagaggccaggagacaatggaatgatatgttcaaagtgctgaaaaaaaaaaaaaacctgtcagccaagaatactataaccagcaaagctatccttcaaaaatgaaggagagatcttttccaagatggctgaataggaacagctccagtctgcagctcccagcgtgactgatgcagaagatgggtgatttctgcatttccaactgaggtacctggttcatctcactgggacaggttggtcagtgggtgcagcccacggagggcaagctgaagcagtgtggggtattgcctcacccaggaagcacagggggttgagggatttccctttcctagccaaaggaagccatgacagactgtatctggaaaattgggacactgccacccaaatactgcrtttttccaatggtcttagcaaatggcacaacaggagattatatcccacgcctggctcagtgggtcccatgcccacggagccttgctcactgcttgtgcagcagtttgagatcgaactgcaaggcggcagcctagctgggggaggggtgtctgccatggctgaggcttgagtaggtaaacaaagcggctgggaagcttgaactgggtggagcctactgcagctcaagaaggcctacctgcctctgtagactccacctctgggggcagtgcatagctgaacaaaaggcagcagaaacttctgcagacttaaacgtccctgtctgacagctctgaagagagcagtggttctcccagcatggtgtttgagttctgagaatggacagagtgcctcctcaactgggtccctgacccccgagtagcctaactgggagatagctcccagtaggggctgactgacacctcatacagctgggtgtccctctgagatgaagcttccagaggaaggatcaggcagcagtatttgctgttctgcaatatttgctgttctgcagcctccgctggtgatataatggcaaacagggtctggagtggacctccagcaaactccagcagacctgcagctgagggacctgactgttagaaggaaaactaacaaacagaaaggaatagcatcaacatcaacaaaaaggacatccacaccaaaacccaatctgtaggtcaccatcatcaaagaccaaaggtagataaaacaacaaagatggggagaaaccagagcagaaaagctgaaaattctaaaaatcagaacaccccttcttgtccaaaggatcgcagctccttgcgagcaatggaacaagctggatggagaatgactttgacgagttgacataagtaggcttcagaaggtcggtagtaacaaacttctctgagctaaaggaggatgtttgaacccatcacaaggaagctgaaaccttgaaaaaagattagacgaatggttaattagaataaacagtgtagagaagaccttaaatgacttgatggagctgaaaaccatgggatgagaacatcatgatgcgtgcacaagcttcagtagccgatttgatcaagtggaagaaagggtatcagtgattgaagatcaaattaatgaaatgaagtgagaagagaagtttagagagaaaagagtaaaaagaaatgaacaaagtctccaagaaacatgcgactatgtgaaaagaccagatctacatttgattggtrtacctaaacatgatgrggagaatggaaccaagctggaaaacactccagtatattatccaggagaacttccccaacctagcaagacaggccaacatgcaaattcaggaaatacagagaacaccacaaagacattccttgagaagaacaactccaagacatgtaatcgtcagattcaccaaggttgaaatgaaggaaaaaatgttaagggcaaccagagagaaaggtcaggttacccacaaagggaagcccatcagactaacagctgatctctcagcagaaactctacaagccagaagagagtgggggccaatattcaacatgcttaaataaaacaattttcaacccagaatttcatatcctgccaaactaagcttcataagtgaaggagaaataaaatccttcacagagaagcaaatgctgagagattttgtcaataccaggtctgcttacaagagctcctgaaggaagcactaaacatggaaagaaacaaccggtaccagcccctgcaaaaacatgccaaattgtaaagaccatcaatgcaaggaagaaactgcatcaactaatgggcaaaataaccagctaatataatgactggatcaaattcacacataacaatattaaccttaaatgtaaatggcctaaatgctccaattaaaagacacagactggcaaactggataaagactcaagacccatcagtgtgctgtattcaggagacccatctcaagtgcagagacacacataggctcaaaataaagggatggaggaagatctaccaagcaaatggaaaacaaaaaaaaaggaggggttgcaatcctactctctgataaaacagactttaaaccaacttaaatcaaaagagataaagaaggccattacataatggtaaagggatcaattcaacaagaagagctaactatcctaaatatatatgcacctggtagaggagcatccagattcataaaccaagtccttagagacctacaaagagacttaggctcccacacaataataatgggagactttaacacctcaatgtcaatattagacagatcaatgagaaagaaggttaacaatgatgtccaggacttaaagccagctctgcacaagcagacctaayagacawctacagaactctccaccccaaatcaacagaatatacattcttctcagcaccacaccacacttattccaaaattgaccacatagttggaagtaaagcactcctcagcaaatgtaaaagaacagaaatcacaacaaactgtctctcagaccacagtgcaatcaaactagaactcaggattaagaaactcactcaaaaccacacaaatacatggaaactgaacaacctgctcctgaatgactactgggtacataacgaaatgaaggcagaaataaasatrttctttgaaaccaatgagaacaaagacacaatgtaccagaatctctgggatacatttaaagcagtgtgtacagggaaatttatagcactaaatgcccacaagagaaagcagaaaagatctgaaattgacaccctaacatcccaattaagagaactagagaagcaagagcaaacacattcaaaagctagcagaaggcaagaaataagtaagatcagaacagaactgaaggagacagagatacaaaaaacccttcaaaaaatcagcgaacccaggagcttattttttgaaaagatcaacaaaattgatagactgctagcaagactaataaagaagaaaagagagaagaatcaaatagatgcaatgaaaaatgawaaaggggatatcaccaccgatcccacagaaatacaaactaccatcagagaatactataaacacctctacacaaataaactagaaaatctagaagaactggataaattgctggacacatacaccttccccaaaataaaccaggaagaagttgaatccctgaatagaccaataacaggatctgaaattgaggcaataattaatagcctaccaaccaaaaaaagtccaggaccaggtggattcacagctgaattctaccagagatacaaggaggagctggtaccattccttctgaaactattccaatcaatagaaaaagagggagtcctccctaactcattttatgaggccagcatcaccctgataccaaagcctggcagagacacannnnnnnnnnnnnnnnnnnnnnnnnnnnnnnnnnnnnnnnnnnnnnnnnnnnnnnnnnnnnnnnnnnnnnnnnnnnnnnnnnnnnnnnnnnnnnnnnnnnnnnnnnnnnnnnnnnnnnnnnnnnnnnnnnnnnnnnnnnnnnnnnnnnnnnnnnnnnnnnnnnnnnnnnnnnnnnnnnnnnnnnnnnnnnnnnnnnnnnnnnnnnnnnnnnnnnnnnnnnnnnnnnnnnnnnnnnnnnnnnnnnnnnnnnnnnnnnnnnnnnnnnnnnnnnnnnnnnnnnnnnnnnnnnnnnnnnnnnnnnnnnnnnnnnnnnnnnnnnnnnnnnnnnnnnnnnnnnnnnnnnnnnnnnnnnnnnnnnnnnnnnnnnnnnnnnnnnnnnnnnnnnnnnnnnnnnnnnnnnnnnnnnnnnnnnnnnnnnnnnnnnnnnnnnnnnnnnnnnnnnnnnnnnnnnnnnnnnnnnnnnnnnnnnnnnnnnnnnnnnnnnnnnnnnnnnnnnnnnnnnnnnnnnnnnnnnnnnnnnnnnnnnnnnnnnnnnnnnnnnnnnnnnnnnnnnnnnnnnnnnnnnnnnnnnnnnnnnnnnnnnnnnnnnnnnnnnnnnnnnnnnnnnnnnnnnnnnnnnnnnnnnnnnnnnnnnnnnnnnnnnnnnnnnnnnnnnnnnnnnnnnnnnnnnnnnnnnnnnnnnnnnnnnnnnnnnnnnnnnnnnnnnnnnnnnnnnnnnnnnnnnnnnnnnnnnnnnnnnnnnnnnnnnnnnnnnnnnnnnnnnnnnnnnnnnnnnnnnnnnnnnnnnnnnnnnnnnnnnnnnnnnnnnnnnnnnnnnnnnnnnnnnnnnnnnnnnnnnnnnnnnnnnnnnnnnnnnnnnnnnnnnnnnnnnnnnnnnnnnnnnnnnnnnnnnnnnnnnnnnnnnnnnnnnnnnnnnnnnnnnnnnnnnnnnnnnnnnnnnnnnnnnnnnnnnnnnnnnnnnnnnnnnnnnnnnnnnnnnnnnnnnnnnnnnnnnnnnnnnnnnnnnnnnnnnnnnnnnnnnnnnnnnnnnnnnnnnnnnnnnnnnnnnnnnnnnnnnnnnnnnnnnnnnnnnnnnnnnnnnnnnnnnnnnnnnnnnnnnnnnnnnnnnnnnnnnnnnnnnnnnnnnnnnnnnnnnnnnnnnnnnnnnnnnnnnnnnnnnnnnnnnnnnnnnnnnnnnnnnnnnnnnnnnnnnnnnnnnnnnnnnnnnnnnnnnnnnnnnnnnnnnnnnnnnnnnnnnnnnnnnnnnnnnnnnnnnnnnnnnnnnnnnnnnnnnnnnnnnnnnnnnnnnnnnnnnnnnnnnnnnnnnnnnnnnnnnnnnnnnnnnnnnnnnnnnnnnnnnnnnnnnnnnnnnnnnnnnnnnnnnnnnnnnnnnnnnnnnnnnnnnnnnnnnnnnnnnnnnnnnnnnnnnnnnnnnnnnnnnnnnnnnnnnnnnnnnnnnnnnnnnnnnnnnnnnnnnnnnnnnnnnnnnnnnnnnnnnnnnnnnnnnnnnnnnnnnnnnnnnnnnnnnnnnnnnnnnnnnnnnnnnnnnnnnnnnnnnnnnnnnnnnnnnnnnnnnnnnnnnnnnnnnnnnnnnnnnnnnnnnnnnnnnnnnnnnnnnnnnnnnnnnnnnnnnnnnnnnnnnnnnnnnnnnnnnnnnnnnnnnnnnnnnnnnnnnnnnnnnnnnnnnnnnnnnnnnnnnnnnnnnnnnnnnnnnnnnnntaaaagaaactaccattagagtgaacaggcaacctgcagaatgggagaaaaattttgcaatctatccatctgacaaatggctaatatccagaatctacaaagaacttaaacaaatttacaagaaaaaatcaaacaaccccatcaaaaagtgggcgaaggatatgaacagacacttctcaaaaaaagacatttatgcagtcaacagacacatgaaaaaatgctcgtcatcactggtcatcacagaaatgcaaatcaaaaccatggtgagataccatctcacaccagttagaatggcgatcattaaaaagtcaggaaacaacaggtgctggagagggtgtggagaaataggaacacttttacactgttggtgggactgtaaactagttcaaccattgtggaagacagtgtggtgattcctcaaggatctagatatagaaataccatttgacccagtgatcccattactgggcatatacccaaaggattataaatcatgctcccataaagacacatgcacatgtatgtttattgcagcactattaacaatagtaaagacttggaaccaacccaaatgtccatcagtgttagacaggattaagaaaatgtagtacatatataccatggaatactatgcagccataaaaaaggatgagttcatgtcctttgtagggacatggatgaagctggaaaccatcattctgagcaaactatctcaaggacagaaaaccaaacactgcatgttctcactcataggtgggaactgaacaatgagaacacttggacacaggatggggaacatcacacactggggcctgttgcagggtgggggtagaggggaggsatagtattaggagatatacctaatgtaaatgatgagttaatgggtgcagcacaccaacatggcacatgtatacctatgtaacaaacctgcacattgtgcacatgtaccctagaacttaaagtataatacaaaaatgagggagaaatagtctttctcacacaagcaaaaactgaggaaatgtatcaccaatagactgttcctacaagaaatgcttaaggaagccctacatctggaagtgaaaggatgatatctaccatcatgaaaacacatgaaagtataaaactaactggtagagcagatacataaatgagaaagagaaaaaatcaaaagttattactatagataaccactaaatcacaaagataaataagcctttatctatcaatgaatacaaatgatttaaattccccaattaaaaagatacaaagtggctgaatcawaaacaaaatacaagccaactatctgctgcctacaattaactctgttcacctgaaaagacacacatagactaaaaatgaaggaatggaaaaaaatattccataaaaacaggaaccaaaagcatgcaggagcagcaatgtttatagcagacaaaatagactttaagtaaaaaatgtaaaaagagaaaaagtcattatataataataaagtggtcaattcagcaagaagatataacaattgtaaatatatgtgcacccaaatatatgaagcaaatattgttagaactgaagttagagatagattctaatgtaacaagagttggagatgtcaacacttccctgtcagcactggacagataatctagccagaaaaccaacaaagaaacattgggctgaatctgcgctagagaccaaatggacctaacagacatttacagaacatttcatccataggccaggcgtggttgctcatgcctgtaatcctagcactttgggaggctgaggtaggtggatcacttgaggtcaggaattcaagaccggcctggccaacatagcaaaaccccatctctactaaaaatacaaaacttatctgggtgtggtggcacaaacctgtagtcctggctactcaggaggctgaggcaggagaattacttgaacctgggaggtggaagttgcagtgagctgagatcgcaccactgcactccagcctcagtgacagacygagactccacctcaaaaaaaatttttttaatccataagctacagactgcacattcttcttagcagcacacaggatgggccatatgttaagccacaaaacacatctcaataartttttttaaatcaatttttaaaaatgaaaattatatcaagtattttctcagaccacagtggaataaaactagaaatcaatataaaaagacctttggaaactatacaaatatatggaaattaaacaacatggtcctgaatgatcactaggtcaatgaagaaattaaataagaaataaaaaatttcttgatcattacattgtgtgcatataccatgtaccccatagtatgtgcaattattatgtattaattttaaaaaggctatggctaagttcttaccataactcaatatgtaaatcaaactcttcataatcctcagactatgattttaataatctgcaattgaggctgcaaaaaataatgaagttttacaattaattttttttaacagtaagcatgtaaaatacagtacagtatatggtgtcactataaacctgagcttaagaacaaattctgtcactaattttaaatcaggttttctaacaacttaaacaaaacttataaaatataaatattccactacaagttgtcaagtgttcctttaaaaatatttaagaatttcatgattycataaaatcmtgctttgttttcaygatgatcagtaaaaatggaagtaatataacttctggttttgttatgaagttaattatttgctcatttcattttaagctctcccatttggaaaaatccccattttggaagttgatggacttactcttcaccagagcctagcaatagcaagatatttgaccaaaaacacaggtaacatgtttattgtgcttaagatttttgataactgaaacaaatacatgatatatattcaatattcattaaatgactttagcatagcatactatagtacaaataagaatggaatkarataagagaaaagtataaatataccacctgtatcagtttaactttccatgagttccctggacaattagacaattttattttatatcgcctcctgcttttcctgccttacatctgtttgctctccaagccctttttggagtttagctgaaaaattggacagggatgtttcattccaaactttggctagtttgcatatggtaagttattagagaaaattacttagcagaaaatacatatggcatatggaggttgaaatttcttagacttaaaattatatactcagtaatgtccttcatcctaatcatgctgaaaaaaatagggagtttctttgcttccactcagtgccatctgaggaaacttgaaggggatacttggcttccggattgttgcattagtgcccacacccatggtattggaagagaaacaatagaaactgttcttgtttttacctgacacactttctcccatcctatgctccattgtcttctctcttccctcaaactattctcacaccctttttgagccaaaagctacttttggcttcttttaaagctcgtttctttcaatcaatctgtagaatcaccattctctgaaacctatctccccaccaccattgccactgctatgatccaagccatagacacatacatagctcacaaataaaatgggccatgaatactaaacctcattttggaatgaaatagtgtattttaaaaatacaaagttttgtgttacactaacatgtttcaacaaataaagttactttgaaagtttagaagaaatggaaattatttatgaccagggaaattaggctttaaagtgaaaatgacatttaggtttaggctcaaagatagctagaatttcaagaggaagacttggacctgggcagtgcttttcaaactttatgtgcatcagggtcacctggatgctcactaaaatatactttgtgcaactttgagtcagtagaccttgggtgggtcccaagaatttgcattctcaacaatttcccagatgatgcaggtggtccatggatctcactttgagaatctctgggctagaacattctaagcagagagaaaatggcatgagaagaagaatgaacttcaaatttgcaggtggaagagaattagagaaatgcttagaaggatagattggatctgattagaaagatctagaaggatctagaatatggactttttttcttatgcaattgtaggtttttatctagaaaagcagcataactaccgctatgcattttgggaagattattgtggttactttgtatttgtggctactgcagggaagcatattaagagatcattgaaatggtccagatggcaaagaagagagaccaagaaaaatacgaaaaatttgtggatgtagaatcatcttagagacagtagatagacgttgccatgtggaaggcagtctatttaaccaggagaggaacagcatagacagagtttgccgttctcaatatgctatatactgctacttcctccttttcttcctccttctcctcttctctttcgtctctttctcttttctgttcaaaatacttttttcaacttgcaataccctcctcaatgtctgccttctccagttgaccatacgtgccatgcatgcaaggaatttacctcttctattcaatactactatatacagccactacttggggctgagtcacagttgaggcccgtaattatttgttgggtaaaaaaaggagagctggtttgagaaaaggtgtgatgactgcatttgaggatttgtggaagaatgttcaggggccaaaagagtaatcagagatatatccaaaaggaggctgaaaaaatgagcctgtggtttaggactaaaaatattgaataaggagtcacctccataaatttttagctgaagccttgaggtggaagtcaaagtagggatgaaaatgagtgaagaattctgaagactattcaaggtcagaaagacgaataatcaacctttgaatatcacacacacaaaaatatagtttacagaggaactctaaatcgttcaagaattttctttcgattttaacacctttattgaggtataatttacatacaattcatccactgtcagtatacagtttcttaatttttaataaatttatacagttttacaaaagcaatccattttagaaagcttctacacgggagcattttaaattggcaccattgagaaaacttttaggaagaccaatgatttattaccaaaaataatgattaacaaatgagacaaaagaaaaaaaaccctctattatttaaaaattttagtctccagtcagaaaacaaatgctcctgacaaaaactgtctgcaaaaataaaaataattcttgatacaaaataaattataacataggtacaggttatttattgcagtgttgcttgtattaacaaaagactggaaataaacctaatcagttgaggctagttaaataaattgtgggagaggcagttccaagatgactgaataggaacagctccagtctacagctcgaagcgtgagcgatgcagaagatgaatgatttctgcatttccaactgaggtaccggggattgtctcactggggattgtcagacagtaggtgcaggacagtgggtgcagtgcaccgagcatgagctgaaacaggggtgaggcatcgcctcacccaggaagtgcaaggggttaggtgattatctttcctagccaaggaaaagggtgacagacggcacctggaaaatcgggtcactcctaccctaacactgcgcgtttccgacagtcttagcaaacggcacaccaggagattatatcccgtgcctggctaagagggtcctatgcccagggagccttgctcattgctagcacagcagtctgagatcaaactgcaaggcggcagcgaggctgggggaggggtgcccaccattgctgaggcttgagtaggtaaacaaagctgccaggaagctcgaaaggggtggagcccaccacagctcaaggaggcctgcctgcctccgtagactccacctctgggggcagggcatagccaaacaaaaggcagcagaaacctctgcagacttaaatgtccctatctgacagcttgggagaccatagtggtttacccagcatgcagcttgagatctgagaatggacagactgcctcctcaagtgggtctctgacccctgagtagcctaactgggaggcacccccgagtaggggcagactgataccttacatggccgggtacccctctgagacaaaacgtccagagcaacgatcaggcagcaacatttgcggttcaccaatatttgctgttctgcagcctccgctgctgatacccaggcaaaaagggtccggagtggacctctggcaaactccaacagacctgcagctgagggtcctgactgttaaaaggaaaactaacaaacagaaaggacatccacaccaaaactccatctgtacgtcaccatcatcaaagactaaaggtagataaaaccacaaagatggggaaaaaacagagcagaaaaactgaaaattcaaaaaatcagagcacctctcctcctccaaaggaacgcagctcctcaccagcaatggaacaaagctggacagagaatgactttgatgagttgagagaagaaggcttcagatgatcaaacttctccgagctaaaggaggaagtttgaacccatggcaaaggagtttaaaaaccttgaaaaaagattagatgaatggctaactagaataaccaatgcagagaagtccttaaaggacctgatggagctgaaaaccatggcacgagaactacatgatgaatgcacaagcttcagtagctggtttgatcaactggaagaaagggtatcagtgatggaagatcaaaagaatgaaatgaagcaagaagagaagtttagagaaaaaagaataaaaagaaatgaacaaagcctccaagaaatatgggactatgtgaaaagaccaaatctacgtctgattggtgtacctgaaagtgatggggagaatggaaccaagttggaaaacactctgcaggatattatccaggagaacttccccaatccagcaaagcaggccaacattcaaattcaggaaatacagagaacgccacaaagatactcctcgagaagagcaactccaagacacataattgtcagattcaccaaagttgaaatgaaggaaaaaatgttaagggcagccaaagagaaaggtcgggttacccacaaaggaaagcccatcagactaacagctgatctctcagcagaaactctacaagccagaagagagtgggggccaatattcaacattcttaaagaaaagaattttcaacccagaatttcatatccagccaaactaagcttcataagtgaaggaaaaataaaatcctttccagacaagcaaatgctgagagattttgtcaccattaggcctgccctacaagagctcctgaaggaagcactaaacatggaatggaacaaccagtaccagcccctgcaaaaacatgccaaattgtaaagaccacccaagctaggaagaaactgcatcagctaatgagcaaaataaccagctaacatcataatgacaggatcaaattcacacataacaatattaaccttaaatgtaaatggcctaaatgctccaattaaaagacacagactggcaaattggataaagagtcaagacccatcagtgtgctgtattcaggaaacccatctcacgtgcagagacacacataggctcaaaataaagggatggaggaagatctaccaagcaaatggaaaacaaaaaaaaagcaggggttgcaatcctagtctctgataaaacagactttaaaccaacaaagatcaaaagagacaaagaaggccattayataatggtaaagagatcaattcaacaagaagagctaactatcctaaatatatatgcacccaatacaggagcacccagtttcataaaccaagtccttagagacctacaaagagactgagattcccatacaataatgggagattttaacaccccactgtcaacattagacagatcaacgagacagaaagttaacaaggatatccaggaattgaagtcagctctgcaccaagtggacctaatagacatctacagaactctccaccccaaatcaacagaatatacattcttctcagcaccacaccacacttaytccaaagttgaccacatagttggaagtaaagcactcctcagcaaatgtaaaagaacagaaatcacaacaaactgtctctcagaccacagtgcaatcaaaytagaactcaggattaagaaactcactcaaaaccgctcaactacatgtaaactgaacaacctgctcctgaatgactactgggtacataacgaaatgaaggcagaaataacgatgttctttgaaaccaatgagaacaaagacacaacgtaccagaatctctgggacacatttaaagtagtgtgtagagggaaatttatagcactaaatgcccacaagagaaagcaggaaagatctaaaatcracaccctaacatcacaattaaaagaactagaaaagcaagagcaaacacattcaaaagctagcagaaggcaagaaataactaagatcagagcagaactgaaggagatagagacacaaaaaacccttcaaaaaatcaatgaatccaggagcttattttttgaaaagatcaacaaaattgatagactgctggcaacactaataaagaagaaaagagagaagaatcaaatagatgcaataaaaaatgataaaggggatataaccacagatcccacagaaatacaaactaccatcagagaatastataaacacctctacacaaataaactagaaaatctagaagaaatggatacattcctcgacacatacaccctcccaaggctaaaccaggaagaagttgaatctctgaatagtccaataacagactctcaaattgaggcaataatttatagcttaccaaccaaaaaaagtccaggaccagatggactcacagctgaattctaccagagatacaaggaggagctggtaccattccttctgaaactattccaatcaatagaaaaagagggaatcctccctaactcattttatgaggccagcatcatcctgataccaaagcctggcagagacacaacaaaaaaagagaagtttagaccaatatccttgatgaacatcgattggaaaatcctcaataaaatactggcaaactgaatccagcaacacatcaaaaascttatccaccatgatcaagtgggcttcattcctgggatgcaaggctggttcaacatatgcaaatcaataaacgtaatccagcatataaacacaaccgatgacaaaaaaccacatgattatctcaatagatgcagaaaaggccttggacacaattccacagcccttcatgctaaaaactctcaataaattaggtatagatgggacgtatctcaaaatagtaagagctatctgtgacaaacccacagccaatatcatactgaatgggcaaaaactggaagcattccctttgaaaactggcacaagacagggatgccctctcacaccactcctattcaacacagtgttggaagttctggccagggcaatcaggcaagagaaggaaataaatgttattcaattaggaaaaggggaagtcaaattgtccccgtttgcagatgacatgattgtatatttagaaaaccccatcatctcagccaaaaatctccttaagctgataagcaacttcagcaaagtctcaggatacaaaatcaatgtgcaaaaatcacaagtattcttatacaccaataacagacaaacagagagccaaatcatgagtgaactcccattcacaattgcttcaaagagaataaaatacctaggaatccaacttacaagggatgtgaaggacctctttaaggagaattacraaacactgctcaacaaaataaaagaggatacaaacaaatggaagaacattccatgctcatgggtaggaagaatcaatgttgtgaaaatggccatactgcccaaggtaatttatagatttagtgccgttcccatcaagctaccagtgactttcttcacagaattggaaaaaaactactttaaagttcatatggaaccaaaaaagagcctgcattgccaagtcaatcctaagcaaaaagaacaaggctggaagcatcacgctacccgacttcaaactatactacaaggctacagtaaccaaaacagcatggtactggtaccaaaacagagatataggcagaccagtggaacagaacagagccctcagaaataataccacacatctacaaccatctgatctttgacaaacctgacaaaaacaagaaatggggaaaggattccctatttaataaatggtgctgggaaaactggctagccatatggagaaagctgaaactggatcccttccttacaccttatacaaaaattcattcaagatggattaaagacttcaatgttagacctaaaaccataaaaaccctacaagaaaacctaggcaatacmattcaggatataggcatgggcagggacttcatgtctaaaacaccaaaagcaatggcaacaaaagccagaattgacaaatgggatctaattaaactaaagagcttctgcacagcaaaagaaactaccatcagagtgaacaggcaacctacagaatgggagaaaatttttgcaatctactcatctgacaaagggctaatatccagaatctataaagaactcaaacatatttgcatgaaaaaagcaaacaaccccattaacaagtgggcraaagatatgaacagacacttctcaaaagaagacatttatgcagccaaaagacacatgaaaaaatgctcgtcatcactggccatcagagaaatgtaaatcaaaaccacaatgagataccatctcacaccagttagaatggcgatcattaaaaagtcaggaaacaacaggtgctggagaggatgtggagaaataggaacacttttacactgttggtgggactgtaaactagttcaaccattgtggaagtcagtgtggtgattcctcagggatctagaactagaaataccatttgacccagccatcccattagtgggtatatacccaaaggattataaatcatgctgctataaagacacatgcacacgtatgtttattgcagcactattcacaatagcaaagacttggaaccaagtcaaatgtccaacaatgatagactggattaagaaaatgtggcacatatacaccatggaatactatgcagccataaaaaatgatgagttcatgtcctttgtagggtcatggatgaagctggaaaccatcattctcagcaaactatctcaaggaccaaaaaccaaacactgcatgttctcactcttctctctcataggtgggaattgaaccatgagaacacatggacacaggaaggggaacatcacacaccggggcctgttgtggggtggggggaggcgggagggatagcattaggagatatacctaatgtaaatgacgagttaatgggtgcagcacaccaacatggcacatgtatacatatgtaacaaacctgaatgttgtgcacatgtaccttagaacttaaagtataattaaaaaaataaaaaaataaattgtggcgcatctacctcaatgaatccctatgtagccaaaaaaaaaaaaaaaaaaaaaaaaagcaagtacaccctttgggtacttgtaaagaaagatatgtaggggacatgggatgaggaagcatatctagtgggatatatattttatttgcttgtattttcataaagaaataatgtagaatactaattaaagtggtaccagtaaggtaggtaggtaagggagcaaaatgtggtggatggaagctagtcttcactggatattgttttacactctttgaattttcaaccatatgagtatactatctgttaaaaacaaactttttaatatagtaaattaaacatattgatgggcctctctctattccacagatttggctggaaacacagaaatggaacaatgtcatgttgatgctrttgtggacactctggatgatttcatgtcatgttttccttgggcagagaaaaagcaagatgtgaaagtaatgtgatccatttgctattcctagtattaattatatrccacctgccagacattgtgttaggtgccttagaaagttccttaatatcaaaagaatatgtataattttaaaataccaaattatattttaaaagtttaaaataaagtacagcaattccctatygtaccccttcacattaactcctccccagatgcaacccttttaaaactttgtttagcagtttctttaggatttacacatttccatatttctataggatawataaatatgacttcctctgattgaccaattgtaaatgatttctcaggacttatgatagtayaggttaagcattcctaacctgaaagtctgaagtccaaaatgccccaaactccaaaacgttttaagtaccaagataacagcacaagtggaaaattccacatgtaagtacttaacacaaactttagcaaatgtgcaaaattattgaaaatactgtataaaattacctttggctatgtgtataaggtgtraatgaaacataaatkaatttggtttttagatttaggccccatcccctatatatctcattatgtrtatgcaaacattccaaaatctgaaaaagtctggaattcaacacaattctgttcccaagcatgttggataagggatctcaacctgaaataacaatttttctcttacatagtcatcctttctgcttccttttcaccaagctcccaatattgtgatgtgaaaattttttggttaawtatcctgtgattagtaggctatgcaaataatgcayagaactgtgcactgtagtatgcttttatattttctttctcacttttcttccttaaaattagtaattgctttcttttgcttcttttcacttttactgctgactttccacagtatccaatagcctgccaatacgattttccacaaggtcaacgtagtgtcagttcatctgttatttccaatatttcttggagcgctctctaggagacttccattctttgtggagttctccaggttttctgcacagctgtcatcattggaattccctttgctgttattccagtgatgccattctatggagctggagtcctgttcctggakgctgccttctttctttgtttactccattgtttatttgggggcacatcctctagtattccaaaagttaaaatgaaggcttgatgacagcagatatgattatgacagatggcatggatatgtctatcttgtgagtcacactgcttcgckctggtatggttgtcctagatacttggtcacagttgtcatcctgagatctttattattacccaggattttttttttttttttatgttttcctgggttcattctcctgttttctttccttgcttttgtggaacagtcctctaagagcttactggkcataggaaataaaagtttggggcttttggggccttatttgtttaaagatgtttttattttattctcaaacttgtttatagtttgactgggtgtagaattctgatgaaagtagtttttcattagtatttgaaaggctgttgagaagtttgaattcaatgtaattactgaccttttgtatgtgacctattttttttccactctgaaagattacaaaacacgtgcccttagagttctaaaattttgcaatggtgagtcttggtatgatcttgttttcatccattgtgctgtttccttggtgattccgttcaatctgggacccatgtcctttagttcaaggacatttcctttaattctttcattaatgatttcctccccctttattttctttgttccattatagtagaattccagtaattcagatgttggttggctcttttcctatttcccgtctcttggcttttctgcattacttttagaaagcatttmtcatcagtccttgagttctaaatttctgatattgtgcttctaaatttataaaaattcttaggctgttttccgctaagaatggggaagggacagctgtctagtaatgtaaaatgaagaacatcccatgctaaaaccgcttaatagttttccaccaatcctcattttatcccctcccaaacctccttaaccccagttctagacatatccggtcatttcctgagccatttaaggattttgtgttgttgataggattggttcttggctttcccttcacaggtgccattcacccatctgcttactagcttcaaattttgtttgctcttatctcctctctttccacttccttgtgggttctatctttttaaaaatattcattactgtggtttagagatgaatgcaaaatgatatatatttgtcaaattattcatctttatgcagaattctaaatagacgtctttattacagcttctagtggtttcctttaggacgctcatcacagtctctattttaaagagactggcaggtggtgtgtgattacttgtttgttgtttgtctcctcaagctggatgcatcgtggggtaggaatcatgtctgtattattcaactgatcccccaccgccatcacagtgccttttacatagtaggcattacacacttgttgaataagtgatcagaaccacactcatcaaatgcacaccatgtgcctgtgttactctcagctctatgtgttatctcagtcagccctcctcccacttcaagataagtgctttttattgtcatgctcactttccagatgaagacactgagaaacagaagttacagagttgcccaaagtcacacaactgacagaactgtgaactgagcccagacagctgaatttagatcccatagcctcatcacctaggtatacaattgcttaaattagtaactaatttaagcattcctttagaatgaaactgctgttatcctcatcttccaagtaagaaaacaagagtttcatgtagtgtaaacaacttacccaaaattgttcagctagaagtggtgcagaaggaattcaaatcgtcactgactcaaaccccaggttcttaaccactgggtataataccacagtgcaagcagctgttcaaaacagctgcgcatgaatatttatgtacatgttaaagctaaagcctatagtcgaaagccacagcacaaatagcaggcagtcttatcaatttacttaagcacatatttaagcacatactatctacttagtatttattgtaaatactatttaattagcaccttctgatttgaatagagatatccggacacaaaagtatttacattgactaactccatgatataaatgtaaggtgtgtagggtctgcccacacacacacgtatatatataggcctagccaggaaataatgaagctcagctttgatgatagaaatacaactttttgacataagtacatttaggctctggagtcaaactgccaggttgaatcctgattcccttcttactagctgtcacttaactccctatttatagttcaaactctttgtaaagtgggaatacaacaggctctactttgaagtatgttggcaggattaaatgttagcatatgtgcctatggctaggtaggaagtgttaaatattaactattataattaatagtgttatatactttggtgttaattgtttttactatttgtcagacatggcatctgtattttacatatcattataaatgtagaaacagatgctctccaatttagaagtgtctaaagatttttgttccatgtaccaaacacccccctaatgtgcagtctatcaatttatcagtttgctcttctctacttttctattttctacctttctgtggctgaggctccataacagagaccacctcccagaggaaaatattcttcgaacatttatgataagagtaacactctacctttgtattagaataacaactctcttacataccaccaattccaaaaaaacaatttcaaaggacacagcaatccaagttcatgattaaatcatacaaaggcagaacacgttgcagaaacattgctgatagctatagactatctaattaacaagcaggacttggctaatatataatgaaaaatgcactgttctgtatttcatttcttagactgttggtagtgggctacattgctgccatcttgtggtcaggtgaaaatttcaaaggcagaatattgatgcacttaagatggatagtgaatatattcttgtcatatacaccttaaaaatctaccaaatacacacaattttacagtatttattactaaaaattccatttccaataaaaaaagaattaaaagcaaaagatgcctttggatattggtcaccatgacaatccttgaactcaccattagtgttactttggttatttaatgtatctgtgtttccatttcctcatctaaagaacaggatggggaagaagaatgagaaggcctgaggacattctgatgtcgtggttccaacacaaaataattttggtagtgcatatctgaaaatgcttttgagaaatatacgaacctctctaaaagtcatttgttaaactttcatagcaacaaattctcagggtgaaaaaacctcctctgaaaagggaggctagaaatttctgaatccatcaagtaaaggagtggctatctaggatggatcaggaaatgtgttttttaaaatatatctggaaaaaaaaagaagtgtaatcaaatcttatcttctttatgttattttggttgattgtactttaaaatgaaacttaaatactaattacactgtttattaatttacatttcattagactgaaataattcaccaaacttacaaagacaatctgggctcaaggagaagtcagtagcacagatataagagttttatttgactctgcatatacacaaacattggtgcacctgaagctctggaaatgcacgttagaagaacagaatttgccaggagtgcacacaggagtttttggaaagttgtccaacaatcaaattggccattacttttctgactgatgccaactgaggtgagcagatctgtggcaagcaccacatggttatcgactcactgcccttcaatgggattacaaattctgtgtaagcwgcagaaagactcataactaatgttttctttaaaactatgaacatactgaccacagagcactttatagaacaagggaaagaacataaagtcaaaataatgacaagctttataagcttcggtttttaaatctggcaaacatatgtaagtacatgttgagtatcccttatctgaaattcttgggaccagaagtatttcagaattggggttttcttcagattttggaatatttgcattatacttactggttgagcataccaaatctcaagaaccgatatctgagatgttcccctgagcatttcctttgggcatcatgygcatgctcaaaacgtcttggattttggagcattttggatttttggactagggaggctcaacctgtatgtaaggatgcttttgcaaattgtattctaaatataaggcattatgttgtggtagtatataccatctagctaagtcataatcataacagcaagtaaatcagcaaattggtacagtatccactatctgacttatcttaataaaggttggatttcattatagatcatttagacatattaataaatgatatatacattttatatttttgagtttggcttctatttcataaccaagactcaaacaggcagaattcttatatataaacaaacatctcttatcaagaaagaggccttgagtaaattatttggtcttcagagctttaagtagaaaaatgatgacaattaaaaaaatggatgttttatatatattttcctaaggatgttaatttttaaataatatttgtttatatatcaagaggggataactagatgatgcattttgtagatgatattcaagatggacaaatctgataatgaggcacaatggtagtccaatgagaaaatacataaaggcccaagatcatgattcattataaacgcaatagtgaaacgaagaactgccaaactagaagagtctagccttacgaaataaaataaatttctttaccttcagttacattatttagctttaaaaaagctaggttaagaaagagggaaattttaggaatctaaaaagacaagagaatcatttcactttagtaaatttaagaaaaaataagattttgtgggtaaaatatttagtcattatacacaaagaaactaagaactggtgacacaaaactatttttttaatccatgagcaataaagagatgactcacatctatagagaatcagacctaaatctccatgtcataaatttgaataaaaaatctagctacttctctttcttcttgaattcatgtgggagaataaagatggagaaatctacttcctcctcagatcatgttacttttcttctcattattcttaaagtgatattttctccttctcctaggagcagatgttcaatgagctgctcacgtataatgcgcctcatcttaygcaagacttggacacatatttaggggggagagaatggcttattggtaactctgtgagtatgttttatatcttaaaaaattcaagcaaataaaaggacaaaccaatagaagtataaaaacttactgaaaaaaagttacctatagggaggggatagaatttacagcaagaacaaaggttaaacttctttaaataaacctttttaaaaaatagatttgactttggaaccatattttatataattatatattggcagcraaaacttaaaaagctatcctaaaaatcaaagcaaagtaaatgaacctaactatgcaaaagaggtgcatagagaacacacagaatacatatgtactctaytagagaagaactatttcaagaagtatcatttgtaaaacacactaatctgattatacatctaagacagatatctcttagcttagaacaacaaaaaatcatatactattttcagtaatcatattgttggtggtactacaaactattggtattttttttctggtattattataattatattgtgggtacaaaaataaattgtgttgatgtcactgagaaccaggatcttcaatgtgggagaacggagatagagatgtaaggtgagtaaggtcaagtaaatatccattcctgaacttgaactacagctaacagtataaactcatatgtattttatatcaggataaattatgaagcattttatatctcgatcagttggaaaaagtttgtcttcatgaaagtattccagttaatagataagaaagaaagactgaaataaactatcaccactttccaaccccagaaaaattaattggcgtaggcatggaccatcaataatcacaaaaaagttagacaaccagatactaggcacactaccacctagtagtcttgccaaaaaattcaaatctaaacctgattacaagttgtggtaggtggaggtctctaccttcagggagactgcattttgggagataagactgcttttttgtagcatgctgacactctgctgtctgccctgttcagcccttctgggtgatacagaactacatttgccacatctttattctcaactttcaacctcttcacataccccttcatttcttctgactcccytcatagsctttactaaaatgctcctctccctgccctattgaaaaatttctaagaatttatttttcattttctattaagattcctttgtaaatgatgttctgatctcatctctgggcactctctcccttcttcacagtgctccacactggtgtgtgtgtccctcagacctaactcacattcccacttaagggcctttacgcatttccctatacctggaacgcttaatccccagattgctcactgcaggtcttaatctttttttatatttaagcctgggcttacgtgtcacctcttaaaaagtcctctctgaccatgtcatagtccatcacatgacttcactttttttttttcctaacccctatcattttgcatatttgcttttcccttctaaaataaaagctacatgagagaagggcttgcatcctaccttgctctccagcacctaaacctgggcatggcacacagtaggtgcttgataaatatttgaataaattctggatttattctgaattctgagtcttccagccagtagcttctcttggctgacagatgtttaataagttcctgaggcactagcaatcagctttattaaattctatacaaaaagaaaaaagagtgggccacatttaaacttcactctttgataatcatatggagccaaagtaacagcatacagattagtttctaacacaaagataaaaacatacaactgtacaatggtaggaccaggctgtcatcactaatccagtggccaatcttggcatacccctaatggtcagacatccatatattctttttatgtgatacaatataatgtattttagccacaaatatttcacttgaaattatataccctctaagagtaacctgcaccttcctttatactacgtagtacaaaggaacaaggtaagatgaaatacaaaggtcctgaagatagaacattctgtaggactagtgtgaaatcttcaataatttggtgatgtgaaaaaaagggtactgctttgaagagttaatggacataagcagatcaaatgcatagacctggaatagatcctgctttgtcctgtaaagggcaattttagaacagatggaaaaatacgtattggttattggataaggaaaatgtattgtcacagagaggtggagactggacaaggttacaagagtatgtaccattaagatctcatgttagtaaaacaacatctatcagcatagaaaaatatcttatacacgaaaatgtttaatagtagtaacctgattgctggagtgtgatatcagtaattttctgaacttytatcatataaacattctgcttttgtaataacaagattgttttgaatcttttagattaagaaactaatttcaattttggaatgctgatacagctacactttctatgttcaaatgaaaagtttgtttcctttaaactaggtaacttgggcagacttctactgggagatttgcagtaccacacttttggtctttaagcctgacctgttagacaaccatccaaggctggtgactttacggaagaaagtccaagccattcctgccgtcgctaactggataaaacgaaggccccaaaccaaactctagctgatccatgttgccttcaagtttgtttttctcgggggcatctctctcatcagataagacagctacatcagcctgccagataatccacatgctccctccccagctccactaagattttcactttagccatattctgatttttaaaaaggaaaataaaaacaaatctttcttcagtatctttttctttcagaatagcttctcatcatttacaattacagaaaaatagtatgtaatacaggcagaccttgctttgcacaggttctaacatgcacgaattgcagtcataatggtttagcaacaccattcttcccctcccccaaaatgttttggacttcagctaccacaattacctgtaattgcataaaacacaaactttgctagtagctctccagttcacatatcgctgtgtaaataacctatgtacatcatgaccaatgaccagtcacttctatcaaagactgccagaggtcactgcacatctgttattcctgcatagatagcaaagtgtgtagttgtattgctattgcctgcttgtggcccagtgataaatccctttgacattttacaaaaatgaatcaaaagagggaactccccaacaaagatgaaagtgcagcaaaggaacaaaaactgataatcctggaatgaaattcaaactgaatataaagagttatcgagaaaagagctgactgtgggaatctgacacggctcaaaaggctctagatatgcagccagagaaacttgtaaagatgaatttactgacatgaataaagttgttgtgatgagaaaaatgtagataccccagagatcaagagaaggagaagacaagccacagacttggagaaaatacttgyaaaacatgtrtctgacaaaagactattattcaaaattatatagaactcataaaactcggctgactctcttttcggactcagcccacctgcacccaggtgaaataaacagccacgttgctcacacaaagcctgtttggtggtctcttcacacggacgcgtatgaaatttggtgccgtgactcggattgggggacctcccttgggagatcaatcccctgtcctcctgctctttgctccgtgagaaagatccacctatgacctcaggtcctcagaccgcccagcccaagaaacatcacaccaatttcaaatccggtaagcggcctctttttactctcttctccaacttccctcactatccctcaacctctttctcctttcaatcttggcgctacacttcaatctctcccttctcttaatttcaattcctttcattttctggtagagacaaaagagacacgttttatccgtggacccaaaactccggcgccggtcacggactgggaaggcagccttcccttggtgtttaatcaatgcagggacgcctctctgattatacacccatgtatcaagggtgtcagaccacgcagggacgcctgccttggtccttcacccttagcggcaagtcccgcttttctggggaaggggcaagtaccccaaccccttctctccttgtctctaccccttctctgctttcctggggcaggggcaagtacccctcaaccccttctccttcacccttagcggcaagtcccgctttcctggggcaggggcaagtacccctcaaccccttctccttcacgcttagcggcaagttccgctttcctggggcaggggcaagtacccctcaaccccttctccttcacccttagcggcaagtcctgcttttctagggggcaagaacccccaaaccccttccctccgtgtctctacgctctcttttctctgggcttgcctccttcactatgggcaagcttccaccttccattcctccttcttctcccttagcctgtattcttaagaacttaaaacctcttcaactctcacctgacctaaaatctaagtgtcttattttcttctgcaatgtcgcttgaccccaatacaaactcgacagtagttccaaatagccggaaaacggcactttcaatttttccgtcctacaagatctaaataattcctgtcgtaaaatgggcaaatggtctgaggtgcctgacatccaggcattcttttacacatcagtccattcctagtctctgtgcccaatgcaactcgtcccaaatctcctgcctgtcccctcagtcccaacgccaagcgtcgctgagtctttctaatcttccttttctacagacccatctgacctctcccctcctagccaggccaagctaggtcccaattcttcctcagcctccactcctccaccctataatctttttatcgcctcccctcctcacacctggtctggcttacagtttcgttctgtgactagccctcccccacctgcccagcaatttattcttaaaaaggtggctggagctaaaggcatagtcaaggttaatgctcctttttctttatcccaaatcagatagtgtttaggctttttcatcaaatataaaaacccagcccagttcatggctcgttcggcagcaaccctgagacgctttacagccctagaccctaaaaggtcaaaaggctatcttattctcaatatacattgtattacccaatctgctcccgacattaaataaaactccaaaaattaaattctggccctcaaaccccacaacaggatttaattaacctcgccttcaaggtgtacaataatagaaaaaagttgcaattcctggcctccactgtgagacaaaccccagccacatctccagcacacaagaacttccaaatgcctgaactgcagcggacaggcgttcctccagaacctcctcccmcaggagcttgctacaagtgccagaaatctgaccactaggccaaggaatgcctgcagcccaggattcctcctaagacatgtcccatctgtgcgggaccccactggaaattggactgttcaactcacctggcagccactcccagagcccctggaactctggcccaaggctctctgactgactcctcggcttagcggctgaagactgatgctgcccgatcgcctcggaagccccgtagaccatcacggaccccgagcttcgggtaactctcacagtggaaggtaagtccgtccccttcttaatcaatatggaggctacccactccacattaccttcttttcaagggcctgtttcccttgcctccataactgttgtgggtattgacggccaggcttctaaacctcttaaaactccccaactctggtgccaacttagacaatactcttttaagcactcctttttagttatccccacctgcccagttcccttattaggctgagacactttaaattatctgcttccctgactattcctggactacagctacatctcattgctgcccttcttcccaatccaaagcctcctttgtgtcctcctcttatatccccccaccttaacccacaagtataagatacctctactccctccttggcgaccgatcatgcaccccttcccatctcattaaaacctaatcacccttaccccgctcaatgtcaagatcccatcccaaagcatgctttaaaaggattaaagcctgttatcacttgcctgctacagcatgaccttttaaagcctataaactctccttaccattcccccattttacctgtcctaaaaccagacaaggcttacaagttagttcagaatctgcaccttatcaaccaaattgttttgcctatccaccccgtggtgccaaacccatatattctcctatcctcaatacctccctctactacccattattctgttctagatctcaaacgtgctttctttactattcctttgcacccttcatcccagtctctctttgctttcactttggccctgactcagcaaattacctaggctgtactgccgcaaggcttcacagacagcccccattacttcagtcaagcccaaatttcatcctcatctgttacctatctcggcataattctcataaaaacacacgtgctttccctgctgatcatgtccgattaatctctcaaacctcaatcccttacaaaacaacaactcctttccttcctaggcatggttagtgcggtcagaattcttacacaagagccaggactgcaccctgtagcctttctgtccaaacaacttgaccttactgttttagcctagccctcatgtctgcgtgcagcggctgccgctgctttaatacttttagaggccctcaaaatcacaaactatgctcaactcactctctacatttctcataacttccaaaatctattttcttcctcatacctgacgcatatactttctgctccccggctccttcagctgtacttactctttaagtcccacaattaccattgtttctggcccggacttcaatccggcctcccacattattcctgataccacacctgacacccatgactgtatctctctgatccacctgatattcaccccatttccccatatttccttctttcctgttcctcaccctgatcacgcttgatttattgatggcagttccaccaggcctaatcgccgcataccagcaaaggcaggctatgctatagtacaagccactagcccgcctctcagaacctctcatttcctttccatcgtggaaatctatcctcaaggaaataacttctcagtgttccatctgctattctactactcctcagggattattcaggccccctcccttccctacacatcaagctcgaggatttgccccacccaggactggcaaattagttttactcaacatgcctgagtaaggaaactaaaatacctcttagtccaaatagacactttcactgaataagtaaaggcctttcctacagggtctgagaaggccaccgcagtcatttctttccttctgtcaaacataattcctcagtttagccttcccacctctatacagtctgatgacggaccagcctttattagtcaaatcagccaagcagtttttcaggcttttagtaggtttcagtgaaacctttatatcccttacggtcctccgtcttcaagaaaagtagaacggactaaaggtcttttaaaaacacagctcaccaagctcagccaccaacttaaaagggactggacaatacttttaccacttttgcttctcagaattcaggcctgtcctcagaatgctacaaggtacagcccatttaagctcctgtatagacgctcctttttattaggccccagtctcatttgacaccagaccaacttagactgtgcccccaaaaaacttgtcatccctactatcttttgtctagtcatactcctattcaccgttctcaactactcatgcatgccgtgctcttgtttacactgccggtttacactttctcctagccatcacagctgatatctcctggtgctatccccaaactgccactctaaactcttgaagtaaataaataatctttgctggcaggactatgctgcatctccttaggcactctctcatcagatgtcctaggtcctcccaattcttagaccttttatacctgtttttctccttctcttattccattttgtttctcaattcatccaaaaccgtatccaggccatcaccaatcattctatacgacaaatgtttcttcttacatccccacaatatcaccccttaccacaagatctcccttcagcttaatctctcccactctaggttcccacgccacccctaatcccgcttgaagcagccctgagaaacatcacccattctctctccataccaccccccaaaaattttcaccaccccaacacttcaacactattttgttttgtcttattaatataagaaggcaggaatgtcaggcctctgagcccaggccaggccatcgcatcccctgtgacttgcacgtatacatccagatggcctaaagtaactgaagatccacaaaagaagtaaaaacagccttaactgatgacactccaccattgtgatttgttcctgccgcaccctaactgatcaatgtactttgtaatctcccccacccttaagaagggactttgtaattctccccacccttgagaatgtactttgtgagatccacccctgcccaccagagaacaaccccctttgaccgtaattttccattaccttcccaaatcctataaaacggccccacccgtatctcccttcactgactctcttttcggactcagcccacctgcacccaggtggaataaacagccatgttgcacacacacacacacacacacacacacacacacacacacaaagaactcataaaactcaacaataagacaacaaacaagctgatcaaaagatgggcaaaagacctcaatagacacctcaacaaagatacaggtagcaataagcatatgaagaggtgcccaacaaaatgtcattagggaactgcaaattaaaacaagataccactatatgactgtcacaatggtaaaaaatccaaaacagcagacaacaccaaacgctgacgaggatgtggagcacgggtaactctcatttgttgctgatgagagtacaaatggtacagctaccttggaagacagtgacaatttcttataaaactaaacatatgcttatcatacaatctagcaattgtgctccttgatatttatttcaaggacctgaaaacatgtccacataaaaacctgtccacatatatttacagaagctttattcacaattaagaagtcaaaaaagagaggaggatgttggggagaaagaaagaagaggaaaagaaaagcccagataggtatgatcttatttaaggtgtttctttcctctcaatgttttatgaaattgaaaaaaaagttacctaatactttaggccgggcgcagtggctcacgcctgtaatcccagcctttgggaggccgaggagggtgaatcacttgaggtcaggagttcgagaccaacttggccaacatggtgaaaccccatctctactaaaaatacaaaaataagccgggtgtggtggcgggcacctgtaatcccagctactcagga

SEQ ID NO: 95698 - DNA, 41973 bp, Homo sapiens
gccatcgaaaagagttttgtttgtttgtttgtgtttgtttttgagacagagtctcaactctgtcacccaggttagagtgcagtggctcaatcatggctcactgcaacctcaacctccctaggctcaagccatcctctcacctcagcttcctgagtagctgcgattacaggcgtgtgccaccacacctggctaattttttgtattttttgtagagatggggtttcggcatgttgcgcaggctggtctggaactcctggcctcaagcgatcctcctaccttggactcccaaagtgctaggattacaggtgcaagccactgagcccagccgaaaagatctttgtttcctgtttttttcaacattctactggctttgtccatgaagtccttcatcaaacaaaactccttaatttttatgtagccaagtttgaagaagcgaaagtttgtagagaagttttttccatccccatctcttctgtaaaatatctgttcaagtcttttgcttacttttctgttgggatgtttgtcttttcttactggttttaagaattcttgatatattgccgggcgcggtggctcatgcctgtaatcccagcactttgggaggccgaggcgggcgggatcacgaggtcaggagatcgagaccatcctggctaacacggtgaaaccccgtctctactaaaaatacaaaaaaattagccgggcttggtggcgggcgcctgtagtcccagctactcgggaggccgaggcaggagaatggtgtgaacacgggaggcggagctttcagtgagcggagattgcgcccgccactacactccagcctgggcaacagagcgagactctgtctcaaaaaaaaaaaaaaaaaaaagaattcttgatatattatggatcataatccttccagggagcgttactccctgacatttctggcctaccctatctaccctatgcatgggctgagcagactcatatgcccagggaatgcttcaggtaagaagccatgggtatgtttaggaactacccgttaaagctggaggtgacatctgggatggctaagggggtgtgggtgaggctccgacagtatttgctgtacccacgttgtccaatatgaacagccacccatcatttaagactccttttgggctgggtgcagtggcttacgcctgtaatcccagcactttgggaagccgaggcagggggcggatcacaaggtcaggagatcaagatcatcctggctaacatggtgaagccccgtctctactaaaataaatacaaaaaattagtgaggcgtggtggcacacgcctgtaatcccagctattcgggaggctgaggcaggagaatcgcttgaacccaggaggtggaggtcgcagtgagccaagatcgtgccactgccctccrgcctggatgacagagcaagactccatctcaaaaaaaaaaaaaaaagactaaaataaaaaagactccttttatcctcttgttatctgggaagcttttcctaacctacctactccaccactccttccaaacaatagtttttctgtattgctatgagaccgagtacctaatctcattttatagtgttttatgcctgtctgttggcttatctgtctccttcactagtgtgagatcctcaaggcaggcaccgagtctcatccacctctgattctctggtaccgaacacagggcttggcacacactatttgctataacatgtgctaacacttgttaagcacttaccatgtgccattcgccatgctaaaagctttatgtatattatctcgcttgatttttacaacaatcctaggaagtaatatgttcctctagatgccacaggattgacagaaacaaaactcaaacaactttaagatagaagtgaattttactagttcaattaaaggaaaatctagaaacatgccttcaggcatggctggatccagacactcattgagcagttggggttctttccctccatctctcagctctgtttctctccatcaggcttcattctgcaagcaagctcactctacaaagagggggaagctagctgccagcaacagttgtatcttcctacttagcaaccacaatgggaaaaaccaacattcccactgactcagcagaaaagcgaggtctctgattggcgcatcctgtgtcaactgcttgtacctgctcatggggtggaagcacaatgattggcagcccaccaagaggtcttgcctaaaagaaccaaaataaaacaaaagagatgggaagccttcctgagcagaataaaaccatgatccaccagagatgggtccttgtgttgtcccattgcatcaatgaggaaagaggcacagatcacttgcccggggataccactggtgataagtagcagaaaaaacatttaaactgatgggtctgatgtcaagtcctgcaccccttgtccatccattatactggctcctcctatgaattctgggatggatgagagcccaggattcagatgacagacaaactcaggtttaagatctattattattattattattattattattattattattattagacagtatcttgctctgtcacccaggaatgcagtggcaacatcatagttcactgcagcctcgaactcctgggttcaagccaccctcccacctcagcctcctgagtagctgagactaaaggcatgtgccaccatacctggctaattttttttttaattttcgtagagatggggtcttagtatgttgcacctgctggtctcaaactcctggcctcaagcgatcctccagcttcagcctcccaaagcactgggattacagacatgagccaccgcacccagcctgagatccttttttgaggctgtgatctctatgagctcaagtgtcctcatcagtcaaatatgggcaataatagtatctctatctggtggtgaggattaaatgaaatcattcaaataatatatttagcatagggtctggcacataaaaagagctaaattaatgttagttcctattatcaataactattcattgaatgaataagtgagtgcatggtacctagactctaacatgaagactctggttagactctggttagagatgatacctcacgtatcatctcacggtgtgaaggcctgggagcagggtttagggagggctttggacccttgaaaatctccaccacggtgcaaaacactctccatggattttctattctttgagctgggcaattaacttttcttaatttttctttctttctttctttctttcttttttttttttttttgagacagggtctcataacataatgttacccaagctggggtacagtggtgcaatcacagcttgctgcagcctcgaacacctaggctcaggtgatcctcctgcctcagtttcctgagtagctaggattacaggtgcacaccagcatgcccagcagattttttttttcagatagggtcttgctatgttgtccaggctggcctcaaactcctgatctcaagttatcctcccaccctggcatcccaaagcactgggattacaggtgtgagccactgcaaccagccaacttttcttagttttacataaagtaaaaataaaagcatgtttagaaagtgctgttcatattattgatctgtaacttagctctaagcaagtttccaagcccactttctccttccaaccgaatgaccaccccaagccccttccattaggaattctaggccaggtgcagtggctcacacctgttatcccaggactttgggaggccaaggctgacagatcacatgaggccaggagtttgagaccagcctggccaacacagcaaaaccccatctctagtaaaaatagaaaaaaattacctgggcatggtggcacacacctgtaatcccaggctacttgggaggctgaggcacaagaattgcttgaacccaggaggcggaggttgaagtgagccgagatcacgccactgcactccagcctaggcaacagagtgagactgtctcaaaaaagaaaaaggaattctagagccaccactggcacccacgctccatacagctgggtttggaatgagcgctgtcctcaygtatgaccacgtgcaggtaaagagctttgaaggtgccaagggccatgagtagcttgggaggtcatctaggttctcccagcactgtggagtcaaggagtcctgaaggccggtcccaggcctgggcagggctgggtggggcagactgagacagggcaggggacaggaacgggatgacttattgaggtctctgacaggcctggcagaccagcagggcactacaactcttttcccagtagtaattatacttggcctgaaaaagctttagaattattcccacgttgagtgggcacacagtgtcctgagacatccttggccctctgagatccaggaaactgctctagatgccaaagttatagagacagtaggaaagtgcatgggtggagaggccctcagccccagcaggaggcaataggctgcctctctgagggctggatgcagtgggaggggaggggatctgaagggagaggaggcaaggaggaaaggaagcaaactttacccaactcttcagcggcccagctgggtgtctgcgatgtccacatatggctgagagctccaagtctgggacacagagatgccagcatgcaggacacgagatactgccttgttttctcctcctttcccctgcctttccccctgccccttccccattccccatccaaactctcctgctggccaggggtgtggaaacagttggatgtctttggccactctagctggagttctgccctatgtgatcttggctgagtcacttaatgacaataacccagtttgtgtggagtcacaaatggtgttcacatcataacgtcaccagactctccagccacacccattgtacacgcattatctcattcaatcctcatgacaactctggaagtgaaatcatgttagtgcacccattttgcagatgaggacactgaggcttagggagatggtgtgtgaccttcccaatgtcatatgtctaataaatggcaggaatggaattcaaaccatggtttactaaactccaaagctggagcccttctacagtctcaggatctagaacagggattattactatctctgctgttgacatgaggaaactgtggttcagggaggtcaagtgacctgccaaagcttgtacacatggaaagtagtagaaccaggatgcaaacacatttctttaccaccaacaccaatatctattttgccaacaaaacaatgagggggcctgagtaaataatctcaacggttaactccaccctccaattgagatacttttttttttttttttttttttgagacagggtctggctctctgtcacccaggctggaatgcagtggtgcaatctgagctcactgcagcctctgcctcctgggttcaagccatcctcccacctcagcttcccaagtagctaggactacaggcacatgccaccatgcccagctaatttttgtattttttgtagaaacagggttttgccatattgccaaggctgttctcaaactcctgggctcaagcagtcctcctgcctcagcctcctaaagtgagccaccacacccagcagctgagacactttttaattctgggctagggcaaagagaagttggaaggaaaatgggtgaaaataaagaagttctcagttatactgcagcttgttcatgcctcctgcctcgggatgccgcagtggctgccccagccctgccctttcagcctcagcccttccctcagtgaaggagagaaaaagtgatttaacaaagtgaggactgtcagcccttggagcttggacctttgagatctcacactgccccacccagtagcttccccttccagtagcgtggcaccaccttctgacccacccctcagtgtgtccaccagtgagagtggttcctaagggagagtgtgaagcacacgtaggcastgtcttacaccacacctgctgagtccaaaccatgggaggctcctctcctagaccctgcatcctgaaagctgcgtacctgagagcctgckgtctggctgcagggacacacccargggraggagctgcaatcgtgtctggggccccagcccaggctggccggagctcctgtttccgctgctctgctgcctgcccggggtaccaacatggcccagaagcgtcctgcctgcaccctgaagcctgagtgtgtccagcagctgctggtttgctcccaggaggccaagmagtcagcctactgcccctacagtcactttcctgtgggggctgccctgctcacccaggaggggagaatcttcaaaggtaaaggtgggcaccccagggtcccccagcccagcarcctgggtggtgggtcagaggaagatgtacaggaagaggcgcagaggcacaggcagtggcaagagcgcggctctgtcccttcttcccccagtctccgctggaatgttcctaccctgccgactgccccagaccgcgctcaaatgtggcttaaatccagggtctttcaatgcttagaggactgggatgaggaaggaagttgratgggaggcaggaaggggaggccataaatcaaaaacatcaacagtcctggggtgcaggcagggagagsgttcgtgctttcccagcctcggatatgtctggcaccttactgaggcttccacaacactaagtccacacctcctgcccactgacctaagtgttaatgctcgtctttagatgaaactacggaggtctcgagaggtgacatgacttgcccaaggtcacacrgggcgctggtggtgaaaccctgggctggaggttccccaaagccctgctctcttccttccacccactgtgctcagtgctggccagggtggtgacgtgtttgtcgggggtggtcggtggagaatcttggaggagaaaagccagctgggctttcggagtccagcagtgagcagcgccctgcggggcgggggcgggtaatggaacctgarcccatctgagtctgctctaatctgttcctaaactcttttctttgatttattgcttttgtagaaaagttcatgtgagcaaaaattcaagcttgtttttgmtaagcttagaggcattctccttcagggcagtaggggacatggtgtggaggtaccccttggtattattccctgtctgttgaggttctgtcgggtgtgacttgcctgggtcttaaacatctttgagtgggagaagcaggtttgattgagtgctaacagcctgtgaaaggaaggtgattaatgctatccatttaacccctgcaaccctgaaaggcagagaaggaaacaggtttggaaagtttcagagctcraaatcacagagctgggattggaacccagacttcccctgactccaaaagctgttgctctgtggggagtgaaggatctctgagtaccgtgttgaaattcagacctgttttggtggctgaggtgaatattaaacattaaccaccaccacaaacaacaaacattcaccaccaccgcaaacaccattgcaactcacaacattgcagaatcttgaatgtggaaatcagcccttgattctttcgaaagcctccacatcctttccagatggcacagaaagggccctcctacaatcccccggcacccacactgacccctcctgccrtgcttatcacatggtgtcatcactgtccacttatgtatctgcctctcccttgggactttgtgctgcagagggcaggagctgtgtcttgaatctttgtrccattgactttctcgtgctgtgacgtagcacctgcctggctcagaacaggcactcaataactgttgagtgactgattggatgaatgaatgagatgagtacgtttggagaagcagaaggaagagggatggtggggcaggtggtggtgatgggggctcagcatgttcggccacagcatttcctggcctgtggggccagcatggctgccttccatccatgctttccagcactggaactggtgttctgcttggaacagcaggaggtcagacagcctcatcgtgcctccagagccaggggacccccatgccagaatgctygggtcctttcttgttttaaaacccacaatagtcgggcatggtggctcacgcctgtaaccccagcactttgggaggccgaggcaggcggatcacgatgtcaggagatcgagaccatcctggctaacacggtgaaactccatctctactaaaaatacaaaaaaaaatagccrggcgtggtgrtgggtgcctgtagtcccagctactcgggaggctgaggcaggagaatggtgtgaacctgggaggyggagcttgcagagagccgagatcgtgccactgcactccagcctgggcgacagagcgagactctgtctcaaaaacaaacaaacaaaaaaaaacaaacccacaataaaggaggcacactttcactcataagtgacacctgggagctccttccagtgaagtccacacctctgtcaccctcatactgatcattcaacagatatttgctgaacatcaactctgttccaggtaaggtgccaggtgctggggatatcacagtgaacagggatgacacaatccctgcccccatggcagtcccctcatattgcataggtgatgactgaaggckcgagcctcatccagtggaaggaaggaatggaggagataaacaggactgtggcccatttgcattgcagggaaagacctggtgtcaccagagaaagggttgtgtgatggggatttagagagtgaaatggaggcttcagagtcagaggttcctgggttggaaggctggtgtttatcaactgtgtgactctgggtgagacccttcacctttctgagtgtcagctcatacattttatttatttatgggtttttttttgttttttttttttgagatggagtctcactctgtcacccaggctggagtgcagtggcgcgatctcggctcactgcaatctccgacgcccaggttcaagcgattctcctgcctcagcctcagagtagctgggattacaggcacccgctacacacctggctaatttttgtacttttagtagagacagggtttcatcatgttggctaatctggtctcgaactctgaggtgatccacccgcctcagcctcccaaagtgctgggattacaggcatgagccaccgcacccagccagctcacacattttaagccagggatcataaaacccacctttcaggatgactgtgaacagaaccagattcagctggtatgctggtatgcctggcacgacacggcatggcaggcagcattcactctgatcggttggtgcctgcgctgagtatgtagaatttcacccctggttgtgaggctttaaatgagtaaatgcttataaagcattcagcgcattttctgcctcgtaataagaaggtcacaaatgatagctgcttctgctaccactattaatgctatcattatycttattatctggaggcagattgtggaggacttttggaggccaaacagagacactaagatttgaagaggtaggaagtagggagccaaggaatgttattaagaagaagagtaacataaaagtggtgtgtgatgacatttagtgtgacaggtgctcagcaagggcggggacagaggaacagtgtcagggtacagtatctgctccactcactgacctgtctgcagtgtcagcacacttcctggcctatcactgggcctctgtaaggtttgttgaacacatgaatgaaaggcttctactaggactgggacaggtagaatgaagagaaaggaatgatccgagagatattgtgtgggacacatggaccgggcctggcatgggcagtgttacaaataaaggctgggtgcggtggctcatgccagtaatcccagtgctttgggaggatgaggctggaggatcccttgagtccaggagttcgagaccagcctggacaacatggcaagacgtcgtgtctacaaaaagtacaaaaatgagctggatgtggtggcgtgcatctgtggtccyagacacttgggaagctgagatggagggatcacttgagccccaggagttcraggctgcagtgagctgtaatcacaccactgtacatcagctgggcgacagaatgagaccctgtctcaaaaaataaaaaacaaaataagaaataaagtaaaggcacatggctttaggatcgccagccaggtggcccaggtgaatgatgatgaggcactgactgaggtgaggcattgaaggcatggctggactgtgtgctggggacgtgctgggcagggaccagcagcagtattcgaagctacaatggagtgagctcactaaggacttcatttagatgacctcctgtaatatcacagccacctcatgatgggggacaatgagtttcacatgcactaatcagagtacttcctatggtcaacgtcagaaagcaaccagaaccagagcgggcaagggtagtgcttgtctcagggtagctggatccaggaacacaaacatcaccacatccttctttatccttctgggtgcaggtctctttctcttgtcctgcaggtgggctttttctgggcatcagggaacatgagtgcaagcagtctctggtttccattcttttgtttttgtttttgttttaaaggcagggtctctctgctgcccatgctggaagtacagtggcgcgagcctagttcactgcagtctcaaacccctgagttcaagctatcctcctgtcttagcctcccaagtagctgggactacaggtatgtaccaccatgcccagctaatcttttttatttttatagcgatgaggtcttgctacgttgcccaggttggtctcgaactcctgacctcaaatgatcctcccaccttggcctcacacagtactgggattacaggcatgagccactgcacctggcctgtttatcattcacacattactgaagtaggaagtgaggccaggtgcagaatagggggtggatgcagtaagttggggcttggagcagggggcacctggacacccagaggaagcctggtgtggtttcatggggtgaagcagagctgatcaggaggcagaaacggcacagctgagtttagacactgtgagtttacagcttatggcagaacaggtctgcccaggtctgtgactttctccagctaaacacaagaccggcacaggtgaaggcttccccctccaaggcagctggtgtcccatccaattcaaaagcaggcctggctgcaaagacggccttgctatcgagacttcataatgatcatcattttctctctgttactcccaaccctggccagggccttgtgcccctcacagatgggccacccaggatggtgattaacaactacagcaattaggttttcatgatgcacctcgggctggtaacattcgtgactgcttgtggggagagccgagggagaggtacagaaagaggagctcactggtgaggaaagagctgctaagggaaaaaaaaaagtgaggacacaaagaggagagtggagatggcacagaaggaggattgagaaagcaaagaaaatgggccaggcgcggtggctcatgactgtaatcccggtgcttttggaggccgagctgggcggatcacctgagatcaggagttcgagaccagcctggccaacatggtaaaaccccatctctactaaaaatacaaaaaattagccaggtatggtggtaggtgcctgtaatcccagctattcaggaggctgaagcaggagaatcgcttgaacctgggaggtggaggttgcagtgagccgagatcacaccactgcactccagcctgggcgacagagcgagacgccatctcaaaaaaaaaaaaaagaaagaaagataaaagaaaagaaagaaagcaaagaaaatggtccacggaaacggagtcagctccgggccttgcacatggctgaggctcagccggtgttcrtgcagcgccgggtgggtgatgggcagggaagagaaggaccacctgtaaccctaggggcactgcacgaggtgtccctgggctcgtggggagtatgcatctggcgatgagaccacgacagtgccagaaagggtcccaggatggtgcccagacacaagacttcttggctgtagtttctgccaactctgctggcacaacccaagggatgggagggtttatcttcttcagctcatgaccttaggacagtggtctctctccctctttcctcctcctttcctctccgtctgccatttagggaaaaagccactttactcaaccagctggggtgaattctgagaggaacacaccacattttagaagacacttgaggatgtcttggttaagtaaccactgaatccagcctaccttggcttaattcttaaatctgagtcttccattttccctcaaaccaccccctgctgttctgattctgtccctggtctccctttctctgcctggatgcattttcctagaagcatttcttggtgcctgacaccagcccctctcttcagcagctgatggaccccaggccccatccccccaacaccacagcatctctggtctaggtaagagcaagcttctctaacctgggtcttcagcttacagcccagctcccatcacgccccgtttcccgctgtttccccctgccaaggaacttcagttagtcctctccactgtcactcaaaagtggctcattttgtgaccagcctaggcaacagggtgaaaccccatctctacaaaaaatacagaaattagccaggcgtggtggcacatgcctagagtcccagctactcgggaggctgaggcagaaggatggcctgagccccggtggtggagattgcaatgagccgtgakcacgccactgcactccagcccagcccgggcaacagagcaagactctctcaaaaaaaaaaaaaaaaaaaaggccaggcacggtggctcatacctgtaatctcactcagcactttgggaggctgaggtgggtggatcacctgaggtcaggagttcaagaccagcctggccaatatggtgaaacctcgtctctattaaaaatacaaaaattagccaggcgtggtggcaggcgcctgtaatcccagctgctcaggaggctgaggcaggagaatcgcttgaacctgggaggcggaggttgcagtgagctgagatcgcaccattgcactccagcctgggtaacaagagtgaaactccatctcgaaaaaaaaaattgtctcattacataggcaagctttactacagtccctcgactaaatagctgagttcgaatataattcatacctgaaatggtgcatttgcagtgggaggaggttaggaacatggagagagtgtcgtatttcttcaagtatatggacagaacattcctcacgtgattctcaaacgtggtcccagaactgcagcctcagcagctcctgggaacttgtgaaaatttgaaatttttgagctccaacccagcccagacctattgaatcagaaactccaggaaagaggcttacaagtgtgttttaagaagccctctactcaggaggcaaaggcaggaggattgcttgagtccaggagttcaaattccagctgggcaactaataacaagaccctgtctctaaaaaatataaaaataaataaatttaaaaagagaagccctccaaaacattctgatgcccacttgcttgagtgtgagaatactgctttaatcttgctaggatccctcagaaaagagagtgggtgcagtgctttctggcattattcttttctctgggtggctgggcccaaatagcctcattgtgagcttctttccctgttgatgtcttttttttttttttttttttttgagacaggatctcactctgttgcccagtctggagttcactggcacaatctcagctcactgcagcctcgaccttcctggctcaggcgatcctcccaccttagcctcccaagtagctgagatcacaggcatgcaccaccatgcctagctaatttttaaaattttttgtagagactgggttttgacatgttgcccaggctagtctcgaactcctggactcaaacaatgcacccacctcagcctctaaaagtactgggattacaggcgtgagccaccacactcagtcttgctgatgtcttaataacatctgaccgcagccctgccttaagcaccaaaccacctcaaaacatggccttccttcctgcaaggccatagagaataagaagagtctggccgggcgccgtggctcacatctgtaatcccagcactttgggaggccaaggcaggtggatcatgaggtcagaagatcaagaccatcctggctaacatggtgaaaccccatctctaataaaaatacaaaaaaaattagccgggtgtggtatgcaatcacagctacttgggaggctgaggcaggagaatggcgtgaacctgggaggcggagcttgcagtgagccaggatcgtgacactgcactccaggctgggcgacagagcgagactccgtctcaaaaagaaaaaagaagagtccatcgtatctcacaggccaggatgcatgttttggcctcctgccaccagccttcacttttaccttctgtaaaatggtgttctaacagtatttaccttacccaacagttaaaaggattaactgaccttatgcaggtaaagcactccacagagtgcctggcctatgagtgcccagtaaaagaaagcaattagtaatactggcactatgatcgtagtattatttggtcctatcttattattatggatttctaacttagcaccatcccaatctctctcatgtatgttttgaagtaagcaaaggcaatagcaraaacagaattggtttgcctggtcagaagacagcctgctttctgggctgagagaagcaaaacaaaattgcacagcatttcaggatgcagtacgtgggcaaaggcttccttcctttttttttatttgccttttttttttttttgagctagaaaattcaaggaaattrcttgaatttgttacaggctccaaatacagttattcctctgcgtcttaagcatctagmactgaagtggaaaattccactctttcaataatggttagccatcttagctcaggccatgctgtggtttgaaggtttgccccctccaaaatgcataagcgtactttggagggcttctcttttcaaatttattatttatatacacttttagagacagggtctcgctatgtttaattgccaatgcaacagtgttgggaggtgggacctaataagaggtgtttaggtcatgagggctctgcccggtgagtggatgaataccgctataaaaagggcttacagtatggattctctctctttcactctcctgccacatgaggaatagtgttcctcccctccagaggatgcaatgttcaaggcgccatcttggaagctgagactgggtcctcactagacaccaacttgccaacagcttgaccttggacttccaagccttcagaattatgacaaataaatttctgtcctttataaattacctagtctgggatattacgttacagcagcacaaaacggactaaaacaggctgctataacaaaataccatagactagtggtttaaacagcagacatttatttctcacagttctggaggctgggaagtccaagattcagttcttggcgagggccctctttctgacttggccattttctcactatgccctgacaggatggagagagagagtttaagagtctcttcttcttcttataatagcactaatcccatcatgggggctgccccctcacgacctaatctaaacctggttatctcacaaatgccccacctcctaatagtatagcgttgagggttaggacttcaacagaagaattttagggagacacaaacattcaatccataagagaaactgagagccccatgacttcactgttccaggcccaggacataccacaacacatgttagagacaaaatctctgccctcagaaagtttgtaatataataggaggaattagataataaagacatttatttcaggagactgttaagtgctatgaagaaaattaaagcaggagaaatggatacagagagttggaggcagtagtgggaggaagccattttagataggtgatcggagaaagcgtctctgagaaggtgacatttgagcagagccctgagtagggtgaatagtgcgcaaaagggaaagagagttccaggcaatgggaacagcttgtgcaaaggccctgtggcaggagcatactggtgccctgaggggagcagctggaaggacaacaggtctagagaacaaaaggagatgcgagccaagaggtagcaccagatcacatatgaccttggcaccagatcacatatgaccttgtagtcataagaaggatttcaggccaggcgtggtggctcacacctgtaatcccagcactttgggaggctgaggcgggtggatcacaaggtcaggagttcaagaccagcctgaccaatatggtgaaaccccatctctaccaaaaatacaaaaattagccgggcgtggtggcacgcacctgtagtcctacctacttgggaggctgaggcaggagaatcgcctgaacccaggaggcagaggttgcagtgagccgaaattacgccactgcactccagcctgggcgacagagctaagtccgtctccaatataaaataaaataaaataaaataaaataaaataaaataaaataaaataaaataaaataaaacaaaataaaataaaataaaaataaaggatttcaaagtgcctgaaggacagggacaggaccactgtcataccttgttgagaaggtgcagagggtcacatagccctactgccaccaaagccttgatttttatgcaattgataacagcagcagctaacagctgccgaccatttcctctgtgccaggctttgtgttaagtgctttacacgagtgatctcaatttattctcacaacaggactatgagggagattctatcattagygwtttacaaatgaagccagtgagcctcaaagaggttcagtccctttccccaattctcagagccagttgggcaaagagtcccagggcagaatgaaacctaatggaacctctttctacagggtgctgtttgagtagtggggcatgtgagtgtgccccctgccacaaccatctttctttctcattaactggcctattacatgttttacacaaagtaaaggaagatttctstctctgaggcctttctgaacttccagagcagacacatgtgaccatcctgagagactgggtcttctgcaagtgtggaaatgtgctttaacggcatgtcagcaaaacccaagatctgcatgcatcacttttgatgggaaaagtgtcagactttagtcagggatcgggcagggaagctggaagggcggggctgggagagtcactaggctgggagtgaggctggcagggactgtaatctgggagagaggcagaaaccaagtgtagggatgtcagtgaaggtgggagtggtgagcagatatggcaggtgagagtggtgtttaaagaaagtcattttcaggggctgggcatcttagctcacacctgtaatcccaagattttgggaggccgagctgggcggatcacttgaggtcaggagttcaagaccagcctgaacaacatggtgaaaccccatcttcactaaaaattaaaaaattagccaggcatggtgatgcacacctgtaatcccagctattagggaggctgagatgagaatcacttgaacccaggaggtggagattgcagtgagctgagattgtgccactacactccaacctgcatgacagagtgagactctgtctcaaaaaaaaaaaaaaagaaaagagaagaaaaagaaagtcatttcaggtgaggatcaggaacctggctggggagacaaggtggggagcaagaggcattattcatttatacattcaactttcattgactcagcagagagactgagcaataaggggccagttatctcagctataataactaacatttaaataaacaaaagctctcagggttgcaacttcctgattgtaccctgccccatattccaactgtattaactgatctctgtatggtttcaaatgataaaaatacacatgaactattttagacaaaaggaggatgtatggattcctataactaaaccgtgggaagacctggagtgtagccagacctcaggggcaactggcactggccagactcctttctttccatctctmttctctcatccattcttctgagtgtccatttcagcctctctcattggtctcttccataatgaatggaaacatggcggcccacactcagtgtctcaagagagaaactgaagttcccacacagagatgaactctgattggccagtttgagtcaggtgttcatctttatgcccatagcaaggtcataggagacaagatggcagctcccatttgaactacatgctggggaataaagtaagagtcattcctcaggggaaaaaatgtaagaggtgttaagttgtcaaaacagtagatgctcactatagtctaccctttggtgctcagtatacaagcctgttttcttccccaaagtagaattccaaaccagcccccatctaacaccatacagccatcccatgcaccactgtgaccacattcaccctcaccctgacaagggacctgcagctgtggcacccagtagtgtctaatgacatccgtcaactctggacatgaatgcctgygatcctgagaacgagttaaatgactaatcactcctaacatgccaatgtaaataatgaagggaccagaaaatatgtgaggaaaaatatacaagaagataatgaccaaataattcccaaatgtgatcaacacggaacaaaatactgcataatcacaatgaagacttggacttataaaaggaggtgtaggctgggcaccgtggctcacacctataatcccagcaccttgagaggccaaggtaggtggatcacttgagcccaagagtttgagactggcctgggcaaccccatctctacaaaaaaatacaaaaaattagccaggtgtggtgatgtatacctgtggtaccaactacttggtaggttaggatgagaagatcagtggagcccaagactttgaggttacagtgagctatgatcatgccactgcacaccagcctgggcaacagagtaagatcctgtcaaaaagaaaggagaggggagaggaggagaaaggaggggaggggaggggaggggaggggagggaaggctaagttgatgaaatcaataagtatacagtgactcaaacaagatgtggtggcttatttccctcatctaacagaccaggggcgggctggagtccacagcataggagatgtgtttctctgtcctgcaaagttgtcctggagaccagattccttctgtctagatgtcccaccatccctagagttgtgtcctcatctgcatgttcaaactgacacacatcatcacacccacatcatggttttttttttttcgttgtgttttgaaatggagtctcactctgtcgcccaggctggagcgcagtggcatgatctcggctcactgcaacctctgcctcccaggttcaagcaattcttctgcctcagactactgagtagctgggactacaggtggctgccaccatgccaggctaatttttgtatttttagtagacagggtttcaccatattggccaggctgatctcaaactcctgaccttgtgatccgcccgcttyggcctcccaaagtgctgggattataggcttgagccaccatgcccagcctcatcatgtgtttttataggccaggcttgtggcttctttggcgatccaattctatcaaaagttggaaacatcctgatctatttgcttccaattatttccatacagaaatgccacacccagagatcccttctggacatggttctgaagcctgccaactctggcattttcctaactggctcccatgcctggcccattcctgctgccccatcttaatgctggctattgtggtgcctgaaacaacaggctgtgtgggcagatgacacatcacatctttgccacagggctgattcccattgccagggagagaaatttcagtggtgggtaccacggcctgccttcctggttattgcaggtggagctttaccaaataacagactaggaggagtcaccatctggccatcttgcctcatctgtgttttctcctttgcgttgctcaaccactaagccaatgtcacatactttagattttttttgttcaagttgcatctcaccttcagcacaaatgtctgtattagacataggttatgctactataacaaacagattccaagatgcagtgatataaacatggtggaattctctttttctctcacacaacaattcagagtaggccccaggcaaacgggcaactctgccccatgagttgaccaggtttccaaattccttctctctccttgctgctcctccattcccttggccacgcagtcaaaagtgtcccaccccatcacctccaccttccagtctgtggaaggagaaaagaatggaagtaacaggcaagcaacctccttaccaaaagtatgatccagaaatttcccacatcacyttgggccacatcccattggccagaactgcatcatgtggccacactgtgctgcaagggagtctgggaattacagtccctagctgagcggccatgctggaatgggaggcacttgtattacttaaaggaagaaataggaaatgaatactggggaacaactcctatctccgcctcagggaaaaaggcaatttacaaacagtgatacagatggaataccacatcttgctggtcaggggaaaacccagctcccatagtgatttgttcgtagactcacttccctgaatatggggactttcttagccaatctggttatgccaacatcttgcctcctaggagcagccttggcttattgtcccccagcaacaaccctgagagagccaacaggaaggactcccttactgagagctgggccatcttaggagcccacatcccactggaggcccgaggattgttttaagtcttgtgaaatcacaggcaactcgcacaaagctcgaggtgttttttttgtttgtttgttaattgatttcgttgttagttggttttgacagtgtgtttgttttgcaacacaactgacacagaaccctggctgaactctgacagccagtacctaacccccaaaattttgtccaggctcaaacttggaatcaggatctgtcttagtccattcaggctgctataacagaataccatagactgggtagcttgtaaataacagaaatgtattgctcacagttctggagactggaaagtccagggttcaaggcactggcagattcagtgagggcctgcttagtcatagacggtgactccttgctatgtcctcatgcggcagatggggcaaggcagttctctggttttataagtgcatgactcccattcctaggcttggtccccttcattccattctcattatctaatcattcctccaaaggccccacttcctaataccatcactttgggggctaggatttcaacatatgaatttgatgggacacattcagaccatggggctcttagatctcttagatgcaggtgtgggggctctacttatttttgtaagcctcgggatctaccctggccttgacctctgcaggggtgatggagctgcctaatctgcctgttgtgctgccctgctcccaggctgtgcttcatcatggaggcattgggtaaattaagacagtgccaggttcttgggaagggccactaccatgggccaaagaatctaccagtgccccaggtcgaattgycctaattgccctktccttctccccaccttgtttggagtaaccagttccttcctgctttggaatggggcaaacttcttactcaacacacgcaacaggaagtgtctctgccagacataccactggactctgctctcttctcagggtgcaacatagaaaatgcctgctacccrctgggcatctgtgctgaacggaccgctatccagaaggccgtctcagaagggtacaaggatttcagggcaattgctatcgccaggtgagtgggaaagccaggttgcaacaatattcattcatctctttagccaacatcttccttacacatattattcattcattcattcatctgacatatgtttattgtggacttcctatgtgccaggcactgtacagggccctgggatgagtgctgaggataaggagataaataagaaatggagtttgccctcagtgagcctgcaaagcaggtaaataagcaaggcaactctcatacaagggccagtatgcccctgttccagcaacacaacgtgatacagactcctgtcctacaagatwtaacagaaaggcagcattgaaacataaagcggggggaacctgagccaggygcggtggctcacgcctgtaatcccagcactttgggaggccaagatgggcagatcacgaggtcaggagatcgaaaccatcctggctaacacagtgaaaccccgtctctactaaaaatacaaaaaaattagctgagcgtggtggcrgatgcttgtagtcccagctacttgggaggctgaggcaggagaatggtgtgaacctgggaggcagagcttgcagtgagccgagatggcgccactgcactccagcctgggcgacagagcaagactccgtctcaaaaaaaaaaaaaatttttttttgctgatggtggcatgcccatagtcccagctatttgggaggctgaggcaggaggatcacttgagcctgggagttcgaggctggaatgagccatgattatgccattgcactccagcctgggggacagagtgagaccctgtctcaaaaacaacacaaaacaaaaaagcattgagaacagtttggaaaggtcttcaccggcaagtaattatcacagtgttgtaccattggattctcttggcttacttataggttctgtattgtttgaataacaaaaaaggaatactgaaagctgggtttagtgcaaggccagtggggactgcacagaagcaagcccacgtgccttttataagatcctacactttgcctcagtctggccccaaggagacccagcttaatttgtttctgagtaagtaaagcccgaggtgcactcaaggagaagggctccagtatccgatagccttccctgtcaccgaggtgtgtcctggcttccttaaggcttcyggaggaataaatgacggttggcgggcgcctgtagtcccagctacttgggaggctgaggcaggaacatggcgtgaacccgggaggtggagctcgcagtgagctgagatcacgcctctgcattccagcctgagtgacagagcgagattccgtctccaaaacaaaaaagcgggagggacctaaaaatcacctgctatagactcccttgccaccacccccattttatagctgatgaaattgaggccccgataagttgaacaactttcctgggagttagtgccagagctgggacaaaacccaggttccagagtctcactgcagggctcattccactacatcatgctgtgccaggagatggaacacttttccctgttctccacaagctgatgctaggatcctgaatgagccactcagcactgctctctccttcatttggcaacactcacctctaggtccaagaaccaggatacaaaaacagtcaggtaaacagtagttatggttcaaactaatcagagtccagccaaggttctggctgaacaagagccccaatcaatgctcctatatgtcccaaacataaatatcctagttggtatggcttactttccacgggagcatgttgaattcttgttggctctggccctagactcagtggtttcaggatccaagcacgtaaattagcccttttactggactccattattgaatgacttaatggtgaattgctcctgtgtgcacctttgcattgtgtatgacagttttcttaacaagttaatgatgcaagaaaaatgacatgggaaatgttgatcccacccagaaggaggctgcatgcctgttggtctttagggacatctgggtgcataggtcacattctgtgaggtaattatctcttcactcatagtggagttaattcctgtggtagagctayagcacctttctggctaaaatacagaaagagagctacaccttttagcacctttctggctaaaatgcagaaatgcaggggtttagtgcaaggccagtggggactgcacagaagcaagcccacgtgccttttataagatcctacactttgcctcagtctggccccaaggagacccagcttaatttgtttctgagtaagtaaagcccgaggtgcactcaaggagaagggctccagtatccgatagccttccctgtcaccgaggtgtgtcctggcttccttaaggcttccggaggaataaakgacgctgtgctgagaacattttgtgcagataggccaagatcaggatgtgaattgcactttatgaaaaaaaagagaaaaggagggaaataactcaatttcaaagctgatccaagaaaataatgatattctagggaaaaagaggccaaagtcaaccaaaggataatgatgccttgctctatttagaattttccaaatgagaggctttttctcttggtcattatcgacttttaaacaaaactaagtatcactagcaatgattagcaaatgtccttatttacacaaaacctgccatttttccagcacccaactgctgtactctrggtattcagctcagtttccctgagcccaagatgcactcattatcgcactcatgatttgttaaattgagarcgtttgtggatttagaggatgaatgagaagtaccagctcccttgttaacatcagatgggtctgagcaacctcagagagaacccctctcaggtctttaaggatggagaccgcactcaggaaaggtccgtgtgtcttactgctcacagacagatgagactgccccactgggtcccagctgtagtgatcagagtcagtaggtttccagcccgtcaagtctgataagtacggcctcagtgtgtgaccaaggtgagcacaaaccacagaaaactgtaaatagccagcaaaaggcaggacagagtgaagggcagggtagagggagaaagggggaagctgtgaagaaacatcctgaggcagccagcaggtgctcagtcttgagtgctctctcttggcaggaacgttgagtaagttagaagcccaggcttcagggtcagtgaaaccagtttccaaatccagccgcattatggaccttgggcatgctgcttagaccctgagcctggcttctcatctgtgaaatggaggagactggtctgttacagggtcttaagaaacgatttctgtaaagttcctgacacagggtatgtaatacattcaaactattatatakttttgttttgttttgttttgttttgttttgtttgagaacaagtctctctgtgccgcccaggctggagtgtagtggcaagatttcggctcactgcaacctccgcctcccaggttcaagcgattctcatgcttcagcctcctgagtaattgagactacaggtgccggccagcacrcctggctaatttttgaattttyagtagagacagggtttcaccacgttgaccaagctggtctcgaacttctggcctcaagtgatctgcccacctcggcctcccaaagtgctgggattataggcatgagcaaccgcattcagcctcaaactattayattgttttaaagttatcattatttcttctgcaagctgcaaaactaccaaaggcagagtgtgtagatttggggttcaaatcctgattctgccacttcactaactctgtggccttgggcaagtcgtttcacctttcatgatctacmgcatgcaggtgataagagcgmctgcataccccggccccttacagggttgttgggggattaaatgaactaatccacttaaggtccttagcacagaggctggcacacagaaccactatgtatgtgtaagccattactgttaatgcgctgtctctacatcctcagtgctaggctgcctggaaacactatcctgygacttttggttgttgaagcctacaccaaatctaccttcccagtggaatgcatgcttgcccaccttgaaatccctgatgcagatcaccttgtccagggagctagccattgggtagtgggccacagatgccacaagattcagaaagaaggccgggcgcagtggctcatgcctataatcccagcactttggaaggccgaggcaggcggatcatgaggtcaggagatcgagaccatcctgcctaacacggtgaaaccccgtctctactaaaaatacaaaaaaaattaaccaggcgtggtggcgggcacctgtagtcccagctactcaggaggctgaggcaggagaatggcgcgaacctgggaggcagagcttgcagtgagccgagatcgcgccactgcactccagcctgggcgacagagcgagactccgtctcaaaaaaaaaaagattcagaaaggaagcggtgagctcagcaggggtcagatcacacagggccttacaggccatgaaaggaaggctgaatttcattcagagcaactctcccatggccctaaccatgcctttgttacggcatttgtgtgaaattttatctccccctccagagggtaagctccaggaattgtccgattggtytttgttgctcctttcccatgcctgcctgacatagagaaggattttggtcgacatgtstggaatgaagtgaaraataacccccaaaaagcttaagaggccctggctgcaacagctgtcacccagtaattccaagagttcactcggcatcctgggcaggagtccccaccctcttatgtgcccgtgggtttttcttctgaagctggaagcgtcctcagagaggtccccatcatcccatggaacagaacctttcattgactggacccccacatgtaaaaggtagtaatggtgaggattagagaaaatagcacctcagctgctttattctaatcataatatcatccctatctccacttgacgcatgtggttggttggttgggtggttgatcagttgcctagctcccctcactagtctataaactcctgagcatagtgaattttgtctgttttgttcactgctgcactcctagcaccaatgacagtgcccagcactgctcagtaaatatttgttggttgaartgagacaatgcatataaaatgctttgcagaatgyctggcacattctaggcacacattatcttttttttttttattttattttatttttatttttatttatttatttttatttttttttgagatggagtcttgctctgtcacccagactggagtgcagtggcatgatctcggctcactgcaacctctacctcccaggttcaagcaattctctgcctcagcctcccaagtagcaggkattacaggcatctgccaccacgcccggctaatttttgtattcttagtagagacagggtttcaccatgttggccaggctggtcttgaactcctgactttgtgatccacccacctcggcctcccaaagtgctgggattacaggcataggcacacattatcttaataacaattgttgttaagatataataagatgaattatgaaatagtacataaatcacatagcatataataaaactgtgtatgataaagtactaaaattatgacagagcttacatacgtaaggaaataaatgtccagcacttagaacaggcagtaacaatatgtatataacattctaaagtttacaaagtcttccatacaccttatctcattttatcttctagcattcttacaaagcagatgacgtatcatccacattttacagcaaataaatgagacttggatgagttaaaatgacttagtcaaagtcacacatagcaaaaggaagagccaactaaaaaccaaaatttaaatcctgtgttctgccaggcatggtggctcatgtctgtaatcccagtactttgggaggctgaggtgcaaagatctcttgagcccagaagttcaagaccagcctgggcaatatagtaagatcctatttctacaacaaatcagaaaatgagtcaagtgcggtggtgcgtgactgcagtcccagctactcaggaggctgaggtaggaggagcctttgaggccaggaggcagaggctgcagtgagccatgattgtgccactgcactgtagcctagacaacagaacaagaccctgtctcaaataaataaataaataaaaatcctatgttcttccagagatatcacaaagctgtgggtccagaagagtaagaaggatggtggctgctggcttcacctgtggtgcaggcttggaattttccatcatcaaaggcacttgtttgttttgttttgttttgttttgaggcggagtctcgctctgtcaccaggctggagtgcagtggcaccatctcggcttactgcaacccccgcctcccgggttcaagtgattctcctgcctcagcctcctgggtagctgggactataggtgtgcaccaccacacccagctaatttttgtatttttagtagcgatggggtcccaccatgttggccaggatggtctcggtctcttgacctcatgatccacccaccttggcctcccaaagtgctgggattataggcgtgagccactgtgcctggccaaagccgcctgttttagggaccaatccttgtcctgctcagagctggaggtctgcctgtaggagcctaaactctcacaggcaatccctggctggtgagcttcttcagtgcaaggagcccatttttctctctgagacacatgcactttattctttcatgcctcagggcctttgcacatactgtttttttgtttgtttgttttttgagacagggtctcactctgtcacccaggctggagtgcggtggcacaatcacagttcactgcaacctccgcctcccaggctcgagtgatcctcccacctcactctcctgagttgctgggactacaggcctgcaccaccacacctggctaattttttgtattttagtagagatgcagtttcgccatgttggccaggatggtctcgaactcctgacctcaggtgatccatccgcctcagcctcccaaagtgctgggattacaggcatgagccaccacgcccarcctgcacatactatttatttccttcgcctacgacacagagaaacccagggcttccgaatagcatctctgcctcttcatcacactgaacctatctcctcacccttaaagtggccattctgacatcttgatgtcagscctctgagcccaagctaagcggtcttaacccctgtgacctgcacatatacatccagatggcctggagcaactgaagaaccacaagagatgacattccaccattgtgatttgttccttccccaccccaactaaccaatcgatcttgtgacattccacccccccaccaccgacaatgagtctcacgrtctccccaccctgcaccgtgtgacccccgcccctgcccacaagaaaacaaccccctttaactgtaattttccattacctacccaaatcctataaaactgccccaccctgatctccctttgctgactctctttgcagactcagcctgcctgcacccaggtgactaaaaagctttattactcacacaaagcctgttggtggggcggggcggggtggctcatgcctggaggccgaggtgggcggatcatgaggtcaggagatcgagaccatcctggctaacatagtgaaaccccgtctctactaaaattacaaaaattagccgggcgtggtggtgcatgcctgtaatcccagctactcgggaggttgaggcaggagaatcgcttgaacccgggaggcggaggtttcagtgagccaagatcacgccactgcactccagcctgggtaacagagcgagactccatctcaaaaaaaaaaaaaaaaaaagcctgttggtggactctctttacacagacgtgcgtgacaccaggctgctctgagaattccatgaattaatgaatgttgagtgcctggtacagagcctggcatacagtagacattcactaaatggtgacttatgaactctacacttcctccaaggaccaggacacatgcctcctcctccataaaatcttccttctcagtccacaggcagggatgagctccctcatactgtgtgttccttctgcaattttttttttttttgagaaggattttcattcttgttgcccaggctggggtgctatggcacggtcttggstyactgcaacctttgcctcccggattcaagcgattcttctgcctcagcctcctgagtagctgggagctacaggcgcccaccaccaagcctgggtaatttttgtatttttagtaaagacggtgttttaccacgttggccaggctggtctcgaactcctgccctcaggtgatccacccacctcggcctcccaaagtgctgggattacaggcgtgagctaccaagcccagctgcattttgtttaacatgataactcagctggttttttacataacagagacaaattctctttgacctttgtattcccgggtgtgggtgatggtaagtgctcagtaaacgtttatggatggcactaatgaaagtcctgcccatggccctgccttgtggcagtgtggaaagccaccacgtggccttctcagccttcaggacacagtggatctgtgaatcaggaactgcctgatggggtatgacccaaatcaggaacagaccgagwctcagggcctgaatcttagcaattgtcctcagtccttgggagagactaatttgagtttgattctttgcttccccagtgacatgcaagatgattttatctctccatgtggggcctgcaggcaagtcatgagagaggtaagcagcttctcttgctgtctggaatgcaaatatcttccctgtcgcaggctatgggagccamgccaagytgcaggcatggcaggcatggcaggcgtggagacacagctactgtcctgtttgcttggttggctgacttctaaggcctccctacgcttgcatgagtcactggaaattattccttcatttaacaaatacttaccgagtgagtgtctgctttgtgccaggccctgaggtagctctggggaggcacagggaaaagatgggccaggccctgccctcacagagctcataggctaatgcaggagacagatgataaacaaggagcaaaataaataaacaaacagtggcgtttctgagtcaagagggctatagaggaaaacaaaatgcagaaaaaaaaaaggagtccagtgacaaacgggcaaacaggggacactgcagattggggtcagcaaacaacagcccttgggccaaatccagcctgctgcttgtatttgtaaataaagttttatgggtatacagccatggccattcattcacctattgtccatagccactttgccctgacacagcagaggtgagccattacgacaaaggccacatggcctctaaacctaagatatttactgtctggtccttgacagaaaaaggtttgccaacccctgctttagatatccaggaaggccctctttttgagcatgacatttgagcagaaatataaataatgaggaaaaaaatgagacagacaaaggtcaaaaaaggagattcagaaccagcaagttcagacccttggtgaatttgagaagaggcaagaaggccacgagggctagagagctagggcctggtaggtggaaggaaagcaatgggattgaagtcagaggggtgggcagaggccagatcacatggggcctggccatggaacgaagggtacattttattccaagaataaaggaaactgaagtgtacacttttttttttttgagacggagtctcactctgtcacccaggctggagtgcagtggyagagtctcagctcactgcaacctccgcctccygggttcaagcaattctcctgcctcagcctcccgagtagctgggactacaggcgccagctaccatgcccggctaatttttgtatttttagtagagactgggtttcaccatgttggccaggatggtcttgaactcctgaccttgttatctgcccacctcggcctcccaaagtgctgggattacaggcgtgagccaccgcgcccagcctggagtgtacacttaaacatggttaaaatggcaaatcttacattatatatattttatcacattatatacattgggaaaaaagggaataaaggtaagccattggatattttcaagaagaaacttgaaggactttttataaaagtcctcttgatggaaggctgcaatttcttcaactctaaaaacaaaacggtaagccaggtatggtggctcagcctgtaatcccagcaattarggaggcagaggcaggaggatcgcttgggtccaggagttcgagacctgcctgggcaacatagcgagaccctgttctccacaaaaaaaaaaaaaaaggaataaaacaaaacaaaaaaatgaaaacgaagggatagtttagatcatgggttcttaatccaggctcaggggaaggttttcatgtttatatgtacgtttggggaaaggggaatgtcagtaactattgtggattctcaaagagatctgtgtcctctagagtcccaaaagattagagaatcccacaggccctgagctccagcataatatcaagagcccctcgaaatacggcatcttgtgggcatgatggcttacacctgtaagccctgcactttgggagactgaggcaggaggatcaccttagcccaggaattcaaaaccagcctgggccacatagtaaaacccggtcccttcaaacaatttaaaaattagcaaggcatagtgtgcacgcctgtggtcctagctgctccagaggctgaggtaggaggatcactagagcctaggaggtcaaggctgcagtgagctgtgatcaagccactgcactcctgcctgggtgacagagcgagatccggtctcaaaaataaatacatacctacagcatcttgtttaatcccctccccaagactgagtgaaatgcatgtcgttattcccatttcccagtgaccactctgaggctcagaggagtaaaatgacttactgaagggccccctgccaggcggtgacatatgggtatccatggcccatcaggctgactctgaagcccgtgctcctcacggctgcctctctgtctttgtggttctgtaagttggacaaaattattttcarccatggaggaaacataatggtactttggcatgtggatgctgcttgtaccgtgggagtttctgcttttggagttgtgttttgggagaaagggggttgttttagctttgtttttgtgccgtggggtttcaaagcatctggggatgcagacacttccatcttcctcctgcttcctgccaggagtgcaaatcagacacatttcccaaatccaaaaacawaccaccgggaaagcagtgaatttacacggtggaatttgtctcacttgagaggggcagaaatagctgccctgcacggtggaaatgtcgaaggtcatataaggaagccacaacagggcgccaagtccctggctcccaaggccccgacgtggtccaattgctcagtgctgttttctccaaacagattggatgttggcaaacgagagaaggcaaatgaaaaagctgaaggaggcaggggggaaactgaaaccaaatgcaaatgataagagatgaggcgttggggccagggacctgacacgtaaactcgccctcggctcaacttttgtctgtacctacccttaggcacagcctgtcaagcagaaaaatttccttccttaaaacattaattctaaaaaagccagaagattgagtgtgcccgggaataacttggtgattcagagagaagtgtggaagaacaggaggctgcagacctgagcagtcactggctaccaacataatcaataagaatggcatctattaattgaacacctactatgtgcatagagatgctttacatgaatcatctctgcatctcagaatacctggccagaaagagcttaggtctgttgaccccacctccagggctcttgtcatgacaccgctgctgattaacctcttgcctaccatcctgcattctcccatccctaaaaccattccatggaccaagacactgagtgagccccagaaagttatcattttcccaaggtcacacagcaaacaaacagtgctcctcatagtataggagaaagatcaagagacaaatttttctttgctgactttactctgctaagcctcagtttcctcatcagtaaaatgggcatcatgatagcacctacctcacagggtagattatgaaaccacgcatgtgcagtatctatgtggtgtggtttggctgtgtccccactcaaatctcatcttgaattgtagctcccataattcccacatgtcatgggagggacctggtgggaggcaattgaatcatgggggcgggtctttcccaygctgttctcgtgatagtgaataagtctcatgagatctgatggttttataaatgggggttccctcacacaagtcctctcttgcctgttgccaggtaagacatccctttgctcttccttcctcttccgccatggttgtgaggcttccccagccatgtggaactgtgagtccattaaacctccttttttattttattttattttwttttttttttgagaccgagtctcgctctatggccmaggctggactgcagtggtgtgatcttggctcactgcaacctctgcctcccgggttccagagattctcctgcctcaagccttctgagtagctgggattacatgtgcttgccaccacgcctggctaatttttgtatttttaggagagatgaagtttcaccatgttggccaggctcatctcgaactcctgacctcaggagatccgcctgcctcggcctcccaaaagtgctgggagtacaggygtgcgccacaacacccggcctaaacctcttttctttataaattacccggtctcaagtatgtctttattagcagcttgagaacagactaatacactgagtatatgtagcaggcttgcagcttctcctggtgtgaggtgtaaaggggatactgaagggaagcgggtgttagttgtcatttgtcatagcagaaggaggttccaggggttagctgttgctcttataaagccctgggtgagtcttgaatggtgcctgttcacgatgtaccatgcactgttcagtttcacagcattctttcgtttcctcctccctgcagcactatgatccaggtacaattatggtcattccccttttacagatgagaaaatcaaggtaaagagaggaacattagacagtggcagagtcagactcagacccagtccgtctcagccccctcagccacgctgtgtctctcacgccagctttgcctcttttccagtttggcaccaactggcccgtgtacatgaccaagccggatggtacgtatattgtcatgacggtccaggagctgctgccctcctcctttgggcctgaggacctgcagaagacycagtgacagccagagaatgcccactgcctgtaacagccacctggagaayttcataaagatgtctcacagccctggggacacctgcccagtgsgccccagcccyacagggactgggcaaagatgatgtttccagattacactccagcctgagtcagcacccctcctagcaacctgccttgggacttagaacaccgccgccccctgccccacctttcctttccttcctgtgggccctctttcaaagtccagcctagtctggactgcttccccatcagccttcccaaggttctatcctgttccgagcaacttttctaattataaacatcacagaacatcctggatcaaagcgtgtgtcttgctctgtctctatccttgcttgcagctcttaggagggacagcatgatttgtctttataggaagagctggactctttctgttcggagaggaaatgggtaccttggaaccatggaccttatggtgtggagagctgaggttttaggcaacttgccccagcgttctctaaacgggcagctcccctgggctggacctaactgccaataaccatcctagagtgtgtttttgtctcatcatagacctgagcaccaggagactccagagtataaagggtcaagcacggtttgtctagacagtgtaacaaagggttttctcagtagctactgtatgtcaggtaatttgtgtgcatcattttaagtttaacatgctccacagttctgtgaggagggtgtggagatgcccccttttcacagatgagagcactgggctttggagaagttgaataccctgctctaggacaatggcaaacctcagaacagaatccaggccccttaacccccactgtggtccggaaacattgcatgctttttgccatgcactgcgctaaggtgtgtgacatatatgaacccgttcagtcctcatttgtcaaactcaaaggttaattattagtgttctcaatttagaaataagcaactcgaagctcagagtgattgagttgctcacccaaagtcacacagctgatgtggcagaactggaatcagaactagatctgtctgggccgggcaaggtggctcacgcctgtaatcccagcactttgggaggccgaggagggcagatcacctgaggtcaggagtttgagaccagcctggccaacatagtgaaaccctgtctcttctaaaaaatacaaaaatcagccgggcgtggtggcaggtgcctgtaatcccaaccactcaggaggctgaggcaggagagtcatttaaacccaggaggtggaggttgcagtgagccgagattgtgccactgccctccagcctgggtgacagagtgagactccgtctcaaaaacaataacaacaaggattccaaggatttttttccattcccccataactgatgtctcaatttactgattatcttttatatgtcaaatattctaaatattgcagagaaaaacagcctctgcccttgaactcccagcctgacagattgagagaaagagaggtgtacacaggtctaatgcacaggagtgcacactgtgatccaggcagaaccaagtgtcaggtgggtgtgtcggggagcctgctgctgtctggagtgtgaggacagggagggactgtttctttcatgggtgcattggttatcacacatgcacaaaattaggaaggtcaggactgaataaggaaggagccagggtgggtgctctggagggggatgacagctccaggagccctcccaggaggagttggtcttggggctggctcattgggtggggtaagaatacagcttaggtttcctgttcccagggcaagcaagtacctaggggcacccaagtggacatcaccccttccctggaagccctttccaccctgatccagtgttgccacctgatgagaatggctttgccacaacacactcagacttatctgctggcatcttgggagcatcccagtcattccagcatggctatatgacacacaactccattctgcttttttttttttttattttattttttttgagatggagtctcactctgtcacccaggctgaagtgtagtggtgcaatctcggctcactgcaacctctgctgcccgggttcaagtgattctcctgcctgagcctcccaggtagctgggattacaggcacctgccaccgcacctggctaattttcgtagttttagtagagacggggttttaccatcttggccaggctggccttgaacacctgacctcatgatccacccgcctcggcctccctaagtgctaggattacaggtgcgagccaccacgcccggcctgactttctttagaaatggctttggtggctgagcacagtggctcacacctataatcccaacactgtgggaggctgaggtaagaggacctcttgaggtcaggaattcaagactagccaagtaaacagtgagattctgtctctaaaataaacaaataatataaatwaattaaataataaaataaactaaataaattaaattagcttggccttatgatgcttgcccgtggtcccagctacccaggaggctgaagcagacggatctcttgaggccaggagttcagggccacagtgggccatgattgcatcactgcactccagcctggacaacagagtgagatactgtctctaaaacaacaacaggccaggcacagtggctcacacctataatcctagcactttgggaggccgaggcaggtagatcactcctgacttgaggtcaggaattcgagaccagcctctccaacatagcaaaaccctgtccctactaaaaatacaaaaaatcagccaggcgtggtggtgcgtgcctgtaatcccagctactcaggaggctgaggcaggagaatcgcttgaacccaggaggcagaggttgcagtgagctgagattacgccactgcactccagcctgggcaacaaaagtgaagctccatcacaaaaaaataaaataaaataaaggcccagtgtttgaccctcagtaaattctccgtaaatcttggctgttaaccctcaacaagggtgataaattttgttttttttaaggatggatttgtttttgcaaaattttacagcctttttttttttttttttgtgagatagagtctccctctgttgcccaggcgggagtgcagtggcgtgatctcggctcactgcagcctctgcctccagggttcaagtgattctcctgcctcagcctcctgagtagctaggattacaaacgcccaccactacgcccatctaatttttgtatttttagtagagacggggtttcaccatgttggtcaggctggtctcgaactcctgacctcaagtgatctgcctgcctcagcctgccaaagtactgggattacaggggtgagccactgcatacagcctatacgttcttttcacaattttttttttaattattattatttttttgagacggagtctcactctgtcgcccaggctggagtgcaatggcatgatctcagctcactgcaagctccgcctcccgggttcacgccattctcctgcctcagcttcccaagtagctgggactacaagcgcccgccaccatgcccgggtaattttttgtattttcagtagagacggggtttcaccgtgttagccaggatagtctcgatctccttacctcgtgatccgcccgcctcagcctcccaaagtgctggaattacaggcatgagccaccacgcccagcctcttttcacaattatctatcggtgcttactgctgagaccagttcccagggacacagcagtaagcgaggcaaagtctttgccctcacagagctcctagtttatcagtgggaaaatgagatctacatgattatagtacttcatgacaagtgaagaaagccctggcagcaagcagcagaaagagcagaacttggctgggcacagtggctcatgcctgtaattccagcattttaggaggctgaggcaggcggatctcttgagtccaggagttcaagaccagcctgggcaacatggtggaaccccatctctacaaaaagtttaaaaaattaggccagccatggtggctcacgcctgtaatcccagcactttgggaggccaaggcgggtgggtcacgaggtcagaagttcgagaccagcctgaccaacatggtgaaaccccatctctactaaaaatacaaaaattagccaggtgtggtggcacatcctgtaatcccagttactcaggaggctgaggcagaagaatcgcttgaacccaggaggcacaggttgcagtgagccgagatcatgccactgtagtccagcctgagcgacagagcgagactctgtctccaaataaataaataaataaattttaaaaattagcagggtgtggtggcaggcacgtgtaatcccagcttctcaggagactgccatgagaggatcacttgagcccgtgaggtggaagatgcagtgagccgagattgcaccactgtactccagtctggatgacagagccagaccctgtctcaaaaaaaaaaaaaaaagaaagaaagagaaaacaaagaataaaacttgccttcatgcaagaccacccggaggagaggatgttttagtcagagcagagaagtgtcatccagtaagagaatggggtttggagaagggtaaaatatgagactgatggaaggactaagcctagtatccttatactatgtggaaacaatctatggaaggcgattctcaaaggattctagagattcttcaacaatggcctcttggaagaacaatactcatttgcctggagagaggcaataaaagcattttcactttgcagccccattgtacagaacacagcgcggaggacatgcgttttcggagcagtcccattgtgcagaatgcagtgctgaggacatgtgttttcggagcagctcatgttcttttttttttttttttttttttttttttgagacggagtttcactcttgttgcccaggctggagtgcagtggcgtgatctcggctcaccgcaacctccgcctcccaagttcaagcgattctcctgcctcagcctcccgagtagctgggattacaggcatgtgccaccacgcatggctaattttgtatttttagtagagacggggtttctccatggtggtcaggctggtctccaacccccgacctcaggtgatccgcccaccttggcctcccgaagtgctgggattacaggggtgagccactgcgcccagcctgtgtttaatattttgtatatggtgatatgagcacgggaacagatgtgataggaatgcccaatctgtaaacacagtttttgatgggtacaggaaagaggcgttaagaagattaaattgttaggctgggcatggtggctcacacctataataccaatactctgggaggccgaggtggacggatcacctgaagtcaggagttcaagaccagcctgcccaacatgacaaaacccagtctgtactaaaaagacacaaaaattagccaggtgtggtggcacacgcctgtaatcccagctactcaggaggctgaggctggagaatcacttgaacccaggaggcagaagttgcagtgaactgagatcacaccactgcactccagcctgggtgacagagtgagactccatctcagaaaaaaaaaaaaaaaaaaggaaaactctatgactgaatagaaaactatatggcataatggtgacattagttatctattgctgtatagcaagttactccaacatttagtggcggaggacaacaaatacttatcatctcacagtctctgtggggcaggattctgggctgagccagcttctatggctcgaggtctcttacaaagtggcaatgaatatgtcaggaagggcttcrgtctcatcggaagatttgactgggggtggatccacttcaaagctcactcagtttctggcaggattcagttcactgtgggctgttgctgttactattcagttccttgctatgtgggcctctccacagggcagtttacaacctggaagctcacttctcttagaacaagcaagcaagacagaaaccagagtctttggaatgtcatgaaagtgacagtccatcacttttgacaaatttagtccacagaagcaaggcattaacatccagcccacaatccagaggaggggataatatatatggcataaatgccaggaggtgggtattctaaagatgtaaaaattcacaatgtacatgaacaaggaaaacaaaataaaattaaaaagtagataagcatggtggaagggtcagaagatgcaggcctggttagccctgttaaggagtttgactttattccaaagggcagccatcagtttcaggtgtgggtcacgtgg

SEQ ID NO: 95699 - DNA, 13555 bp, Homo sapiens
agatattttgcccattttttaattgagttgtttgttttcttaagattgagtttcttcaggctgggcgcggatatggataatagctggagtcaggccaggcacggtggctcacgcctgtaatcccagcactttgtgaggccgaggcaggcagatcatgaggtcaggagttcaagaccagcctggccaacatggtgaaaccccgtctctactaaaactacaaaaaataagccaggcgtggtggcaggtgcctatagtcccagctactcaggaggctgaggcaagagaatggcatgaacccaggaggctggagattgcagtgagctgagacgacgccactgcactccagcctaggtgatacagcaagactccatctcaaaaaaaaaaaaaaaaaaagactgactttcttcatgtattctgcacataaactttatcagacttacaatttgcaagtattttctcccaatctatggcttttcattcccttaatagggtttttcactgtgtataagtttttaattttgataaagtcgaagttgccaagttttctttacggattgtgcttttagacccatagctaaacacattgcagtcatgcaggttttctcatgttttcatcctcaaatgtaatggttttacattctgtgtttaagaatagggttcattttgagttcatttttgtataaggtgtgaggcaggatccagcactgtttgtctaagtaactattcctctctccgtggaattactattgcttcttgtcaaaaatcatttgactatatccgtgtgggtctatttttgtttcattgaactattaataggtgtctgttctttcaccaacatcacattgtctttattattgtgactttacactgagtcttgaaatcagccaacctgaatcctctagctttgtatttccttccaaatttttttggctgttatatagttcctttgacctgccttgtacatttcagaatcagttgttgaaatctacaaaacagtacactaggattttgattaagattcccttaagtctatagatcagattcaagagaattgacgtctaacactgtgtacctctaaatttatttgggtcttttttgttactattgtaaatagtactttttaaattataaattttaattctttattacaattgatttttgtatactgaccttatttcttttgaccttgctaatcttacttacctgctctaggaactttgttgtagattacttgggatttccaatgatgtcatgtatgaatagagatgattttattttttcctatccaacccgtatagtgtttatttctttctcttgccttaatgcactggctaagactttcagtatgatgtttaacaggagtggtgagagagaacatacttgccttggtcctgatattagaggggaaacattcaatctttcactattaaatactttgctagctgtgaggttttttgttttttttgtagatgtgctttatcttgttaaccaatttcccttctattcttggttttttgaggattgttaccataaacaaatattggattttgtaaatgtgttttctgcatctgttgagcttttgattttgatgaagccaagttgccaagttgtacttggcagatctgttgtctgttaatatggtgcactacgttgatttgtttttgaatattaaattggctttgcattctgggataatctccacttgttcaagatgtattatagattgaatatattctgcattaaatttgttaacctatcttgttgaggtttttttgtctatattcatgaggaatattggtttgcagattcttttcttagaaattgttgtctaattttggtatcaggaaatgctgacctcataatatgggttagaaaatattccatattctttttttctaaaaaaggttgtacagaattgatatgatttttccttaactgtttggtagaatttaccaatgaaaccatctgggcctctttttttgttagaagttttaaaactatgaattcaatttctttaacagatttaggactattcagattatctgtacctctgtgagttagttttggtcatttgtttcttagaaggaagcagcccatttcttccatagggttgaatttatgagcatagaattgctcacagcattcccttatcatttccttaatgtttgtgggatctgtagtgatgtttgatattggtaatttttgtctactgcctttttttcttggttagtttgaagagctttttttatttttcttttaattttgttaattttttcaagaaaccaactttttgtttctttgattttctaatttttaacaaatgttttaaattgtgttgattcctgctatctttattatttttctcctcctacttgctttgtttttttaaattaaatctccatttcttagatctaagaatttaatgatataaatgccacccccagctactgctttagctgttcccacaaattacgttttataactatttttgttcagttcgagatgtcatttctaaagacttggcctaatcttagatcctgaagatgttttccccgtgtccttttttctagaagttttataattttgtttgacatttaagtctatgatctgtttggaattaacgtttgcataaggtgtgagatctaggttgaggtttatttatttatttatttatttattttgagatggagtttcgctcttgtcgcccaggctggactgcagtggcatgatctcggctcactgcaacctccacctcccaggttcaagcgattctcctgcctcagcctccagagtagctaggcctacaggcatgtaccaccatgcctggctaatttttgtgtttttagtagagacggggtttctccatgttggccaggatgttctcgatttcctgactttgtgatctgcccgccttggcctcccaaagtgctgggattacaggcgtgagccaccacacccggccggtttatttatttttcgcctatgaatgtgcaattcttgtgacaccatttattgaaaaggctattcctcctctattgaattgtttttgctcatttgccaaaaatcagttgaatatgtctgcaggtctttgtatgggttccctgttctgttctattgttatatgtgttaatgtctccattaggaccacactttcttgatagctatagctgtatagtgagctttaagatcaagaacagctactcctactttacatttctttttttgaattgttttggctattcttgggcctttattttccatacaaaaattgaaaacaaacttctttatgcctattgaaaaccttgctgacatttggatagaaattgcattaaacctatagatctaattaggaagaattggcatctttattgtgttaattcatctattccatgaatacaatatgtctctctgagtatttaggtctttgatttatttcatcagaattttataatttcagcatgcagctcttgtacctgtttaagtatatactaagtattgtaattttttggagcaattgtaagtggtattgcactttttattttggttttcacctatttgttgtcagtgtgtagaaacgcagttggttttcatgtgtggactttgcatcttttgaccttagtaggcttacgtactatttcgctttttgttttttgtgtatggtaagccctccatatctgcaagttctgtgtctgtggattcaaccaactatggattgaaaatatttgggaaaaataaatggtaaaaatcataacaatacaacaataaaatataatacaaaacttaaaagatataacaactacttatgtagaatttacattttgttagatatcataggtaatctggagattatttaaagtatacatgaggattgtataggttatgtgcaaatactatgccattttatacgatacttgagcatcctcagattttggtgtccatggggttgggagtggatcctggaaccagtcccccacagatactaagggacaactgtagttctcaggattttctatgtagataattgggtagtctgcaaatagacagtagtatttgtttgtttgttttttccaacctctatgacttattcctttgccttattgcagcggatagaacttccagtactacattgaataggtatgttgagagcagacatacttgcctttttcccaatcataaagggcaagaattcagtcttctcccattaagtatgatgttagctgcaagctttttgtacatgctctttatgagattgagaaagtttcattctattcctaatgtactgaatttttatactgaatgaaggttgcatttgccaaatccttttctgtgcaaattgatatgctcatatgattttttttccaaattttgaaccaactctgaatacatagaatgccacttggtcatgatgtattattcattttatacattgttggattaaatttgctaatatttgttgagaacttttgtgtctaggttcatgagagatgttggtctgtaggctttttgtgtgtgtgctgtctttgtctgctttgcgtatcagtgtaatactggcctcatagagtgagttgggaagtattccctccccttctatcttctggagtggattgtgtaaaacttgtgttaattctcctttgaatgtttgataaaattctctagtgcggccaggcacggtaggtcacatctgtaatcccagcactttgggaggccaaggcaggcaggatcacctgaagtcaggagttcaagaccagccaggccaacatgggaaaaccccgtctctacttaacatacaaaaactagccgggcatggtgacagatgcctgtaatcccagctacttgggaggctggggcaggagaatcacttgaacccagaagcagaggctgcagtgagctgagatggcgtcactgcactccagcctgggtgacagagagagactctgcctcaataaataaataaattaatgaattaattctctagtgcaaccatatggacacagatacttcttttcaggggctttttaattacaaattcaatttctttaataaccatagaactattcaggttgtcagtttcatcttggtagagttttggtagtttgtggtttttgaaaaagtgttcaattttttctaaactgtagaatttatgagcataaagtttttcataatattctcttattgtcctgtcagtgactgcaagagatgttgtaataggccctgttttgtacttgatgttggtaatatgtgtctttttaccttgcaaatcttgctagaagtttgtcaattttattgattctttttaacaaccagccttttgttttatcaattttctctattgttttactatttgaattttattaatttctgttctttattatttacttctttctgcctgctttgagtttattttgctcttgagtttatttttctaggttcttgaggtaggaacataaattatagttttggcatatttttattttattgtaagtaagcttttagtaccataaattttcctgccagaattatgttggtacatcccacaaattttaaacaaaacagcttaattttcattcagtactatttaatttttaattttctttgtgatttcacttttgggccatgaattattcaaagcatgttttaaaatttccaagtgtttgtggaaattttcatgttgtctttctgttattaatttctattttgattccactatagtcagagggcatactctgtatgatttcaaatcttttaaatttgttaaatgttgttctgtgactcaagatatggtctatttatgcacattttcaatgtttgtttgaaaagcatatgcagtcttttgttgggtggagtattctataaatctcaattagatctggttagttgatggtattgttcaattcctctccgtccttgctgattggttagttgttctgtcaatcattaagagcgggatattgggcaacactcagtctccacccaaactctaccatgttgagttctgtgggtcatgtctgctgcctcagcctccagggccttgcaggaactcagcccgtcagtgttgctactccaagctcaggtcttgccatgggccactctggcagcaatccaatctaccaggaaatatgggcacaaacatcacctttgctgaagacaggcaccaccactgggtgtattgtggtggtcattgatgcagtagtggatatccagtttgatgacggactaccatctattttaaatgcccagcaagtacaaggcagggagaccaggctggtttttgtggtgacccagcatttgggtgagagcacagtaaggattatgctatgaatggtacagaaggcttgtttagaggccagaaagtcctggattctggtgcaccaatcgaaagtcctgttggtcctgagactttgagcagaatcatgaacatcattggagagcctattgatgaaagcggtcccatcaaaatgaaacagtttgctcccatttatgttgaggctcctgagttcatggaaattagcgttgagcaagaaattctggtggctagtatcaaagttgtggatttcctcactccctagccaagagtggcaaaattgggctttttagtggtgttggagttgacaagattgtacccatcatggwgttaatcaataatgttgccaaagcccatggtgcttaatctgggtttgctggtgtttttgagaggacctgtaagggcaatgacttatattatgaaatgactgagtctggtgttgtcaacttaaaaaatgttacctccaaggtaatgctgatgtaaggtcagatgaatgaaccacatgctactcatgcccaggtagctctgactggactgactgtggctgaatacttcagagaccaagaagttcaagatgtactcctgtttattgataatatctttcacttcacccatgctggctcaagggtgtctgccttattgggcagaatcccttctgctgtgggctatcagcctaccctggccactgacatggtgggtatgatgtggggaaagaattgccactaccaagaggagatctatcacctctgtacaggctatgtacctgctgatgactcgactgcctctgctacttcctttgctcatttggatgccaccactgtgctgccccatgctgtcactgagctgggcatctatctacatgtggatcctctggactccatctctcacatcatggatcccaacattgttggcaatgagcataatgatgttgcccgtggggtgcaaaagattctgcatggctacaaatccctccatacgttattgtcataatccatattgggtatggattaactttctgaggaagacaagttgactgtgtcttgaatgtggataatacaacgtttcttgtctcagccattccaggctgctgaggtcatcacaggtcatatggggaagtcagtactcctgaaggagaccattaaaggatttcagcagattttgataggtgaacatgaccatctctcagaacgggccttcagtgatggaacccattgaagaaggtttggcagaagctgatacrctggctgaagagcacttattgtgaggggtctttttggcaaactaagcactcatctgctgtactgtccctctccttcccctaatccaaacagcttcaggtttcggtgtaagccacatgagaaccttgattgaaaacatgttctatctgaagagtatttaaggtttccaatacaatgtacacccctcagaaaaaaaagaatggtgtactgaagaccccaaccataagactctacctattttatctattacaactctattataaagtagataaaaatagatttatctatttttcttttcatctccatcaaattttgcttcatgtgttttgaagctctgttgtttgatgtatacacatttagggtcattgtcttcttggtggatagagaattttatcatcctaatgtccctttttgtccttagtaaattttctttgtgttaaagtctactttatataatattaatatacttatttttgctttttaaaaataaatatttgcgtaatacgttttttccatccttttacctttaacctatctacgttgttatgcctgaagtgagtttcctgtagacagcataaatcgggtcatgtttttgttcactcttcaatctctgtcatgtaattggtatatgtaggtgatttatatgtaaagtaattattcatatttaaggattaagtgtctcattttatttatttattatttttgtgtgtctcctctgtttctcatttttctcttttgtcttgccttcctatgggttatttgagcatattttggtgtttcattttgatttatttacactgtttttgagtgtattgctttgtatacttttcttaatagttctatgtatttccttatacatatatgtaacttatcacagcctattgtgatgtaacttatcacagcctattggtggtttgctacttcaagttaagtgtagcaaccttacttctatttaggtccctttacactcaccatttaaaatatataattgtctgaagtatttcctttgcatgcattatatgccatcttagatggtgctaaacttctgcttcaatcataaaatgtaactaaagaaatccatggtgttaaggattatctattatgcttacttttatatttactcattccattgttcttttttctgaaagtccaggcttttttcttttctcgttctctttctatatggaaagctttcatgaatgcttctttaagggtaggtctccctgtaataaattcacatagttttccttctccttcaaccctggaggatattttccccagatagatgattcatggctggcagttattttctctcagcacttgaaaatgtggcgcctcttcctctggtctctatagtttcagatgagaaactgctgtcatttgaattggtgctcttttataggtaacgtgttatttctcttcagcttttttaggatttttctttgtttttagtttcagaaatttaaatacaatgtgtcttggtgtggctttctttggttttatcctgtttgggatttgcttagcttcttgaattgtagtttctgtatctttaaccaaatttgtttttttgtttgtttgtttgtttgtttttgagatggagtcttgtactgtcgcccaggctagagtgtggtggcgcgatctcggctcactgcaagctccacctcccaggttcatgccattctcctgcctcagcctcctgagtagctgggactacaggcacccaccaccacgccaggctaattttttgtatttttagtagagacagtgtttcaccatgttagccaggatgctctcgatctcctgacctcatgatctgctcgcctcagcctcccaaagtgctgggattacaggcgtgagccaccgcgcccaggcaaaatttggggtttttttcagtcattactttttaaatgctttttaagccccatactctttcccctcttttttctgaaactctagtggtatgaatagtattagctcttcctcattgttccagagatttctgaggctctgttggtattggcatcagtgggtttcttttctcattcgaatgtgatatttctggttcttggtataatgagtgatttttaaattatatcttagaccattcggttatcatgttagaagactttatttccacttatgtctgtttattcggcgcagtcgctgtgtttgggtgtagcatgtttgctctggcttacttctgtgggctttcgttccagtggcagtctcgttccctgagccatcttgtgctgctggggcccctcaattcctgtttggtgctgtctgcaggggtggaaggcatgtccctgggctgcctgctgttgctgggtgaccttctgggatggggagcagaccacagattaaaaatacaggaaatataagcccttagcctagtaagtactcaatagttgttgttttatgattaacattactcccatcgttttcctggcccctctcctcctatgggctttacagttatggaattacttgctgaatcctgaacaagaaaggagtctggagcgtgcagcatccttctgtggtttcctgcctatcctactcatcctttaagagtcttccctgctgtctcccctagaagatgtatttagcaactcactcagctagagtaagatgcatcctacgctgggcatgaacttttacagcttttggcacagtgttaggtcgtcatattctaggcatccaacaccatcctatgaacccccttcaaggcacagaattttgtctggttttgtaggttatgtctcagatctatcaaaatgtctggcacgtggtacttatgtgcttactaagtatctattgaaatgaaagggagtaaagctgatgaaggagccttaggtgagagcagctggatgggtcaggtcatggggttccccatcatggctgagtctgagaaagtcttaatgggagagtgcccatggtatatggtgaggcctgagatgccttgggtggggtgggggctggatgtgtgctggatctttgtcattccttaggctgtcagtctctgctcccttcttatcctgattcttgggatgggggcagagtctgttcacctgtggaagttgaagggtctggcctcgctttagctagggtgtgggtaatgtgacccaggcaccgtcagtcagaataacctcctaggctttgacttgagagattgtgactccagatggcaggtccagcagagacaaacttggcagtagtggcagatgcacaccgatgcagctcctggggtggcagtggcagtgagctctggtccatctcttgtcaatactcccagtgccagcgaggaaagccacagcatccagcgctctgcagtggaactgcagcggggcccccaccaggcagccctgcagcaggattgggggtctcgttcctgatgagaggtcccaacccaggttatcctgtccattggtgatgctgtgagccatsccaatgtcctttatcataaattccttcctgtttgaatcaaccacagttggttttcttgcttacaactgaagctggagtgatacaacggaactgagatgagggggatgttgaaggaggcttttggacagttcaaagtcctgtatctctactgatggtcccttggtaaggatcatttttgcatattaaggagagtacattccataaattaatatgtatctaaaaatccattcctttctatattgatgaagtatttaagagattttctaagtgtttactacgatttgagagattgctaaaaacagaacttgtcaggtaatgttagatatgcccacatgtacattgttagattgctaaggataccacactcacgtttaccaaatattgggtatcatgaataaatcctggtttgaaaccattatgatgccacagtgtatttaggctgcatgtttaagctctgttgacagacgagtgagcagtaactgagttagcatctcatgtagaaacacaaaaaaataaaattgcattaagagctctgtcaagacaggaaatccacagtcctgacttctagcagtccttggactgcccggaaagagacttttaggcataccctgcgatatgtttcttggaatcactggggttaaactattatctcaatgtaattatttatctttcatctcataggtactttttcttcttttttggaagcagaaaataaatacttgtttgtgaattcttttttgggattcaagtgtgtccttggtgtctcttttttccgtagattggaagctccacaaacaccctgagtgccctgaaaactgcttttgctgataaagaaacacaggcaatctaccttctgaccgatgggagacctgatcaggtacttaccagagctgggaacaaagagggcctcactgatgctctgaaagcaaatgctggaaatgggtctgggggaccttttcagctgccaccaaaaatctgtggacatatacttccttggcttagggactcagatctgaggtgagaaaatacactgaaagattcttttgtctctggaaactctgaggagaatttatgagacagtgaatgttgcctggtgagtgtgacacacacccctagcctggagaccagccccacaaaaggagacgtctgctgtccactgaagactggtttgcattttattacaaatgaaaagtgaggagattctttttgattttttttcctctagagactctgaatctaacatgtcactgcataatgtccttggctttacctctaaggcttagtactcatttaaacaaaaacatgcctttctagcgaaatgtcctttgttttgtttagcccgactggaaaatatttgaaaagctgtagaggagtctgttcatcttcttttgagctttgtgaatgaaagaggagtactccaggcattaaataaatagaaggattttcaggccagcgtaatgtaaattaacagctaaagtgaattagtgtcaactcgcgtccttccttgtgagatggtttgcatatgcagactgctaggcaaatattctaaaatatcctgtggcaaaaagttcagggcttaaagagagtaagcatctggattttactgcagctttagatttatgrcagaacgggagtgtgtaaagtgaaaatttatttaaaattttttttcctatcaacttcactgtgttttctctttggaagcagttcatcgtgtctctcttctgttccatgtgtggtgccagggtctgaggctataaagatgagtaacagctcatccctgcctttgggaagtttgtgctttggggaatgtgctagatgtatacagtttaatacaacacgggaacagggttgcctgtgctatgtctaggggcacagagtgatggattttgctgtacagatggagggaaggtcagggcaggttccagcgaggcggggacatttgagctgtgtctggaaagacaagaaggaatttttggaacagaagacactgttgatgtcctgggcagaagggacacagaggtgtggaaatatgtggggggctcagagaaaaaagctgaggacaggggcaacggaagaagatcagggtggaggtgaaaaacgttgggttgaggaagactgtggaagtcctcgaatgccatattagaagggtggtgtcaccacagagaggaactctcggaggagccgcccaccctacccatctgcatctcagaaacatgcctcagttgtgccaaggaaaggctggcgctgccatggcctgctgctgggtccttgatgaaagctgggaaggacctagccttgggtgggagcagcaggaatgggaggaggggactgcctccagacgtgagccgcaggaagcagcatcaacaggacctcatggccagtttggaaacagtgagtgagaggtgaggagaaggtaggagcaaggcagaaaggagtcaggatgactgattcctggtttacaatgattttgatattaacggattgaaatgcagatttcaagaagaggcaagtaggcttgggggtggctggtggaggaagctgtgtttgcgaacctctagggagtgcatgggtg

SEQ ID NO: 95700 - DNA, 32083 bp, Homo sapiens
  misc_feature (1)...(32083): n = A,T,C or G
tggattacagcagcagctgcctttccagcccggagcaccccactgaaggtgaggctgtagcctggagggaggggccatggggggtggggcctggaggtgggtggggaggctctggcaacagatgggtgcagtgcgatgcctctctcccctcccyacacccagactctgagagcacggagcccctcagtgtggatggcatctcctcagaccttgaagagccagctgagggtgatgaagaagaggaagaagaggagggaggcatgggcccctatgggctacaggagggcagcccccagactccagaccaggagcagtttctaaaacagcactttgagactctggccagtggagctgctccaggtgtggtcagagggccagcatttagtgcctgcaatttgcccttctcccctccttgcctacctgagaggagggtcccagggtataggctgtggctgggggtctcaaggaggcaaaatctggggcaagggcttggtttttgccccaattcatgatttctctgaccttggtaggggccccagtgcaggtcccagagaggtcagagtctcggagtatctcttcacgattcctgttgcaagtacagacccgcccactcaggtacagaggccccctaccccccagcagcagctctggctctcctcgcctcccagggctgctgccctctcctctccagtgttctgtctctccatgcgcggggtgttttgcactcccagttttgggctaactggcctttccccagcyctatctggctttgtgcttgttctctcctagtgccctggtgctatgagtttctcgccattttggcagggaggagcattgagccttctctgggccttctcccacatgttctccctgtagggaaccatccccatcytcctcaagcctggcactgatgtcgagaccagcccaggtgccacaggcatctggtgagcagccgagaggcaatggtgccaatccccctggagcacccccggaggtggaaccgtcctctggcaaccccagcccccagcaggcagcctctgtgctgttgccacgatgccgtctcaaccctgacagcagctgggctcccaagagagtggccacagccagccccttttctggactccagaaggcccagtctgtgcacagtctggtgccacagggtgagaagcctgatgggttcagtgccagggtgcagggtgtatggaacacatgtacatgctggaggagggagggcctggtgtggccctgatgtgccactgtgctggccactaggtgtcccttaatgggcatgtggaggggaacagcagctcttcgggattgggtgttggcacctgggatgccttcctcaacacctgacctgtgtatacctctgtctcctttgcagaaagacatgaggccagtctgcaggccccttcaccaggcgcactgctgtctcgggagatcgaagctcaggatggtctgggctccctgcccccagctgatggccstccgtctcggcctcactcctatcagaaccccaccaccagttccatggccaagatatcccgcagtatctctgttggggagaacctgggcctggtggctgaacctcaagctcatgcccccatccgagtctcaccactcagcaagctggccctgcccagccgggctcacctggtcctggacatccccaaaccactgcctgaccgtcctaccctggctgcattctctcctgtcaccaaaggccgggcccctggcgaggcagaaaagcctggcttcccggtgggcctaggaaaagctcacagtacaactgagagatgggcctgtttgggggagggcaccactcccaagcctaggacagagtgccaggctcatcctgggcccagcagcccctgtgcccagcaactgccagtcagcagcctcttccaaggccctgaaaacttgcagcccccaccccctgagaagactcccaaccccatggaatgcaccaagccaggggcagccctgagccaggactcaggtgtgcacagctccccagctctcatctcctgccccatccttactctcccctctctgttggccgctgtctggctccatcccatttctgtgggtacagcttctggtgtttcttgtcctgtctgctcctgtcgcaggtccgtaagtcacacccctgatggtgagaccctcctgctaaccttcatgatttccttgtgactcacttgcccattcagtggcttctgaacttggggctggccgtctcctctggaccttgtttgtgtggtgttggggaggccgttggaagagaagccaagaggaagggactgagggcaagtggggggtgcaatgctgagggctaggtctctcctgttctgagtgtcttgggtgcggaggcctgaaagggctacatgctgggcctcactgagctgtatccgtctctttcagagccagcggtgagcctggagcagtgtgagcagctggtggcagagctccgcggcagcgtgcgccaggcagtgcggctctaccactcggtgggtgttaggtgccccccggcaggaaggcgggcacgtcagtagtgctgggtgtttcggataaccatgtccagaacagtatgctaagcctcttgtgctgacaggatggcacactcaagaacatcttgggcagcataggtgagggggttagaggccaggctagcctcttgtaccgggcacctgcggtcatttctggttaagagctggagacttccctcaggaggtgaggcctgaagagaccacacctcctagttggctcaggacaatcccagtttatgtcgttgtcccagtgtaattattaatggcatcctttttcatatccatgaattatttggcccccttagacataggggacagtccaagaaggcccaaactttgaaagagaaagcagattctgccggagttgtcataaggagttgcttataagatgtagacggttctgcaatccaatgggttcctccttgggcgtcacccccagagtctgcctgcatcccatgttccctggccatacatgctgatcttggcgggtagagttcccagctagtcccttctgaggcaggctggacccaggtggggcccctcccttttatatgtctgttgacaggctcctccacctcacttctgggggtgctatttcaggtggctggctgcaagatgccctcagcagagcaaagtcggattgcccagctcctcagagacaccttctcttcagtgcgacaggagctggaagctgtggctggggcagtgctgtccagcccaggcagcagccctggggctgtgggagccgagcagacacaggccctgctggagcaatactcagaactgttgcttcgagccgtggaacggcgtatggaacgcaaactctgagttctggaagcctgtcccaagtgaatgaatgctccagcrattccaaactgcagcccctctgcccctcaccaaaacctgcggggctgcttggagtggaaagcagggagcagtgttcagaggcaaagcagccttcccagccgctcctcgtsgggggcctgtatttattaatttatttccctgactgttgcctcacttccttggaactcctgcctccacagcccctccagtggcagggacaggtcttgggtctttgtcatcttggtgctgtgagaggtaggagggmagcctgccccatctaggaatctgggaagggctggccctctcttagaagccatttgaaattactgcagggattagctccctgtggtggagcatacacagggtactctggggtcgaggtgagaggtgatgtggtattcagtgcccgtcagccaactgtgggccttcacctctacytgcacttcccctctcacaccagctgcactcccgtggctgccagagcagggtggttttccccaatacctggagctcagaaaggcagagccatctggccctccagggtgtccccagccatcaggagacttgagttggtatttggacctgagcccgcacattccactcccattctccctccaagaggggcccagcattgtatttccctgtgaccccttactctcctggccagaacttgagccagctgtgggatgttgctgcaggacagtaagccctcacctgggcaaacatgaagctctggcctcctttcctcagccccttgttcttccctgtcctccaccctggaccccarccggctgctggagcccagaggccaccttctccctgcatcctgaatgatgcttagtcagaagcctgtgttggaacatccctcgtttacggggcgctggcctacctcctgaggacctcagccacagatgagatcacacgcatgcacgtgcacacatgtacacacacacacctacctgcacagcacgctgttgagtgttggttgctagagtatctggctggctgctgtgtgcctggtttcctcacatcctgcctcagcttcaccaccctggcttatgtggaacacctatcagggagcagaaaaggggtgcagtacactaagtgaacccagattctggattcttggtgtccacagcctagctgatacgagatagcccataggacacctggtttaggtagaaggagcctcctcaaaggcagtgctgggcacccacgggtgtgctggatactggagtttgagaggagggaggtgctggggccaaaggagacactagaaaagtggtagatgggacaggtaagtggcagaggtgaggggataagttagaatgtaaaagggcagtaattaggggtgagggaaaggagataggggaccctaggaggtagagtgggaccatgtcgtgaggcagttgaagagttgaggaaaggtttttctgggccctactgctcccctctgctgcaggtaagtcagagcagctttaccacagcttcaggccacgagagccccttcacccgccctgctgcgccataggcagaggcttataaagaaatgggttctgggccaggtgtggtggctcaagcctgtaatcccagcactttgggaggccgaggcgggtggatcacctgaggttaggagttcgagatcagcctggccaacatggtgaaaccctgtctctactaaaaataaaaaaattagctgggcgtggtggtgggcgcctgtaatcccagctactcgggaggtttaggcaggagaatcgcttgaaccctggaggtggaggtggaggttgcagtgagccgagatcgcgccattgcactccaacctaggtgacaaagctacacgccatctcaaaaaaaaaaaagaaaaagggttacaaaaggttcccagctccggggcatcagcctgagtgcgcttgagctgctccaaacctggcccttccccactcctctagcatcgccacccgcatggccctggaactcccgcggcggcgggggcgggcccgtgcctgctgtgccccgacttcccacaccagccgcgcccaccgcaggtgggactcaggttcgccctctgggccaggtccttcacgaggagggagctacccttcgccagaagtttgtgagaatgtggccgcccttttcctgccctctgccccatgtgggtggggggcctcgtggcccggccggcgcccygtccccttctgcatgtctgaggccaccggcaaccgccgccccactccagatttgcccccgccytgttttgaaagccccttatttataacttttatactttgtgcaggtcgcggcgcttcctgcctcatcctcggctgcatggggcgggggcgctgtttttaacgtgcccgtttgtactgatgtatgaacttgtcaataaacacaattgtttgttaaccctgggatgccggccagtggggcaggccgaagcgggcgctgccagtcgctccaccgcttcggtggcagaacccggtgtgtgtccaggggcaggacggggcggggtgctgggggtgtggcctgcggcgggtgcctctggaagggcggggcgagggtctgggggtgtggcctgcggcggggactctggggagggcggggcgagtgcttggggtgtggcctgcggcggggcgtcggggaaaggcggggtctcggccggcgctgacgcagccatggcggaggcggctttggaagccgtgcggagcgagttacgagaattcccggccgctgcaaggggtgagtggctctcccacaggctgcggcgatttccgaacacgggaggggccctgggatgccgctgacaccgggggctcggaacctcgtgtgtgcgactgccctgaggccccgctcgggttgctcttctgtggcaacctgcttcccttctcccgtgttcgcgcgctcccgcggcttcctgggtgattctgttcacgttgttcccaaggcccggtgccgtcttgaccgtggtcgcggcgaagccctgtgtttcctacagtcttgagcagcttgctgttacccttgttgaaagctcatcgaaggcacacagctggtggtcggattcctcccccacgcgccccacctccgacctcaactcccttgtcgcactttgggaggattgcaggctgaccaaatggtccctggctcttcccctgcttggtttttattccttttctttctttctctcttccctccttccttcttttttctatttttaaatgatttcttaccactgaacagcaacacaggctcatgtgtatgtgatgggtatgtaatatacagtggtacgcaatgtaaatgaagcaaggtttcctcccagccccagtttgcattcttacagaaagattgtttatatccgtgcacacacgactttttaccctttttttgtacaaatagtagcctgctaaacacactcttctgcaccgtgtatcttggagatcatttcacattcctctacctcagtctttttcacgtctgtgtgctagtgctgtattcacttagtcatttaggtcatgtccaatccgttgttttcaataatgctgcaacgaatactttgaggattgatttaacaaatacttattcagcatctctgtgtgccaggctctgttcagtgtgtttgagatacatcactgaacaaaacaaatctgtcttttacagtctatgtcctgttacattctaagtgagaacgtggacaatcaaccacaggtgtactgaatgagtacattgtagagtagaagaagtaggttagaaggtaagtgcaggcaaagccctctttgggagtatgcctgatgtgtttaggaaacagtgaagaagccagtctgcaggagcagcgtcttctgcgcatgtgtgagtatgtttgttggttaaatactttatattttttgagacagggtcttactctgtcacacaggctggagtgcagtggcacgatcatagctcgctgcacctcgacctcccaggttcaagagatcctcctgcttcagcacctgggagtagctgagactacaggcatgcgccaccacgcctggctaatttttttgaattttagtagagacaaggctggtctcagattcctcaaacaatccttccacctcagcattccaaagttttggaacgccatggaacacataagccactgctcccggccttgttaaattcttagcagagttatggggtcaaagcaattgtttggatcccttttgaaattttctcacttggaagccccaggagaggaaagcagccattctctaaaggaaatggtgagcaagtaaaacaaatccctaattgcagaagtccaaagggtgaaaaaatggcagtttccatgtattttcagaatcccaggctgtgtgcagtactcacgcctgtaatcctagcacttcaggagaccaaggtgggaggcatctcttgaggccaggagttcaagaccagcgtgggcaacatagtgagacaccatcgtgtggtggcatgtgcctgtagtcccacctcctgaggcaagaggattgtttgagtccagcagttttgatgacagtggcgggcagttggaagcagatgctgtcatcatgctggctgcagtggggaggcacaagtcgggcagcagaagtggctctgggagcagcagtggtggtagtgagtcccctgttccctgcatccccgaggcagccgactgcaccacccccaccctcacatggctgggcaggacctgctcctcagcccagaccctctgctgcagcctgaacctcgctccctgccacatcccagaagcctgcgagcaccctgccaaaggtgcaactgggacttgtagggacttgcacttgtgagtacaaaaatactcacacatgtgcacaaagaccctgctcctgcaaactggcttcttcactgtttccggaacacaggactactaggctcatttgtttggggtggtcagagctgccatgccatatgcaccttgcccgccgccgctgtggggaaaacgygaagaggagaggcagctggggccacatgttccacagagctggcgggaactggggacaagtgggagccccaccccttccaagttggtggagtgggagctccctaggcgcaattacagccacccaagccaggactgcaactcaggcacccctgtgctcttgggagctaggagcaggcaggagccccaccctcctagatgcagctgcagcctcccaagctgcagctgtggacccaggcatgtctgcacttttggggacccaggaaggccccttcctgctgccgcaggcttggaagtgcctgatcctgctgtctggcttctccccactgtcagcacctgatcagatcatggagcaaagttgaggccgagcctgggtgctattgcagtgctgacacaccagccccctgcctccttggccccctctggcctttgggtgccaacgagcatgggagggaggccaagaggggctgagggcagctcagtgctggcctgcaggcacccccttggcacaaacagctygggtgccgtgaatggtggcaagaggcagacaggttcctgggtggaaggtggcgggtcccggtgaagcccgaccttcaagccagggaaggcctgaagcctgggggctgggctgccggttccatggaccggaatggraacttttggtgctttttccggcccacccatggctgcccatggaccaataggcatgtacctcctcccctgtgagacccataaaaagcccctgactcagccagaccagaagagacgatgggacgaccagctgcggggaggagctaccctctctgctgagagctggagagatgacaggacaacctgcccacagagaggagctactctagccagggaagcaagcaggcatgccagctctttcttttccagtattcctgggcccagtggggtcttctcactcagttacaatatttgatctaagaacattcactttccaactgatcagaaagtaaaggtgactggcatggtgtggctgtgagagatgcagtgtgacctcagaggtgaacatcagtgccgggaccatttggagcaggatgtggtaaccaccaaatggaaaccacggccttttggctcgacctagagcatgaatgtagcaaagcgaagccctgtacactttataaaaaccagcagaaagacactccagtctgagtgagcagctggaacaaagctctgctgagctgaacactcaacaggactacctgcctgcagagagaggagctatcctctttgctgagagctgaacactcgttgggacaccctggctgcggagaggagctgcccactgtgggtctcctctgagctatcctatggctcagtaaagctcctctttgtcttgtttaccctctgcttgtctgtgtgtacctcattcttcctggatgcaggacaagaattgggacctgctgagtggcggggctaaaagagctgtaacatgaagaggrctgaaccatgcgtcttgctcgccacattgtgggtgtccagaaggaaagaagaactgcggccctttggggagtccagacccaggagcttcccaagctggggttctgacaccctctttagggctctgcggttcctggtatctgcaagcttccaggcaccaccatgcttcccagtgtcagctgtggaagctgcttatggtacacctggtctagctgcagccttgcaggaaaccagcacctgtgttggcacctgaagctgcctgccccaccgcagcccacatgcctagctgtgcgcagtggccaaaccccacactcattcrctcacacacccctcgctgccccactcgcccttggcaggtgtgggatccaggccggtagcatgagctgagcacagcctgcagggccgagtgggcccaatgggcccgagcaaaacaggcaaaggcatcactggccacagaggtttccagctggtaaagcaacaccccaaagatcccgtgacagtttatggctgcggtgagctattattgcgtcactgcacttcagcctgggcaacagagcaagactctgtctcttaatctcagcgagtacaacagsaagatgtactgagccccagaccaccccatctctcaaggtgactgcttggatgggctggcgtgactgggaaggcctttgccactttgctgtctcctggattccatatctactggatgggtgccatcttgcctctagccagggaagcaagcaggcacaccaactctttcctttccagtattcctgggcccagtggggtcttctcactcagttacaatatttgatctaagaacattcactttccaactgatcagaaagtaaaggtgactggcatggtgttgctgtgagaggtgcagcgtaacctcagaggtgaacatcagtgctgggaccatttggagcagcatgtggtaaccaccaaatgggaaccacggccttctggctcgacctagagcatgaatgtagcaaagcgaagccctgtacactttataaaaaccagtagaaagacactccagtctgagtgagcagctggaacaaaggtaccacctgaatagagggtgtgtggcaagggcaggcacgagacaggaaatcagactggaagagtaggttgggcctggtcatgcgtgycaaggcaggcagcattctctaaggagcagtggtaagccatcaaggcatttgttactaggggtgtgacaatatgagattgtattttcagaagatgactggggctatgatgatgaatgctttgggtgggagtggaattaagccagagaaaccagctagttcactactgcaaccatccagccaggatactggagacttttattcaacattaggcaaatacttgctgagcacatgctatgtgctaggtactgttctaggtcccaggggtgcatcagtgaacagacaactgtctctgcccttgtggagttcacattctagcaagggtgaaagaatgataaacagtttatgtaggtgaaatacatatatatatatatatatatwttwtttttttttttttttttttttgagataaagtcttgctctgtcacccaggctggagtgcagtggcacgatgatagctcattgcagcctctacctcttggactcaagtgatcctctggcttcagcctctagcgtagctaggagtataggtgcatgccaccatgtccagttaatttttaatttttttgtagagatggggtctccctaygttgccaaggctggtcttgacctcccggcctcagcaatcctcctgcctctgcctcccaaagtgctgggattacagacatgagccaccacgtctagccctaaaatatatagcatgtcagatggtgatgaatgctaacgagaaaaaatacggaaagggatataaagatttgcrgcagggggacagattataaatttagaaagtatagtcagagaaggaagtcttatcaatgtgatatttgagtgaggacccaaaggaggtagctggaatgtggatgccagtggaggagaggagacggtgggtttgagagacataggagacagaatcaacaggactcagagccaatcagtaggatgacgggagtgaaggagaaagctgagtcaaaaagattttgattagaggtgacacagggccactgtagacccctgcgcaggcggcacaccacgcagcctgccgaagtgtacgtggtggccctgggtgtctggagatggtgatgctgttcagcaggacccaaaccatagccgagcccttccttttcctccattggtgtcatctggtagtttgtcttcccgggtaagaaggttgtaaatttcttaagatgatgattgtgtcatcccygatagccccagattagccaagccaagtgctgagcacattcctggtgctcagtaaatgtcactgttaaagggggcttcccagagccacacaacacccagaatagcccgtggccatggggcctcagccttactcattctggagctcccaatgccacttccatggtggcctttcctggtagatgctaggaggctggcctctccagggtgggaaggcatagggtccactgtgcagacacagccccacaggggatttggcttatgggctgggtagcagcctctggccctgtggacggtcagggcccatgctggtgtgtgtgcgtgatgctttctgctttcatttttccgtcctcatctttctattactggttgtccagggtcctttggtcaccaacgagcatttcccagtgacacagcgcggcctttccagggagggcatctcttgggcagggactgggtgctgcagacatcagcccttccatcccctgtcttcttctttctctcagagctctgcgtgcctcttgctgtgccctacctggacaaacccccaactccgctccacttctaccgggactgggtctgccccaacaggccgtgcattatccgcaacgctctgcagcactggccrgccctccagaagtggtccctcccctatttcaggtgggagcygccctggggtcaggtgtgagcagtgattactggcatctgggcatgggctgagtgtccattcctctagagccacagtgggctccacagaggtgagtgtggccgtgaccccagatggttacgcggatgccgtgagaggggatcgcttcatgatgccagctgagcgccgcctgcccctgagcttcgtgctggatgtgctggagggccgggcccagcaccctggagtcctctatgtgcagaagcagtgctccaacctgcccagcgagctgccccagctgctgcctgatctggaatcccatgtgccctgggcctccgaagccctgggtgagtggaggtggggtggtcstggccctggacmgggaagatatgggaaggaggggggtcagcctgtttgcccttaggtgatgacctggcctatrggcttggtcctgtcagcatctggtgcagctcactaaatacattcccaggccttgacttaatcatagatgaattgccaaagaytgttgtccttccttctgccccagggagggaggaccccttccccaagatttcccaacctctgcctcttctccctgacccctttcttgggattcttctgtgctcacccaggttttggctctggcatcactggatggcrgctttccccagcctggccttcctaacttgctctctgccttctgccctgcaggaaagatgcccgatgctgtgaacttctggctgggggaggcggctgcagtgacttcttgtaggtgtaaggggaatacaaaggtggggaakgagcaggttggggcagagggagggaagacgaggccaggagtggrgggatggccctgggtggaggttgggctgttctctaagatttcttttggcttctaggactcgggcaccacagagggtttcccctgacagctgaggtcggggaatggacccatggcattgggggcgggtgcattgtttcttctagacccaaagaaacctccctgaaggcccgctgggccagggggtaagtgtaggagaacttcccctcttgttgaagaggagtccagggcctggtgagcatcaggtccctggtaggcagagttccagaatgcccatcagagcccctggcatctccagcccactggctctgtgygtgcttctcttttgtcataggacgtcttggggtgcagggctctcagcatgatggtttgcctcctcccgtgcccctgccctccataccctgcccccgggccttctttctgttggcagtgcacaaggaccactatgagaacctctactgcgtggtctcaggagagaagcatttcctgttccatccgcccagcgaccggcccttcatcccctatggtaggggatgtggcctgcagggaggggctggggaacagctggcccaagggggagggaggcagcaagagcctgggaggccagttcccaggcctgaggtgtggctgtggcatcyccagtgcaccagggsccctgatccccttgcccctgcccagggctggctggggtggaggagggtctggcaagttccaggctgtttgcaattcccccacacccttctcccttgggctccagagctgtacacgccggcaacctaccrgctaactgaagagggcacctttaaggtggtggatgaagaggccatggagaaggtgtctgtcctgttcttgggctctagggagggagaagggcagaagcctggctctgaagaacaggcacaaaagatctggggaggtggcaccttgctctgaaaagtcyctaagtctgaggcctttcactgctgagccaagcagggcctgtggtgttgacctttggaagggacagagcctgaagtcctggggggtctggggggctgctccctggcatctgatgtgttcccaggtgccctggatcccactggaccccttggcgccagacctagcacggtaccctagttacagtcaggcccaggcccttcgctgcacggtgcgggccggtgagatgctctatctgccggctctgtggttccaccacgtccagcagtcccagggctgcatcgcaggtgaagagttgcccaggccrcctggggagaggccctgycaaggtccagcagggcctctggggggaggcttgggaggctctaggtcagaagagggatcttcatgctcagatccccgttcttcccacagtgaatttctggtatgacatggaatacgacctcaagtatagttacttccagctgctcgactccctcaccaaggcttcaggccttgactgatggagcactggtgaacaccaccaagcacgcctcgggggacggagccagcccctccctggccaggtcaattctcgagagagcctggagtgtgcatgctggctgctggccccgggtccagcatggcttgagatcagctttggaggatcttggaatgtggtcataaggactcaaggtgccaggcaggtctgggtgagggttctcaggaagttgccacacaggtgagcagagtggggatcaggtgcagcggcacctctccccagcgctgtgatgttgggcgagtcactgcgtctcgggcattggtgtcctgtcagtaaagagataataatggctgtacctcgcggggctgttgtgggcttggagatgatgtctatgaggaccagcatggagctggcacacaggacatgttgaataaaaggtagctgtgagtcgtatgtccttttttttttttttttaagatggggtctcgctctgtcacccaggctggagtgcagtggtgtgatgtcagctcactgcaagctccgcctcccaggttcacactattctgcctcagcctcccaagtagctgggactacaggtgcgtgccaccatgcccggctaatttttttgtatttttagtagagacggggtttcaccgtgttagccagtatggtcttgatctcctgacctcgtgatccacctgcctcggcctcccaaaagtgctgggattacaggtgtgagctgctgcgcctggcttatgagtcgtatgttctgatcctccctcttgaagttgccttctgtggtctaaggagggcctgaaggttcaggtaaaaacttcagggtgaccttcactgggggtgagggctggatcccagcctgggcccaaagagccgtcagctgcccaagtcccgctgtccatgagagtcaccgcagcccctccctgggacaagcaagcagacctgagtcttgtagctctctggtccggacctctttgcccaggaccttgagagctattcctagctctcctatggttactgtcctcccccagttcaggggcagcaggtgggacctggtgccctggggataacccctgtttctcccataacaggcacaggcaggaagggacggaagcccccgcctctcctggggctgtccctctgaggaaagagttggtctccacacgctgacccccccacaaaccatgccctggaggcagaagaaccccctgcccctgagtgccaacccacaggcctcatccctggccactcagcacctagctttgaagggctgttttatgtgacagccactcccctgcctgtcgtgagggggcccgggtgttcatctcagattgatggatccctgccatcaagactgggcattcctgtccaacaggtgccagagttgcgaaaggcctgtgacagggaactccactcttcccttggctgctgttctgggactcacccctgctttccttctgctcagcccctggcagcaagctctccaggctgggattgcagggctgggtggggcaggcccagctggtaaaggctggcgagtgccacagaggtatcaggagctctagtataggcttagggtgcctcatttcctggacaggtggctggttcargagtgggtgtggagcttaggtggagcagaggcggcgggtaggagggacttgggaccaattgggacatcacatccctggctctgggttagaaagctgacagtccttgatcctgtggccactgccccatcattcctgctcctgaggactcagtctcatggctgtggtaaggcctggcagggccctgggtccctactgggacccctggtctctacctggggcctagttaatatgtttcttatgggagctgtggtcttctccaggggtagggaggggagtttattgaccacaagaccagggtagcgggcagaagccaggggaggaggaggcttggggatgagggatccgtcctgagtgttttctgtcctgggaacgggctcctggcagagctccctggcaccacagatttgggccctggagactcagaggctcccagctgccgccctgaggccctggaagcaagtggctcctccatgctcctctgactcagttgcctggagtgtgagggccctgggctgaccstggtggatgaggccctccagcactgccctggacctggttgctccctggacttgacctgttagggtccttgtggaggcaggtggaaggccgaaaggaagcagttggcacaggcttccctggtcccggtgcgcctgccaggctgcattcccagaaccaggggcatgggtttggagggagctaccgggggaccatcttcagcctgacctggcaggacctggaggacatgacagcctgtgaggggtctgagctaggagccgcctcccctgcccaggagagagcccatttccaggatgctcttctgaccagggtggagggagggtacgagagcagctcagcctggggcccaaggccctgatgtgctacttcccctccctcgatagcttatgtcccctgccacccaagaccagccggaaagctgcttagctggggtgtgggctggggatgtggggtggagagcctaaaggatactagcccgagaaggtggaagcaggtctgtgtgaggcataaatctggagccagcctgcccgggctccaaccccaattgtggacctcaggcaagtgactgcttctctgtgcctcagtttccttgtggagtgggccatcgtaaatagtatctgtgcataaggtggttgtgcgataaatgagttaatgtatgcaaagcccttggcccagagccggcgcagagcattgtgtaagtgctggcaggcgtcatgatggagatatsatgtctcctcttgttgattcaggattctgatgagatggaggatgggcctggggttcaggattaggccttgaggcactgctccagcctcctttgtggcccctgtcacccttggcttcatcggcccgtagcaggtctcccctctcccacctctgcaggcagaggtgtccaggacctgcctgctcacggttcgtgtcctgcaggcccatcgcctaccctctaaggacctaggtgagtgcgcaccgccctggcccctgtgctgggctgagggaggaggagggtgctgaggaggagggtgctgtggctggatttggtggaggcgggtgggccggtgggcagggcctagaggagggagctgagaggagcttctgggtggaaggtggcagctggggctctgcctctggcccccacttcccctccccctcagtcttaacccacatggggctctaggtgatggaaggaagtgggtctgggcggctgggaagggctcttgtccaccgctgggcacttgttccttcccgcagtgaccccctctgactgctacgtgactctctggctgcccacggcctgcagccacaggctccagacacgcacggtcaagaacagcagtagccctgtctggaaccagagctttcacttcaggatccacaggcagctcaaggtgggccaggcatcagcgctgactctacccacatcctygccagccactgccgctgccctgctcacctttctgtcccctccctcctgcagccctgtcactcttttcccctccagaatgtcatggaactgaaagtctttgaccaggacctggtgaccggagatgaccctgtgttgtcagtactgtttgatgcggggactctgcgggctggggagttccggcgcgagagcttctcactgagccctcargcaaggcggtgtttccacggcagccctagctggtgtctgggttgaaatctccacgcgcacacatgcacacacacgcatgtctctcatactcactgacatatrtgcactccttctgaccctttctaacttacttctggctctcttcccagggtgaggggcgcctggaagttgaatttcgcctgcagagtctgtgagtcaggggcctggggcagtttgggtgggagtgccttgtgggaaggacagcactagtgcctgggggatgcccaggtctctgtggggtgggaacctggactcctgctaagggggctctgggggctctttccagggctgaccgtggcgagtggctcgtcagcaatggcgttctggtggtgagtgtgccagtgctctgggaggcggtcyggggtccccgggactccctcatgccagcgacttgaggtacaggcccaccgctgcctcagcctggggaccctgggatttcagtttgttaagggaatacaatctcaagggcccaggtaatgaagtgcagaccagcagcagccagggtgctgcgagggtggggtccctgaatggggggtggggttagtgtctgaggggctgtcttcatgactcaggcccgggagctctcctgcttgcacgttcaactggaggagacaggagaccagaagtgtgagtccccaacccactgggacagcccctggctctcagctcttgtcttccccctttaagcattggacaattctccttggggcctgagctttccccttaggccttctcgggggacnntggtgggggatccatctccaccagaccatttcagcggggagagggaggtgccctccaggccacgcagcaagatgggttctgtgggcagagataccgtccccagcctctctgctctggttcctgtttccagcctcagagcacagagttcagcttgtggttcctgggtcctgtgagggtccgcaggaggcctctgtgggcactggcaccttcygcttccactgcccagcctgctgggagcaggagctgagtattcgcctgcaggtagtgtgcctcgctccctcgaggtggggcccccagaacttcctccctccctctgcacctcctcccagtctgacctctgctccacctggcagagtgggcaccctggcagcatgtgtgggcccatgctggcctccccttcccgtccctcccatamctctatggctgccggcgggagtttggtgaggtctttgctaggagtggaagcgtaaagattcttaggtctscattctttgtcccctgcaggatgccccygaggagcaactaaaggcgccactgagtgccctgccctctggtcaagtggtgaggcttgtcttccccacgtcccaggtactggcctcccagggaaggaagcaaggcgcctggatggggctgggayccaggccacaaagggaggggcctgcttcccgcttctccgtgggtcacaccctgagcaggtgctggggccaggctctttggggagtgtcctctgagcatccctgcttcaggcctggygcctgtggagacrgtggcggggcgggggtggtgcsccggggatcagggtaagaggaccagagctgggtggaggtggccgaccttttgtgactggggccttcacggttttcaggagcccctgatragagtggagctgaaaaaagaagcagggtgagaggcctggctggggactgggcaaggccctggaaaacaaccagggygcggggctggaggaggcctggaggagtgagggggagaaacagccgcccctcatcctcatgctctctgaaggggctcaggcttgcgctcgakggggcacgaagtactgggaggagtactgggaggagtcttagcacctatggtcagaggggcgagtgaccggcccagtgccaggcacccggggagcacttgataaatgtttggctggaaaacgcagggaggcaaggatggaaaatggtaacatggtttggggcgcagagagggcaggaaaaccaagggagagaagaggggaaattgcgcccttttgggtggaagctgttatggctggaccttaaatgatcttcgtagagttgtcgcccaccctggccctctgtcttgagagagtggcttctcacctcacagacacaggattattggtccttttctgccccgccccctgccctttttttttttttttttgagatggagtctctctctgtcgcccaggctggagtgcaatggcgtgatcttggctcactgcaacctccgcctctggggttcaagcgattctcctgcctcagcctcccgagtagctgggattacaggtgcccaccaccacacccaactaatttttgtatttttagtggagatggggtttccccacattggccaggctggtcctggcctcaagttatatgcctgcctcagcctcccaaagtgctttkaactccgtgggtaagggacagaacacgagacttggaggggggggatctatggtatggggcctgcctgggggcctgtctgcacctgggaccccaagcagcctctttcggccacggcattctgggtcctgccagtctgctttgctgcattcccaagcatgtccacatggacacactctccccaggtgtcaaacttcagtcttgtgacacgggagtggcattgagggttggggagaagagggagggcagtagstattacaggtgaggcagacccagctttccattctctggggagggttgagagctgtctcacagtctcttccttccccggccagactgagggagctggccgtgcgactgggcttcgggccctgtgcagaggagcaggccttcctgagcaggaggaagcaggtggtggccgcggccttgaggcaggccctgcagctggayggagacctgcaggaggatgaggtttgggggctgggctggatggggtgtcccygggcttgcttgggcctagctcctggtgctgaacactggagctgcttgtcccygatctagaccagagctcgtagctgcctgtccccaccctgcttcctctcacctgrtgttagcagggacttggtacaggcagagtgttgcttgaggcacctggagcccrcatgggagctacctcatagggctggctttcctactctgtttcttggttctcagcctagcctgtctgaggagggagacagatatctggtatgaggcctgttggcccagggtgcttcaggaggttcatattagcctgggccgtctcctgggggagtgatggcaatttgggaaaattctgaggcgggccctggggcttccagaaagtgagcgtcaggctcgggggctgagggcaaggagatgaggctcagaacttgcctgggccattttttcctggagcccttaggactggaggagctgggcactcaaaaggctgtttctggcccccagggctgactgagaactggtcccaagacctgtgatcaggccttagctgtgggctgggtggccacttgacctgctacctcttcttcctgtgacttggccttccccatccctagggcctctacaggcctggctctcttcttttccagatcccagtggtagctattatggccactggtggtgggatccgggcaatgacttccctgtatgggcagctggctggcctgaaggagctgggcctcttggattgcrtctcctacatcaccggggcctcgggctccacctggtgagctgggggcaggctgatgctggaccctgtgtggcagggggtgctggtgccagggttctcctaggcctctgagaaaactagaagggctgggagaatgaatgtgccagggagaaacgtgctcaaggggaccctgggaaggtccctgccaggccattgtcctagaaagccnggggcacgtggggtctagacggggtccttcagtgacagccctctggctttggctttggcttttcccagggccttggccaacctttatgaggacccagagtggtctcagaaggacctggcagggcccactgagttgctgaagacccaggtgaccaagaacaagctgggtgtgctggcccccagccagctgcagcggtaccggcaggagctggccgagcgtgcccrcttgggctacccaagctgcttcaccaacctgtgggccctcatcaacgaggcgytgctgcatgatgaggtgcgggggctgcngcctgggggcagagccagggcaagggctggagctggggctcggtgctggacagcagggtgggaaaggccctgggcacccaggccgctgtgggtttaggttctacgcatctttccccagccccatgatcacaagctctcagatcaacgggaggccctgagtcatggccagaaccctctgcccatctactgtgccctcaacaccaaagggcagagcctgaccacttttgaatttgggggtgagtggcccaagagctgagacctgtgcccttgcagttggtggaataaggggagaangaggnctgtgtgcagattgcagatgtcacacccacctctcctgagccaggtcccgtgctttctggagaccggcaccctaccagggtccctcagccctttgggaaggaggcaggggccttaggtcctatgcacgaagcccaggccacaaggcctgggcctcctggtcctcagctgccytaaagcaaaaccctgggtcrgggtgggggtgtgggtgcctaagggctctgcaccatgaggctgaggcrtggactcctcacagagtggtgcgagttctctccctacgaggtcggcttccccaagtacggggccttcatcccctctgagctctttggstccgagttctttatggggcagctgatgaagaggcttcctgagtcccgcatctgcttcttagaaggtgaggggcactggcaggctggggaagctgggccgagcagggaaaatgggtcctgggtgagagggcagcctcggtcagaagagtttcctgggccaggactggccatggggaagggtaggattgggacaagagtcgggggccctcttccctcacggccgctctttcaggtatctggagcaacctgtatgcagccaacctccaggacagcttatactgggcctcagagcccagccagttctgggaccgctgggtcaggaaccaggccaacctgggtaagtgctccgggcccttcataagggtgccaaggggcagccagctggggctgcaccagggggcggkgggttcacncctcttccccctccagggtcaccaccaaggtggggataaaggtgcaggagtccccatttcccccaccttgcctgtgtagacaaggagcaggtcccccttctgaagatagaagaaccaccctcaacagccggcagratagctgagtttttcaccgatcttctgacgtggcgtccactggcccaggccacacataatttcctgcgtggcctccatttccacaaagactactttcagcatcctcacttctccaymtggaaaggtacctgcttctctccaaagtcctcctgtggccacctgagccttgagtccccagtccagatacccctcacagtccactcccattctcctgctttgagcttgattccctggactacttggaacaggggtctttttctccttgtcttggggacccagggcccacctgcagggctgtgggggtgttggttcagcaggagagcagggaccagaggccagagtctctccttccagcaggaatctggtacccttggtatctgtgacaattgctgctctccccaaccttccagctaccactctggatgggctccccaaccagctgacaccctcggagccccacctgtgcctgctggatgttggctacctcatcaataccagctgcctgcccctcctgcagcccactcgggacgtggacctcatcctgtcattggactacaacctccacggagccttccaggttgrgaagggtgggcagcccaccagggaggcggtgggtggcccctgtcccctgaagagaggggctttggagtccagtgtctggttcagcttcctttaggagctgtgattgggacactggaatcttaatttgccaccagaggagctcattcttttccggaagttgggaggctggcgaggttctcctggtatcttgtagctgggtcccctttactgacctgcgaggtgtggtcctgggcctctgggcccacctgctgagtctgctttggctcccagtgtcagaactggaatgctgggagtaacccggctccgtctagccccagaggagctgccaccgaggcctgtcaggtgtggagagttttttccaacgactggcttcataggccccactggagaccgttttggcatttgagccccaggtcctgtgcatcttacgtcagccccagtgttgaggatgccaggggccctgtccctctgaagccccttctgcctgccctgcagcagttgcagctcctgggccggttctgccaggagcaggggatcccgttcccacccatctcgcccagccccgaagagcagctccagcctcgggagtgccacaccttctcygaccccacctgccccggagcccctgcggtgctgcactttcctctggtcagcgactccttccgggagtactcggcccctggtgagctgctgttcacctccccatcctgctgccccagtcccccacacctcctccgtcccctgtgcctctccaaacctgtcttccccacaacgtgttccccatgccaggctgcactctctccacaggggtccggcggacacccgaggaggcggcrgctggggaggtgaacctgtcttcatcggactctccctaccactacacgaaggtgacctacagccaggaggacgtggacaagctgctgcacctgacacattacaatgtctgcaacaaccaggagcagctgctggaggctctgcgccaggcagtgcagcggaggcggcagcgcaggccccactgatggccggggcccctgccacccctaactctcattcattccctggctgctgagttgcaggtgggaactgtcatcacgcagtgcttcagagcctcgggctcaggtggcackgtcccagggtccaggctgagggctgggagctcccttgcgcctcagcagtttgcagtggggtaaggaggccaagcccatttgtgtaatcacccaaaaccccccggcctgtgcctgttttcccttctgcgctaccttgagtagttggagcacttgatacatcacagactcatacaaatgtgaggcgctgagaccatctgttattactgctgagaagggccatgtcattctaggctcttggctgtacatgacaagggctggtacagagctcgctcatcagtgttcttcctccgaagagcacattctctgcacacgtctgcgtctacctgtgctcagagtcaccccttccaagcaaggaggaggccacatgggcctggggtagccctggccttgcccacctgctctgccgtaacacgtctcctcttcacccagacaggaatgcagggggaggccaggcaatggctgtttcctgccacatggtaggacccatctaaccagaaggaactgtctattccagaagctgggcctggggaactgggttgaagcagccacgggaaggagcccttttgcctgtagctgagtcttattctggtcccttagatgtgtcctcgcttgtgcccctgaagtttggtgttgcactggggttcacctcagggatcagacctgttgggaaaacggaatgaatttagtagggtatggccaccccagaatcttctccaaacaaacacacactggtgcccctgccctcccctggaccagccagcctcctagaataagcgtgggagtggattccagagctgactgacaggcgctgcagcagcgaccacagtgacgsgtgagtgggtgggagttgcctcgactttcataacccaactctacgtctgtcagctggcctagcagccccagccctgggttagagacagcagaaaaaatggctgtcctggtagcctyaggagccactgtgtccaggacaaggcctgtcccgtcagcaacacatcatctaaatcatatattgggctctgcaggactgggagcasatggttacactggagaccacagccgtggctgccacccctcatggtatgagccctccaggcacacggctgtatatgcgtgtgcacatctaggcacatcctggcatggggcccatgcacggaggatttgcctgtctccagtccctcctccactttcacctaacctcaggtgtcccctccccctggagagcctgaagccctctggtttggaagggaaggagatgtgggtgaggggggttgagcatcgaaatgatgctgggatctacaaggagggactgaggagccatgtaagagcctcctgcccctgcacatccaccttcgcatctcctccctggcctgcaggccgggacatgctggacctctccattgccatggagtggggattggggaaagcaggggaggaccaggtagagaacgggttggaacaagggtggggcagggtctggccgtcctgccaatgtgctgtgccttggagaggggagaggagggaggaaagtgaggagtgcatgggaaacaaacccaggcaggctctcagcactgggcagagggaaacctggctgctcctcccacaagcagccgagcaggaagggcacagggagcctgggcagcttcgtctacagggtccccacactagagcctggagtgagccctgggaggggaccactgtagagtctgtggaaatctgggctttgtggcctggattcctctcagctgagagtgggcaggggcagctgagggttccaatagcatttccctacagcccaacagagtaagtctgaggcccagaacctcaggcttcagaggacagcgcctgccagccactgaagcccagggctccccgccctgcttcccccacccaggtgtcccacctgagtagacatccaggccgggcatccttggtcgtgcactcattcagagagctgacaggtttggctttgagttttgggctcagactctgggctgcagagcaagggaataaccactgttagcccggcccagaccatctgcaggcgccaggtctggctgctccttcctccagcttctggaggctcagcacagccttaggcagcctggctatgccaggcccttcccacgtgggggtgtggggcgggctgagcacttgtgggcaggtttttcccccatgcgtcctgcctcttaggaaactcctcacaggtgagttaagaaaggctgagcctttcttaggaggtgggaaattctggaatgtcgaacaactcaagatccctttgggctcctgggaagacagactcttgggaggagagtccaggggaaccagcgacagagctaggatcccagacacattccctgaacacacggtccacacggagcctcagcagagcacgctgaccacggaagaaagtccaaagggttgtctctatatattcctccaagtagaacctggcttgcttactgtctgcaaaacaactcaagggtggtgacattcaaagttgtctgaggactagaaggttagagaagcacccagatcagacagaacagagcctggaaagcccttggaggaacacagtccatgaggattctggcaggaagggcttggggcagtctgagtggcagactccaaaaggggcagaacaggaccaggacacagctgggggttcaaaactggccccatctctgctaattagctgtgtgatcttgggcaagttgcgtaacctctccaggacctaaattctttgaggaaaaacagtaagtcccacttcttggaggttagagatgctaactgtgaaacctccctaggatgcataaaacactaggggcccaggagcttggggcccagggagtcggccgccctccccgcatccttcccctgaagcccacctgcagtgctgcccagggctcgccaccagctctcagcctgctcttcggacggtgctgcaaacaggatctctgccccactggtcagcctggcacccacagtcacaggtcaaactccactgtccctttggggacccccacgcctccagcccccgctgagccaggtggctgctgggggygatgccggagtccatgtctctccgctcaccttaaggagaatgtgtgtttcctgccgtggcggccccgcagcctctcacaccgggctcccgtgaggtcaaggagggctatggaagctactttctgaggagagatgagaggcaggggtcactgcggccatctcagcttttccctgtggggtccctctgtcctggggcccctctgccttgcttcccagcaccctgatgtctgcatctcccctaccccgcctggtacctccgctgccatcctctcatccaggaacaggctcagagagctgccctgcaagttcccgcggcagctgtcccaggagctcgagctaggctgtggagaggaggcgggaaggtcgcatgagccacacgcaggaagccagagctagggcctgtccacgcctcaccatgtgtgtggagcttcccaggaaaagcggtggattggaccaaagtcccaatggggaaagggaagccacagaggggctctgacgggaaaccaagcagaaggggaagagcaggtggggaggaggaatcccagcacctcctggtgggggtgggtaggtgggggcggtggcaggagctgggaagggtcccaaggagccaaactgcctggacagcatggtggggggtggcatctgcccaagttcacagtgcaagggtgccaggcccagatggctcttcgagccactcaagtgctgctgcaagtggggagctgcctggagaaggaatctccaggcactcacctgcctcccgccaggcagcaggtgctgcttgaactccaaagacccctccatggtgggggtaccctttgcatcctgaaaatgcaagatggggcccagaaatgtcaggaccagcaccctcaggaaggtgggcaaggcacccactgcccccagctctctttattcctcccatccaagtactaaccaggcctgaccctgcttagcttctaagatcagatgagatcgggcatgttcagggtggtatggctgtagacagccatctttattcctaatgaccttcagctcctgtgcccgggctcccagcactggctccagggtgtgggccctcacccccacagccccagccccactgcatgcttcagggagaccacggcgggggtgcctgcagccccatagggacacctgcctgggggtccctcgtctcagccagctgtgctcctagcccctggtgtccagagggcctccactgaaaggatgtcagcgagctgccagctctcccgggcttcagctcctgtggctgcagcaggagctcctgttccatcttggggagtgggcaaggtgggcaaggtgagccaggtcagggagaccagccacacctcaggttcccgtctacctcccctcccccagccctcccggtcagagggggcctgcctccccatcactagctctttcagctttggctctggaggctcacacccagtccacaatggtgcctctcccaccaccgcagctggccagggaaaggagcaggtaaggcagggccgggtgagggctcagtgccctgggagacactgacttgcaggctgagagggactgttcccccaccagccctcagcccctagccgaggcagtcgtcacctctgtcttttgcatttgggcaaacttctcttcctgggctgccagcagcttttctaagtcctggtgtctgtgcagcagcaactccacatctgacactgagtgctggggagaagcatgttcaggtgacgcccagcttgggggggggggsccagagcctggtagccagctaaggggcaggacccccactcaccccatagtcgggcttcagcaggagtccytcccagcaggccagccaggcctcagcctgctccagcctctgccgaagcttctgcaggccccagctctcggcacagcgttgccagcgcagggcccaagcctcctccagctcctgcagccgcccttccagctcctgcaggcactctgtcacctggtggggaggggctgctatgggtgacagcttgggtagggctcccaccatgggcagggcagggctggagagccaagtgttaatggaagtgcagagggaaggctgtgagacccgcacctgccccttcccagcctctctccctgcmtgcgcccagccttcctttcctgctggtttccatgcctgtgaggggccctgaggccctgggcaatcaggctgtatccccagcccaaccccaggcccaccctctgagttcacacctccgcagacatgaagtggctgttgtccaccagctgctgtccttcctgccgcaggtcctgggcttgaaggcggcactccctgatttcttgccccagctcttcatgctgcccaaggagctgctcagcccccgccacgtcctcagccagctcctcggaggacgccagctcctgcctctcctgtgcccatgctctgtggggcagggaagggagctgttgtcagggctggctggggagcaggggagggagggtccagctcccccaagagccaggatacccccaccccacagggtagagctgagccggcagctgaggtaggacacctacagcagttcctggcagcgcccgaggaaggcatggccctgtgcagcctgcgccagccactggcctcgctcctgggccttcgcctgcagggtggcccaggcctcctgcaccttggccaggccccccggagctgcaggatgtagctggcccagtcggcagvcctccgtctgtagccgtgccacctccttctccatagcttccagctctctctgcaaccagagcatgagatcaggcctcagtccccccactgagccgatgcgtgctctgcattcaggagcaccaggcctctctgaggaaccacctccactctgctgcacaagctgggccaagtcctagggcccctcggggaaggatctgggtttctggagaagaggctgaagcaggctggggtgggagggctgagataggtcccctcagccaccgccttcgggcaggggctcagacaggcaggctgcagggcgtgggcctcacctccaggcgcctgtgctgttgctgcagggtccgcacagatgacaggctgtggcctccgtcctcccccttcatcagggccgtcttctcctgcatcc

SEQ ID NO: 95701 - DNA, 45313 bp, Homo sapiens
  misc_feature (1)...(45313): n = A,T,C or G
ccagaataacaggtaacggtgaaatagcgtagcaaatctaagctgtcatcttgatattcgccatcaaacccacctttaagtagggcctctctatgattatcatacctgaaaaacaaaaattagcatcattgtgaaggctgaataagtaagaattcaaaaggatttcttgctccttttgaatattattattgtacatttttggttgttgatatgtccaatccataaccaaaaatttttaatgaaatattaacatgaaaagagttcataatctttcacagaactgttaattataactaggcctgcaacttctgatacattatacaatgctagcccacatgaacaggggaatttaaaaagccaaggaatttccatgactgtctctgagtcccgtacttccacaggaaagaaacataaaacaggacataggaaatctggcccacagaatcattacacatctgtgatttggaaatttaccaagatgcactggaataagaatcttcctaaatttatgtcaacttaatctaggagcttcacacacacacaattgcttctcataataactctgtaaaggcagttattatctccatctgatataaaaggaaatggaagctcagtgatattacataatttgtcatccataataataaaaccagtaaccagcaaagtctgaattcagaagcaggtctcctacattgggaagaccagctcctagccactacacggtactgcttccaggtaaaaagagagttactaggcaagagctttgactaaaaagacaaaggaatcccaaggatcagaaaacaacccaagatcttgagaagagagtaggcaaaaggaagtcaggaaagaatttcaaagttctgggaagaaggcaaaagcaattctaagaccagatctccaaattccttgagtagagaaatgttcaggatcctctctctgagtttcttatgaaacacaattttgtaagaattttctttgcagcctttctttcttgacaaccacctggttgtacactgtttaacagaaagatgacttgcacagtagctctttgtaagagcaggatcttgcacagttatgtcaaagcttaaaacctatttccttgtagcaaaaagttaattgagaatctgaaaactcagaacttcaacatagtaattttcatctggaaattattttaaatgatcacaccatcattagtaatatctgtcacagatgcagaagcttaattcaatttcttcatataaagtagttttgaggattaccattcttgtattaaaacactgtattggttgagcacagtggctcatacttgtaatcctagcactttgggaggtcaaggcaggtggattgcttgaggtcaggagtttgagaccagcctggccaacatgctgaaaccccgtctctactaaaaaaaaaaaaaaaatacaggtgtgtggtggcacacacctgtagtcccagctactcaggaggctgaagcaggagaatcgcttgaacctgggaggcagaggttgcagtgagctgagattgcgccactgcactccagcctgggtgacagagcaaaactgcgtctcaaaaaaaaacaaaaaacgaaaaccttcttcctgtctgatatcagtaaatctatcatacaccaaagggtatttaatgagaagtcacctaaagtatcaaaattaaaactatataatatcaccaaactttgtttcaccccctatgatatcagataattggagcaatcatttccaagcttccttctgacccaaacgttagattttatgtgatgactaggtgacagatgtttcagaacacaccaaaaaccatttaatgtactaaatttgaaaaaacaaccacctatattgataactgctcccaacatcataaactaggatgggaaggacagcgtgatgctcaccatgctctttcctgagggtcactcaacacatcatatgctgcttggattaatttaaattgttcagctgcttctgcggcattatccagatttttatctgttaaagtcacagaaatttaagtcaatcaaaaacgtacaggacagaatctaaataagacattttccatcagaaatgccacaaacagatgagacgtgcacaaaacaagaaacaaccagggccaagcagaaagactccacgtaacagtcaataatcaggatttgttaaaagcaacaatctaagcagaaatttcaggcttttccctaagccttggtacatcactaaacagtcaactgggctgggcgtgatggctcacgcccactgtaatcccagcactttaggaggccgaagcaggtggattacttgaggtcaggagtttgagaccagcctggtggtcaacatggtgaaaccccgtttctgctaaaaatacaaaagattagcccagtgtggtggcgcatgcctgtagtcccaactactcgggaggctgaagtgggagaatcacttgaacccaagaagcagaggttgtagtgagcctagattgcaccactgtgctccagcaagactccatctctaaaatgaataaaataaaataaaataaaagtaaaacaagtcaactggatatccacaaaaggaaaaacctgagtagtataaattttacttttaaaaggagtaaaataaataaaatcagttctagaaagacttattttgtactagattatgtttagtgctgacattgtttttttctttctcatcaatgtatatcaaaagaaatctcataaagtttaaaaaatatacactaattagttattatttccttagctgtgcttcctgaaccatggaattcagaaagcgtccttgcctcagggtggtacccagcttgcaagacagcaccccgcctcctggcattcacaccttgtgcagtcccttctgtgtcagcaagggtagtctgtgtgaccaacaggagatggcagaagtaatggtacctcacttccgagatgaggttataaaagactgcagtttctaccttgggctttccctctctcttgatcactctgggagtggccagctgccatagcatgagcaactcaggctgcctatggagaagctggagaagctcatggggtgaaggaggccaatagccggcagagcactgaggcctgccacaaccacatgagttggtggttggtgagctggtgagttggtgagctggaagcaggttctttcagacaatgagaaagccaaaaccacctagcaaagccgctcccagattctcatccttagaaactgtgggagtccatatagtcaacataggcttgctgtttttgttgtttgttgtcttaagccctgaggtattggtaatttgttacacagcaatagacaactaatatattcagaacgtaaagcattttgaattgactatggagaacactaaagttcgtttttttttttttttttgagatggagtctcgctctgtcaccaggctggagtgcagtggcgcgatcttggctcactgcaacctctgcctcctgggttcaagcgattctcctgcctcagcctcccaagtggctgggaccacaggcgtgcgccaccacgcccagctaatttttgtgtttttagtagagacagggtttcaccatgttggccaggatggtctccatctcctgacctcaggtgatccgcccacctcagcccctcaaagtgctgggattacaggtgtgagtcaccgcacctggccggagcacactaaagttctttaagctacagctcaatacttcccttctaagaagttacaagaaaacatgacagcaatgtcttatctacaaatagttttgccgccctagaacatggctcttcagggcttcctgctgcccattctcagataccatcacactgatgccataaattatgatgatatttagagaagatatttgcattcagttcctaacaggtttggtttcaaaggagttaactgatactttagtcatatttgcatgcttcttcctagcactgatttctaattaatcaccaaatctggtcatttttccttcccaacatctcctccccttgcgctttccccctcccgctgaccccaagcctggcttgggcccttacctgtctgtccactgcggactctccctaacttctgtctccagccctcttcaatccactaagttgccttcatagtactctcccatggcagcttaataaaaccagccacaactctcccttatttagcgaagcaaatttcacagtccttgggctaatattcaagattacaagaaatacaatctgatttcaaactactcttgtactcaagaaatacaatctgatttaaaatcactcttcagaaaattacatacgcttttggtcacagcattcgctacttcatttaccctttcccacctagaaagtcaaggaattccgaacttccttctaattcctaacttgatttctaacagtaacaacccaaactcctaagaatatgcttctacactaacccaaactctaagaatatacttctacactatttttacatttattaattttggctgtatcttctgacttactgctatgatgaacatcagttcatttacttctgctcttctaatatatttataatcacattttttcacgcctctgttggtaagcataactttaagtaacagacccacacctctatctctcactccatcaccatagccattcccttttgactttgggtccctgacctttccttccactcctctcataatccctatttttcagacctgcaatacacaccaccttcagtcaaactgtcccccggaacatcttttgtcctccaccatgctatcctccatactgttgagttcacttttccaaattgcattcctctacgatccagtccaaactcctctgagaaggggaagactcaatacaaaatggtaactccctccctgaattcctggagcatatattagttgttccattaatctaaccaccaattatgtatgttgcgatttttttctggcagttgtatttaacttttcatttgtgtaaggcagaaagttgttttcctaacaagactctaagacccctgtctcagcatttccaaatctacttagtagagtgcagtgacttgcatatattggatactctgtaaccgtgtttactgatgaatgctaatatgaaagcctcttcatatgaacctcaaaaagctgaaagtcaactactctcttagtttcccagcctggaagatcagattacttcataaaagtcacacaggcctggattacagaccaatgaaacatccaaaggaaggatacttctaagtaaacatacaaactttactggggaagccgcctgattaaaaccttccccggcagaatcatgtccaaagtgaagtacaaggtctgcttaaacagcttattaaaagaaaaaaaaaacagcgaaaaaagcgcatccctattgaaaagatattttactagctcccgtgtcttaacttcttaactaagaaacgaaaagagccatacatcaggttgaagtatctgggattcccggacgaggtggagggcagcggaggaaaaacaccgagaggctgcgctgcaagggrcgcagggaaaagcaagcctggggcaggtctgagttccgagttcccgactgctccctcgtggtgtctgcgacccggtagcgggagcaagtgaggttgttggactgcagttttccccctacagtggcgatgcggggccggggtcgcgggtatgaggagatggggtgtgagccggggtgcgccagggcagagcgcttcgcccaccgagacgggcagggcggctccgggcactggccgggcggggcaaggagctcctaggccgccaggtccctctctgctggctccgcggagtccgcccgggggaagggaaggtcggggagggccgggcttctccgagtggccgcgggggctgcgggacaggtacttacccgggtgccatttcagggccagcttccgataggccttcttgagctcctcctcgctggcgtcgcgccgcacccccagcgcctcatagtgacacttcatcgcccgaccgggcgggcggccggcgctggggcccgggacggggtcggggcccgggmccgggccgaagcggcggcggcggcggcgctggcagtcctctccggcgggagtccgccgcccgcaccgggccagccagcgagcccggcggcggcggcggcggcggcggtggtgtaggtcagtgaaggcgcgcggtggcggcagacgacgcaggctgcggcaagcgggagcgcggcgggggcggtgccggcggccgccgcttcgcatgggctaggggtgggctctgtgccggaaagggccgcgcgggagggggtggggcctcggcggggtgagaggcgaggccccgaggaaggaaggcggggccttggcgaggagagaggcgggccgcgcaggagaaaggcgggagcttggcggggaaagaggcgggccgcgtgggaggaaggtaggccttggccgggaagaacaggaggaaggcgggaccttggtgtgagaggcggggcctcggcggggcgagaggcggggccgcgcggaagggaggcagggccacgctggtgtcattgtgmggggcacagatggcggtcagtgtgagtggcagccgacctgagggctgaagggggagataggagctgggatgggagaggattctggaaaatatctgattataatttctcaatggatccccgtttttatagataaggcgattcagactccaagtggtcaagtggttggctcaagcctcctcagctaatacagtagcagaattcggttggactgaatatcaggttttttttttaatctctttaattctcttcagctgccacttaagatatctggtattgatcatcttgaccaatatgcttgagaaaggacagttagattatttaagcggaaacaatttaaaagggaagcatcaacacacttaatgaaaagccttaccaccaacatggatgaaattgtgctgatctatccatccaacacactttaatcctaactttctggcctctaatcctacctttccaagattggtttaggttaagaaagcagttaaaggatagtatttaactggtaggttttggttgatctgactatctgcacaattattccaaacactttgaaaggtatcaaaataatmccataattattaaaatgcattaatacmccaatatatttcactgtaatgtggaatgtttacatgcatcagttaggtgtgggttktatttactaaccatgtatggttagctatgttgctaatatctattgcacagggttggsgtacccaagcggtttagtaaggttatccttctcttccccaatatgctgcccccagtaaaataaaaaacccacgctaagcttcatcaggttacttcacacgccactgaccaaccaactcactactcagaattcatacacttccctkttttccagaggaagattctacacagtctcagttagttggtaaattggtaatggataaggattgagaagtctgagtttgggggagaatgaaacctttcccctcctgagaacagaattgggatggtgggcggggggaagggagggacaaaaaaaaaaaaaaaaacggamagggaaagtatttttttccctccaacttaatttggagtattttctccctccaacttgatttggttttggatacagcctgtaggaatcacttacttcttttaccttctgaagtaagaaggatttttgcctgtaacattgtataattaaaggtaactatgctggatataaatttcagtctaaaggaacatcttgaccaggcgtggtggctcatgcctgtaatcccagcactttgggaagccgaggcaggaggatcccttcagcccaagagttcaagacgagcctgggcaacatagcgagaacttgtctctacaaaaaaaaaaaaaagccaggcatggtggcgtgggcctgtagtcctagttactcaggaggctgaggcaggaatacttgagcccaggagttagagcctgcagtgagctatgaccacaccaccacactacagccctgggtgacagagcaagaccctgccgctaataaataaaggaacatcttttattaaactggtgccctttaaatgaccagactttagagatgatccattccagaagaattctcaaataagatatccatataattgtgaaagggaatttgagatataaggatatctctattatggaaactgttaattgaaaattgtgaaattggaaattacaycaaaactccacaatgcacacatcaaaagtacaagtttgtatctctactaaaacttacaatttgttgatctagtttataacctataattaacttgttcctgagatgtgggtgtttaaaaacaaattctgaatacggctgtcttatttttatccaagactatattcaactgcctaaataaaataacrgccactttggtttttttccatttaactagatttggccctagtcacatacaagtatttcaagtgatcctctcacctgaattacctgcataatttagatgacttcaagatttcaagtttcctaatttagactatttcaaggccaattaagcactcaggaaggccgttcttagcaaaaaatttaaggaaaaaaaaaccatcaatattgatcattctgcctaaatacttaaaataataaagacataaaattaaaatgtaagtgaactaggaaagatctctataataaacttactatataaaagcacttatagaatcagtaaaagacaatcctaccacagaaaaacaaacatgattagtccagtcaaaaaggataaaccagtaactaaaaaaaaaaaaaggtggktttttttttttaacctattraattgacagattctttcatgcatagtgaaactggtaaggggacaaggaaaygaaccctctaatagcctctagtgaggttatggtggtggagggaacaagcaaaaagcctagagttcataatctttaacctaagttgcacttctaggaaaccaagtgttgtgtaaaaagacatgtaacacatctatataagtattcactacaagcatcgataccagcaaaaaaaagaggaaaaactgaaaatactgattacatagctatggtacacagaatactacagttarcagttagcaagtaaacatgtggaacaaacacatagaaaaacaatcagtgtgaagtcaaaaaagcaggtgatgaaacagcatgtgtcatttcattagatatatattttattgtatttctatctgtccatgtcagcagccacctacctccatggtcactggtactcagaatcttttctttccgttactaatttacccataagatcttaagcctagtgcccccttacacaataggcagtttctctttcatgtggggaaaaattcaaatgttctggtatcccctttaacaactgtcctatttttctctccttttactattagttttctaaataagtaatctatacacactgcttctaaaataagtatgtcatttggccgggcatggtggctcatgcctgtaatccaagcactttgggaggccgaggtgggcagatcacctgaggtcaggagttcgagaccagcctgaccaacatggagaaaccccaactctactaaaaatacaaattagttgggcgtggtggcacatgcgtgtaatcccagctactcgggaggctgaggcaggagaatcacttgaaccagggaggtggaggttgcggtgaaccgagatcgcgccattgcactccagcctgggcaacaagagcgaaactccgtctcacaaataaaatataataaaataaaaaatttacaaagtgctttcaacacagccattaatgcatttgattctcaaaacctcaacattttaatatactcttttttgaagtgacagatcaggggttggttcttccatggcttcattaactgatgactgagtaaacttcagtgagatgccttcctttctaccagtctactcctactttaccatccacaaccgatgctcttgaagtgttgaatgcttttacaaataatatgacctaataaatgtctgaatttcagctttgctaaaccaaaaattccaacccaagagaacaggctacattaagtgtgctacatttttagcaacacaaacttcaaaaagaaatcagaaattaactgatgaattctggtgatatttwatttagaaaaagataatcactgattttaagatcttaatttttctttcttgtaaatgctacactaattagacgtaagatagtattagataataaaagtatttacacattgaatacaaaataaatataaagtaactgaaaaacaaatcaggtttccattgacttattttgttttcccactgtccatcctctgtttcatttttctttgccttttgtaaatccgtttctttcttgctttcaaatcaacttttggctctggttttacccactgtatttctattggtttctcctcagctggtgttacaaaaacatctgcagtgggatcatgtggaagaagagtcttcggctctttctttctcagtttttgcacatctttcacttgctgtttctctctgtattttgcagctgtgatggatcttatgacacgccgatgctaaaaaaaaaaaaaaaagattagatgcttttgaaataaaaataaacattttatataaggcaaagactttcagttatgaaccatatatcctttcagccagtgtcatgaaaaaagggagtaatttccaagtttctatgcagcaaaaaccaaattcagtttcacaggtaataaaacagcaattacttcacagaatcattttggccaaagggttctggtacattgaagactactgaatgacacaaccgcttaccatgtttggtgactggtagtgaggattttcatataaagttggtcctccaaaacttccctggaaaatctttatgagatttaagacaaaacgaggtcctatttctacaagagcagcatcttcttctatgatctttaataaaaaggaaacatttcattttggtttggttacrttattcccaaaaggtatactggctataacctcattataaatgtgcctgaaataaytgataatccataaaatcaaggtgggggtgaaacttggtaaatggcaaatcatcaatattttctgaaatctattagtacttataggaagttgtcatggaaaaatgttttttcagtgagttcttttaaaattgagtaattagattttggttcacatcttgcttgtcacaatgcatatatccttgaaaaactggttaaacaggattttaaaacagtaaccactattaacaaaatgtattaaagcacattatgggggaactcttgaaacttaaatcaatccctaaattgtttttataaatctaattcaagttagattaaaaggatatgtagtcaaatttatttaatagctactgattayggaattaaaaggcaacttccgaacaacaaatatttatgttatctattagttcaggcatgtctaccctcagaggttaggatgatgtgttcaactcacatgccaggtatccaatataaaatatgcagaaaagagctcagtttatgtcatatactgtctaaaattttgttcttgctgttctcttccacctcttcatctttctgcacttatcgtgccaaactcctgcttcaagatttctagagtcacctcctcttttctcctgaatgagtcactgtgtgactcatcatctaaccgctgccattgaatgccttctagagcaattacattttgctaggtcttaacctttgaggtgctttgagagagaaacttctaagctttgagagagaaacttctattttactgtatcctttacagcactttctacaaattaggaacccaagtatctcatggatcttcaagttattccctttctataaagttaaatatataatggcttattaggaaatccatactctgtatcaactaacagtcatgaatagaagtaggtagagctcacttaagatataagacagtacatagttacttgcagcaatctctttagggaaaaggaagctatttaaaacaaaagaattatttgcattttttgtgtatgcaaaccctgtatatccttatctaaaagtttaactaaaaattgaccaggcacagtggctcacaactgcaatcccacctactcaagatgctgaggaggaatgatttgaggccaggaggttcaaggccaacctaggcaacactgcgacactctatctctaaaaaaaaaaattaggccgggtgtagtggctcacgcctggaatcccagcactttgggaggccaaggcgggcagatggcctgaggtcaggagtttgagaccagcctggccaacatggcgaaaccccgtctctactaaaactacaaaaattagccaggcgtgatgatgggtgcttgtaatcccagctactcaggagactgagggagcagaagcttgaacccgggaggtggaggttgcagtgagccaagattgtgccactgcagkccagcctgggcaacaagagcgagactctgtctcaaaacataaataaataaactcaattaaaaaaaaggtataattaaaaatcaagtaaagcttacctgaaagttccgaaaccatatcctattatccaaaatggtgaaagtaaacacgtggtccacaaatggttggcttttgggatgataccgtggtgtactaaagatctagttaaaaaagtgtatgttagttccttattccaagatatatcatgtatattttggatagctaattttaaagatatttacctgaattaagagttcttttaacaaagcataatgtggtaattcatcaaaagcctataaaaataaggtaagcatattatttaacagtagactgccttgtttaaaactgtttgctcatttgtttctataacttggctataacctcattataaatgtacctgaaagaattgataatccataaaaccaaggtgggggtgaaactamattgaataacacaactatatctactaaaaacaaccatgccagataagaaaattagacctcatacactgaatgagaaacttacagggtcaaaagacaaaaggggccgagaacctttcaaacagtttccagtcatcttcagttcagcgagggtatgaactagaaaaattacaacaaaaacaaaaatagttgtaacttttgcacaactatttcaaaagattacttttaatttcctcatctaaaaaaatttattgagtcaacttactattttgaacaaggaatttagcagatggtccgtgaggtgaatttgaaagcctgaaagatatggagtaagctttttcaactaattagcaaatgtagtcaatgcttaccacctattcaccataaataatatgcttataatatttatacatttaattttctttaaaggtatcaagttycgtgaaatcaaaagtttgcttcattctcaacccttaacatgaaacactaggagtctataacataaaaggtacaaagaacaaatccacttaaatgagtttaaccaaaatcttaatacattctcttaccacatatagagatcctgttttttcttagcttcaaaatagatgcatttattacagttcttcatttcacaaacctaaaggaagcaaagtataggaaaatgaagtagataatataaatgagaactaaagtaattatatgtgattaatatcatccagattatctcaaaaatacctaaccaggctaataggctacaaaggcctaaacatgtatttattcacagaaggaacctttaaagttcctcttaggtattctacccaaggtaaactagatgctctgcccatatcttgggtgaaattatctatcatatttttgggcctagcatctaaaatggtctcacttctgattactggaaacctccctccttttttttttttttttttttgygatgcagtttcgctcttgttgcccaggctggagtgcaatggcacgatctcggctcgccgcaacctccacctcccaggttcaaatgattctcctgcttcagcctccggagtagccgggatattacaggcctgtgccatcacaccccgctaattttgtatttttagtagagatggggtttctccatgttggtctggctggtcttgaactcccaacctcaggtgatctgcctgcctcagcctcccaaagtggtgggattacaggtgtgagccacctcacctggccaggaacctcttctgcccatagtcccattgacaaactacaaagactaaaaatagatgccctacggataaagcataccacaactaatcttcttatgttaatccttcataatcaatcttcttagccaatcttatgaaaatgcagtacttatagaactaaaaacatcctttttaatgattattttgatttttaactttttagctttttgattctaagatcacaaaacttaagttgttcttcatttatactatcatttctggtgatttggttctataaaatcactaagggattgggtgaaaagcctaagtatatcaaacctatttcaaattaaacttcaatgtcttgaaggcttacaaaagtcacacttgagaagacacaaaaacattacaggagtgaaggcttgtattactgtagtattcataaactctaattaatatagtactcttaaactccacattatttaagactttaaacctaacaacttatggctggatgaggtggctcatgcctataaccccagcactttgggaggccgaggtaggtgaattgtctgagcaacctggcaaagctccatctctactaaaaatacaaaaaattagctgggcatactggcgtgtgcctgtcgtcccagctactcgggaggctgaggcaggagaattgcttaaacccaggaagcagaggctgcagtgagctgagatcataccacttcactccagcctgggtaacagagagagacttttgtctccaaaaccagttaaacaaataaacaaaccctaacaacttaaaaaaaaaaaacaaaacttttgtttcttactggtcttagaataaacacaaaaataggaagtttgtgccacttctgggcttttgtagttgccattttctctagctagatggtcttttaccatatttctccttcactacgtctctgctcaaatattaaacaccatccctttgaacaggtttttccggtgtagcctcagctgtccaaaacctataacctgctttatttctcctgtctttacttgaaattataaaccttgtttatggcctgtctccattagaatgtaagttccataatgacagggacattgctctgttgaacagtttctacagcacatagaataatgtggtattayagcagaggttcaaaaatttgtgctctaaagaaggctaatagtgaaaaaatgatcctaattcttctaagttttgaaaattttgctttaaaatgtaaatttatgttctgtgcttccagaggttaaaaaaaatacctaagtgtagtatcttaaacaatactttgaaaatgtaacctattcagtttgtaataccttaatagccagttccacacaaatcacttttaatactggcaaaacactttttaccatgtgggttttatatatatataygtttaatggacttattttactttatatatgttgactgataattttttgagtacctactatggatttagcatnatactagacactacagggttaaaaaatgggacataatccttctcctgaggaaatttcaatatgcttgttcagacaaaacaaacagaaatgaatgaagcactaaactgtgagagataaaaatttggaagaccagttattgaagagttaataaaatgtgtctgaatagtttttacaaaataatttttaaagtcactgaatgacttagttttgaaataagccactgttaacattttaaaaatattttgttgcaattactttccaaaattacctcgttaatcacaaatagcttatccttacgatccattttagtatctagaaaaagaaaaaaaagaaaaagcaagtaaattaaaggtgatttcaaagttatttcaatcaaaccacatatgctatccagaaaataaagtgtttttacactcttcagtttaaaggagattttattactaattttcaaaacaagagctggaaacaatcgctcaaaaatcttgactctttgtaaatgtaaagaaaataagtaaaatatagtctgtaagaattagaaattatagtgtaagcagtgtttctcaatatttaggtattctaggaatccttttcaaaaatgggaaaattctcacaaaccaaagactgtgttaaaggaaaccagtttcaatgaaaatatctttcactttttaatcttaggtgtcaaagaaaactgactttatgcccgtgtaacaaacctgcacatatactccttgaatctaaaataagttaaaattttaaaaataaaaaacaaaaaacaaaaaaaccccaaagcacctctcaacataagcacaacaacagccatatgatggcgctgccactccactgttccaaacttttttttttttttttttttttttttgagacagggtcttgctccttgcccaggctgaaatgtagtggcgcaatcacggctcatgacagccttgaactcctgggctcaagccatcctcctgcttgagactcctgagtagctgggactgcaggcaagtgaccccctcacttggctaatttactttacttttttcatttttttttttttttattttgtagagacagggtttcaccatgttgcccaggatggtctggaactcctggactcaagtgttccacccacctcggcctcccaaagtgctgggattacaggcatgagctaccatgcccggccatactgttcttgcctgtaaaataacccactgcttaaaaataaataaataacctggcatttagaaataggctctgactccaacttaaaaagtgctttgaattctatcccaggtccatttttcaataaaaacagttaaaaaaaaaaaaaaaaaggcccaaaaagcaacatgtggcagtccttagcacttaggacaaaccatcccacctatctcaggaccttcagaagcattacagtgaaggcattcctggaccttcaagaaatgtttcaataatattaggacacctgttttaaaaagtaaagaatctacctaatgaaatctaaagaatttcttacgaaatgttaactggaaaaattgtggcacttgaaaggataaaaggcattgtgtttttttcgtgagaacactgaacaaatgaagaatatataaaataagtgaaaacataaaaataggtaagtttatagatagaaatttctaaagtatatgatataaaggcacctgctttagaatgaggcatcaacattctcaagtcctgcattaaatgtcttgttctaaaatttattcctctggaagaaaagatgagaatccgttccttatttttccactttccctaaagaaaaagaaaatgttaaaagattttaaaatcttatactgaactgatctygttttgtgacagggtctcacactgttgcccaggctgaagtgctcacggctcactgcagtttcaagttcctgggctcaagtaagtgatcctcccaccccagcatctacagtagctggagactacaggcatgtgccaccatgtccagctagttttttttttttttttttttgtagagatgggagtctccctatgttgcccaggctggtctccaacacctgggctcaagtggcttggcctcccaaagcgctgggattataggtaagaaccaccgcacctggccctgtttgttttttatgagcttccaagtagctcataaccaagtcaaaccatcctgactcctttaatttcatctctcaccaacattcactgaccacatctgccacccagaaatgccctccttggtttctttgtttttcaacttcaatctctccaattcctccttccaaccctaaaagttctttcttagccctcttatttctgtgctctccatgacagatgtctcataataatttcccacaactcttaatcctttcttattcacactgcacttacttagagtcttatattaactgcaaaactcctaaatggctaaccttcccagacatgagcacctccaatagatatggttgactagctttttcaacagtttactttttttgtttgtttgtttgagatggagtctcactctgtcacccaggctggagtgcagtggcgcgatctcggctcactgcaacctccacctcccgggttcaagcgattctcctgcctcagactcccgagtagctgggattacaggtgcccgccactgcacctggctgatttttttttttttgtagtgttagtagagacggggtttcaccatcttggccaggctggtcttgaactcctgacctagtgatccacccgcctcggcctcccaaagtgctgggattacaggcgtgagccaccacgctggaccatttttaaagtaatacttccatcacatccttacttcccagagttttctaaacaaagttcaaatgacatagctttgacactgaattttaaaatagattttcacgtctacatcattattgccccaaatgaagcctaatgcaatccaatctggctctattttttacatttttcagcatttccctacttcaaagtctttcatcggtttttttttctcccttggagtgttccctctcattttttgaatgtcaaaattctacacttcctctgatatgcagcttacgggctaaatccttcatgattctttatcttattatactagggtaaaaataatctatatctcctgcayttccatagaatgtatcgaagtatggctcagattatagatactacctagctcaagggaagagtgagaacactaacatttactggaagtgtacaagtccagcttatttttcataaaaagtaaatattccctccccctgccccccaatctgcaggtcagaaaagagcacagaatgttgctgttaataacggggctagaatttacacttatctttcattccacagagctcacttctttcttagagcttgccatcacaccacacggggtcatttacttatcacctactccgcgctagagtactatgctaagtgcggaggacgcaaaaattaatgtcaaagataatccttgttcacagtattctgtctagcttaagaagagttcttagttgaatgaaagctaattctaacaacttgtgtgcacttcttttgaataaaaaccatcaacttatttgaattcttaagtttcctcctaaactccaacatttcaggaggaagaggtcacattctagtcatctttgcaatctcaaacccaaaggaagcctaacttggtacagtgcatggcacattcaatgtctgttgaatacaagtaaagctcatactacctagtctatttttcagtatctcttgagttaatgacctggttaacaagtcagagtcacagtcccaagggcaacaactttttaaaggctcccctaacgtacttcaggatccctgactgagagtggctgactatggcagtatatgggcatactaatcactggagaaataatagcgagaaataaccaaggaaaagcactactctccaaaaacattaaaaaaaaaaaacaaytgaacaactagtaagaaagaacgctggatctgagcaccctgtaagtcgcttccccgtgggccgggtaaaggttttaaaacccgccgcctccaggaagacggccacgtgcacaaggattagctgcaaactccgtgcccagtctggccgggagaatwgctaaaaccgacctaccgttaacacccgggctactctgaaattaagcaaggctgtagtcaagtaagtaacccmagaaaaggcgcacagagccgccgccgcaggtgtagcccggggacatcccctcctaccttgcaaacggggcctgggatccggtccctctcttcttcctccacctcctctgcygtggcgtgccgcttagctggcggctccgcatctatttcgtttctttttggcttcttcgcctgaactgcaaagcctccacgccgtttcctcttggttgccgccatcttgcctcgccgcccgcgctcttggcctcctttccggcgctgccgctcgctcctatttccgatctctatggttcggcggctctaagcgctcagcyycgcggtcgtcctccaggtctgtgccgcctccttccggtctcggtggcgcggcacgcgcggctctctaggcctccttcagctctgtggtgacggtggccgaggtggagggccggtctgaagagtggcgggactggcttcacttcctccgyggttcctcggagccgcctcgctcctcttcagggactttgctgagaagggctctcgggcgtccagaccccaccgcaaaggtagggtttccgcactcggggaccccgagactagtaagcgatgctgtcccgcgggcgggctggtgaatggggttgtctgggactcttggaggattatctggacactccgggcscgccccgccatcgcctgttttgttggaggcggggctggtggcgcgggctgcacaaaaccgactccccgcggatwtgtagctcctgtttggccgggagataccgtgtcagttgcgtgtcttcattcttcacaacttttcacgttattgtcctcttacggagacgaggaaaccgtagcttagataattttcctccagaattacaaagayagttaagtgacataggtggggttcggcctggtcagccgtgttcagcctcccagcccctttccacctctcagcgcaggtggagctcgccggacctcgccagcactgatgggagttttactgtctaatcccttcaggtgtttggcgatccgccgagaagttgttggccccaggagcatccctcggggccgaatgcgcagtggacgatgccccttctgacccaacagatccaagacgaggatgatcagtacagccttgtggccagccttgacaacgttaggaatctctccactatcttgaaagstattcatttccgagaacatgccacgtgtttcgcaactaaaaatggtatcaaagtaacagtggaaaatgcaaagtgtgtgcaagcaaatgcttttattcaggtatggaagtaggcgcctttaagcctgtgccatagatactctaaatgtaatttaatgaaatcggaaggwttcagtagacaaaataacttaatagtcataataacttgtcaatagtcataataaataacttaataaataaataatagtcttaagwtagagaacaaaacgtcattacttgaattttttttctctcccggtaacaaattcttttcccatcttgttttacagagataatggttagtaatgactaaagtttattaaactaggctattggctaggctacagtcttcttattgtttaacttatttaatcttaacaatagtcctgtaaggtaggttctgttattattcccgttttatatatgtggaaacgaggcacaattttaagtgatttgcyaacagtcccacagctggtaagtggctgaattgggataagaacgctgaatatttgtttccagaatatatgctcttttttccactgcgatatgctattactaaagagtatttttttcctttactggttgtaatagaatttttgttcttccaaagtaatatttgtgtggttcagataggattgcaagttcaactaagcgttttttaacacgtaagtgcacagcatgatctcagggatagagaggtaaataagacacggttcttgtcctcatgcaggggcatggtatggtggctcacacctgtatttccagctgctcaggagaccgaggctgaagcacgaagatcgcttgagctcaggcattaaagaccagcctgggtaatcatagtgagacccccgtatcaataaaaaatcataataaaagttgaaactaatgttgctcatgcattatcaagtcattcgtctattttccaagtgaccttagcagtagtgataggcacaaaaacgagacaagggagagtcacagagggatagttttagatccaggaatggagataaggatgcttcaaaggatgtctctaagatgttttgattgctaatcagaaattattctcatgggattagcacagtattgtattttttaaacgtataaagtgaaatctaggaccttatattattagtttttattcttttatgtaacaattttcatttttactcttttcataggctggaatatttcaggagtttaaagttcaggaagagtctgttacttttcgaattaatttaactgtccttttagactgtttatctatttttggatcaagtcctatgccaggtaaactatgatcagtataaagacataaaagtgttatacatagtggtcagaaaaatasaggaagttatttggaacataaacattggttcagaaagctaatgccaattcatttttcagtggccacagtcatgggttctaacatttcacaatgttaattgcaagtgtgtttataattcttttcatatttgtaaaagtatttgcattttttttttaatttacaaggctttgagggattgtaaattcgaactggccaaaagaatactttggacatgtcttaaatatttttagcattgtgaaatgttttaattgcttctttttcctaacttgtccagaattactccgctagttagtggcagagaaaaacaaaagccagttctgactcctagtttactatgttcaaaatttgtttcttttaagccatattttataagttatgtctattttgccaaatgattttgtggtgtttttgagacagagtttctctcttgttgcccaagctgcagtacaatggcacagtctcagctcactgcaacctctgcctcccgggttcaagtgattcttctgcctcagcctcccgagtagctgggattacaggcacgtgccaccacgcccggctaattttttgtatttttagtagagatggggtttcaccatattagccaggctggtctcaaactcctgacctcaggtgatctgcccgcctcagtctctctaagttctgggattacaggcataagccaccgcaaccggttgccraatgattttctttaaaatatatatttttttatttgttaagggaatttttamgaatggtgaaattgaattgctgtgggtataaaactaaggaatccccagaagaatgattttatttcataggaaagcaacctggagattagctaggaaaaattcaatatagttctccagaaaaatgtattttacgtttccacagacaattccactattattaattatacattttctaatacagtgttctccagctagtttttcacagaagcatctgtcatcttccattcctcactgtggctctcaatccagtaaggagaaggagtttgaatatcctgtcatattcctccttccctctagtggtttgcagagttaaaatttacaccaccattaacaaccctctttttctctcaatttgatttttaaattcgaggaaatataaagaatatctcccagttggaaaagttggaaggrtccttgtcatagtgagtacactgacgttacagtacagatgacagcaatccactgttacacacattgaaccttcaaggaatagcataccctgttctgcagcaatttagttacttgctgtgttgatccatatagattctctaccctgaaattgtacatatataaaatcaacaagctatttctgaggtgtgtatgacaacctgaaaatgattccaaagaattatgttacattttgttctggttcccaattttcttgtagttttggaattstctacacacaactgtcatcagggaagatgtcatccctttttatgaggagatacatatatgtgagaaattgggcggaataaattattcttgagaaattttatgtatcatttcgaggagaagctgaacccagaactataaagctaaggccaagtatgacttctttccattgcagggastttaactgcacttygaatgtgttaccaagrttatggttaccctttgatgctgttcctggaagaaggaggagtggtgacagtctgcaaaatcaatacacaggaacctgaggagaccctggactttgatttctgcagcaccaatgttattaataaaattattctgcagtcagaggggctccgtgaagcattttctgaattggatatgacgagtgaagtcctacaaattaccatgtctcctgacaagccttatttcaggtacttgagagcagtgcagttatagttaatgtggtctgtactccatcttcccacttagacatttgcttaggatgcaaaatttttattatccacatttttagagttttcacaactttagacagcttgtactcttacctcataattttatggatcaagaaacttaagacccaggaagattaactcactatttcatatttaggtggtggtggcatctagatgagaagcccagtcctctaatttataaactggtggtgttttcattgtactactccttactttcatagatcaggttacatcatgaggaaaattgggtttaagtgtttggaaagggtgtttgtattatggtatctttttcaagttagttcaggatgcagaagaagatgttttctacacgtggctcattcattcactaagtatctgttgatcrcctaccgtgtgcttattcatcttattaagcattgtgggaagaacagcttaaaaccaaggtgaagccaagaaaatgtgaaacagcaaaccattaagtaccaagatagcacacacagatacctgggaaatgctgtataaggatttagggaggattgctcaaggctggcttcccaagggagggcagttttcagcaggagtacaatgtcaaaaaagctgttcttgatagtttaacacaagtctcttttcaggattagactcagagattctagcaatttagagagaggatctaaatattctctttttgaaatatttcagaatattaaagcccctaaatacatatggaataaaaggaataaggtattctttttgtaactactttagaagaattacaggccyggctgtaaaagtgctgtggcagacacctgtaatcccagcactttgggaggccgaagtgggcagatcacttgaggtcaggagttcaagaccagcctggccaatgtggtgaaaccctgtctctactaaaaatagaaaaattagttgggcgtggtggcacgtgcctataatcccagctacttgggaggctgaggtgggagaatcacttgaacccaggaagtggaggttgcggtgagctgagattgcgccactgcactccagcctgggtgacagagtgagaatctgtctcaaaaaaaaaaaaagaaaagaaaaagaatcacaggcccttgtcatgactttggggagttaaaaatttggctcaaggtctgagaaagttaaccaaaatggaaattggaaaccttactttagcagtggaatgaagtaaaaaattcaggtacttaaaacagtatttcaggggatctcctcagtgatctctctcagcctgggtaacgagatggaccatggtatctttcatctccaggatgggaaacaatttggtgrtagggaggtaggagttgaaattttttcctggatatgttaaattttaagtacctgcgacactagggagtggctggatatgtagttatggtgctcaggagatccatttagactggaaatttagatttgggaaccatcatcatggctgggtatggatgagacgggtcagagagagagattatattagaagaaagaaaagatggaccccaggaaaaccacacctggaagatgggaggcagaaatggagcttagggaaaaccaacctggatcttatcgccatgctcatataatacttagcaacgtgctaaycctgcagcaaatgttccaggagttcttgcaaattaaatcagcatgttaacacktataaattgtctacaaataacttctggtattaccaagtgaggaaaaccatgcaatagccttaagagcagtctaagatacagaaaagctgtaattcctaggtgtaggattgggaacagacctaagggttgcagtagacttagatcaaggtcttccatgagtcctcaattctctcgcctgttatatatttctgacttaaggatgaggaaaagtcattttcagagtaggattagggtaatgaaattaaagtgtcccctacccttttccttttacaattgattttcttcaaacccattgattagttgtcctgaactccagtgggagctttattatggtacttgttatcrtgtgttataagcatttgtgtacatgtctgtttcacccactagtatgaatttcttaaggaagtgttttctttatttggatcctaatgtggtttatttttggatgaatgaataaatgaggtaatcattttctataggttatctacttttggaaatgcaggaagttcccaccttgactatcccaaagattctgatttgatggaagcatttcattgtaatcagacccaagtcaacaggtcagttcttaatatagaggttgtcattggtgataaagaggaggttaaataccagatttctgttaaataaaaacactttcaatctgttaattaaaatgcacagcattttataaaaatsaatagtagagtgctggacttactaggggatgtagggttctaacagtgaatgaattttaaaacagaaaatattagcaaattggataagtacttgattttattcttagatttgctactttttatcctttacttgggagttctgagcagtgttcactgtgttgatataacagcgttttattttttsttctacagatayaagatttccttactgaaaccctctacaaaggcattagtcctatcttgtaaggtatctattcsgacagataacagaggcttcctttcattacagtatatgattagaaatgaagatggacaaatatgttttgtggaatattactgctgccctgatgaagaagttcctgaatctgrgtcttgagtatgacaattcactgatatttatgtgtacatttatgatagatgaagttcttattctgagtacagtactctttgtcatttcatattggattttctatagagaagaagcacaayggggaagataggagcaaggtcatgtaccctaatagttactatgttttgtaaatccattttgtagagggcatgtaaataaatgttttcctgtagtcatagattattcaggactgtcctttagttctgtcttttgaactcatgggaataattgtgagtcagcgtaacatttcaagagtctaaaggtggccgggtgtggtggctttaatcccagcactttgggaagccgaggtgggcggatcacctgrggtcaggagttcgagaccagcctgaccaacgtggagaaaccccatctctactaaaaatacaaaaaattagccggacgtggtggcacatgcctgtaatgccagctactcgggaggctgaggcaggagaattgcttgaacccgggaggyggaggttgtrgtgagctgagatgacgccattgcactccagcctaggcaataagagcaaaactctgcctcaaaaaaaaaaaaaaaaaaagtctaaaggcttaaagtttgatgcagctacctgaaatgatcttttatttatttattattagaaaaagcaaaggcatatgggcattgcttattagtttgaattctagagactagatcttaaagtagtggttctcaaagtgttgtgcccgcaccaacatcagaatggcctgcaaacttgtagcaaactctggggaggaggscagcattctgtattttaacaagcttccctcaggagattctgatgcctgctaaattttgggaaccactgttttaaaggaaactttttttttctttaatagcatttaattgtatgagatgattgcttttacatgtgatttccttgcaaatgttctgaagttgaggcatcaccaaacaagtctgaacaattctttatgtgatttatttttaaagtagaccttttgaagagatctatgaatgggatataaagcaattttcagtgttacaggttttcttcttcttctcaaaactgtttgctgtaagtaactgcaatcagtacttactactttccatttgcttatgagtttcttgacaaatcaaggtgtagaaaaccagttattaagtgattttgtactttcctggtagttgtcactaaaataatttttgtggcatataaatatatttaataaaatgcaaaaattatcttcctgtctagtagaaaaaattacatgagtaaagtgaagcttctgtctttgttactgtaccaggtgacaacagctgagtgtccctccatggacagtcactattggccttttgagtgagacagttctttaggataaaaacctgtcatcccattgcaggattcatttagcctttctggcccttacccactgatgctagtcattgtgaccaccccacctcccccaaataaaagtgtgccaaactattcattgttgagaaccattcaattgtattcaccaaaattggaggatatattggaatgccctaccttaatataggtcacatagcattagagaaaattggtttggagagtattacagcaaagtgtgctgcaaggaggctactccagcacaatggcaggcactgcttcccaggcatatggacaattctgggaggtggccagggtcagyacctgataactagtaagtgtctcaatctcagcatacaaaatttagcagtgactacaaaagaagttggaattttctaaaatgtttgtattcaagaaggaaacaaatgaatttactaaatgttgtcagagtattttttgtttagataaccaccaagaacagaacaaacctaaaagatacttgggaaaatatctaatcagtcaacattctaaggactgttaaatgtgaaatagcatagttattttttgtcttttgttactagtgtgaacaaagaacggcgcctaacatataatgggcatttagtaactctgttagatgaaagactctccaatttcagattttcttttagcatcttattagtcactacttaattctgatgatttagctctaaatttattttgatctcagtttttttatttttatttttggagacaagatcttgctctgttgcccaggctggagtacagttgtaggattacagttcactccagcctcaatctcctaggctcaagcaatcctcccatctcagcttcccaaatagctacgactacaggtgcatgcctccatgccctgctaatttttgtattttttgtagagatggggttttactatgttccctaggctaatcytgaactcctgagctcaagcaatccacccgcctcggcctcccaaagggctgggattacaggcgtgagctatcatgcctggcctaatgtattttttaaaagttgaatctaaaaagaatttaaaacaaatataaatcagctcagtaaggatggatatttttgtacatttaaaactattattttaggccgggagtggtggctcacacctgtaatcccagcattttgggaagccgaggcagggggatcatctgaggtcaggaagttcgagatcagcctggccaacatggtgaaacccctacctctactaaaaatacaaaaattagctgggtgtggtggtgggtgtctgtaatcccagctacttgagaggctgaggcaagagaatcacttgaaactggaaggcgggggttgcagtgagccgagattgcaccattgcactccagcctgggtgacagagcaagactccgtctcaaaaacaaaaaaaattaaaataaaaattattgttttagctgcatgtcttcagctatttagaattcaaagactaatgaattgtttctaagtcaccctaacatcaaggtacttattttataaagaatttcctccttatttgtgttctaattgacccaggaatttttactttaataaaagtttaactttatttcctatggaaaatcactagggggagtgctccctcaggcagagcaggcgacactttggtgccactacaaattgatgtgtagtatatagaagaatacagtcttatatttaaagacttttagttctgtctttttgaagtttatctctctttctagtaaaatggtgcttactgtgaatggataatcttttttttcatttttcatttgttgatttcccattcgatgatgtagtgcttccaccgagaattgatgaaatgcttcaaaataataaaagtatttgttaaattccmctttaataaaaataaggcatgtaacacagtcattttaacaggaagccacagggtttctgtggtgttaccaaagtcctagtaaaaattaattaaaattgctaaaagggcagaatgtggcactctcaacagtggggtaggcagtccttcagaacatagagacttccttctttccttccctgtcttcacattgmttgtcccttatccccacctgaaataaaatctattgggtcctgagaaatcggagtgtatagtattttttcttttcccaattatgtttgtaatttgctttcattctctttggaataggcagtgctgcttttatactagaatcaggttacaagcaccccaggaggagtcattagctttaacagaatttccctctcaggagtggacagctagtgttctaaacagaaacaccaaaagcagcggtttcaagtgcttttcrtatctgtatctcagtcacgtccagagatttcgataatcagcagagtaaatgtgtgaaatatatttttgaaattcatagcttgttgatcattataatagatactagtagtggctctcactggcaaaactagaggtattcaggatatgtgaacttactaaattatttcagagtatttcctcatactaaagtaaaaaggaagtaacaatctagtaaaccctgtggcctgtacccttaggcatggtgcctgacacttgattccaaaatggtcttgcttcctgccattttgtccaaggattttggttgccgtggctgactacgttaggacagtactatttctggaatattgtcaagcctgccttaagtggacctttaatgcagtggtgggtgaacttaccaaatcagcaggtagtacgtcattgaacatacagaacaggttacataaacttttttttttttttttgagatggagtcccactctgttgccaggctggagtgcagtggtgcgatctcagttcactgcaacctccacctcccaggttcaagcggttctcctgcctcagcctcccgagtagttgggactacaggtgcatgccaccacatcgagctaataattgtatttttagtagagatggggtttcaccatgttggccaggatggtctcgatcttttgaccttgtgatcctcctgcctcagcctcccaaagtgctgggattacaggtgtgagccaccacacccagccgtttacataaacttttttgtttgcttgctaaaaaatgtttattgagctaggtgtggtggctctcacctgtagtcccagcactttgggaggccgaggcaggaggaccattttagcccaggagttttgagactagtctggccaacatagcaagactccatctctaaaaaaaattttttttttttaattagccaggtgtggagtatgcatgtagtcccagctactccagaggctaaggcgggaggattgcttgagcccaggagttcaaggctgcagtgagctatggtcatgccactgcactccagtctggcaggagagtgggaccctgtctcaacaaaaaataaaataaaaatamcaatatttattgaaatctgtatgtgagacagcttgatctgggcttgaattatttttttttctaacttggtacagagattgttggaaaatagctaatcctcatccacctcaaaaatgtcagtgcttgttagctaattcagaagaattgtaagagctctgtatgttagctcagatctgttagaaatgtcaggtgtttgattggattgggttatccagattggttgaatttagaaagtagcttctgtggttttgcagtgagaatgcaactttatatttctaatgtggcttgttaagactttgggatttcaccaaaatagtaaaattttaaaacttttgggcagagcacagaggatttttagggcagtgaaactaatatgtatgatactataatggtggatatatgtcattataatttttccaaacccacagaatgtataccaccaagagtgaaccctcatgtaaactatggacttgggtaataatgctgtgtcagtgtgggttcatcagttgtcacaaatgtaccgctctggtgggagatgttgataagggagaagctaggcatgtgtgcrggtagggggtaaatgggaaatctctagctttcccttaattttttttatgaacctaaaactgctctaaaaatgcctttgggaaaaactttggggaccaacataggtgccaacttattttactaggtataaggatgttaaaattatatgattcagtatcaccaccattttataaaacattttaatatcaaaacctcagacaatggcaaccttacactgacaataaagaaaaactttaaacattaaaaacaatccaaatgcaggaacaggtacaccataaaattttatttcacagtgttatgctactgtttattgatataggtttgtcagtttggagatcttaggattgcaaaatagtaacattttataaattttggtgccacccaaaatggagtctgaatggccatttctttctggtatttttttttttttaatgtcagtcattgttgaagagctattttcaactacgtatgtgaaaatggaagcaactcttctgatgctactgtaatcaattcagaatattctggggaagaacagcagccccatctccagaaagggctaaaatgaacaatgataggccaagtgaccagttaataagcaccacagagaagggcaatggaatatatagctgctttcagccaggtctgcaatgtgggaccttgatcctgagtgccaaccctaaagcatcctgggagttagtcggcaactgccaggagaaggcctaccagtcagtggacaaggctttggcttagttagtatatgtgtgcttctgccacagcagaacacaactcactataccttgggtactggttgattcttagattttacaggctgaacaaatgactgaaataatttcctgaatgaagaaccaaaatgtggttctgtaagcactgagtgcgttgatatagatgttgatagtgatacacttggatccccaaagacacagggtctttgagctgtattattattaatttattttttagagggagttttgctcttgtcacccagtctggactgcaatggcacaatcttggctcactgcaacctccacctcccaggttcaagtgattctcctgtctcagcctcccaagcacctgggattacaggcacccaccaccatgccyagctaatttttgtatttttggtagagagccgtgttggccaggctggtcttggaactcgtgacctcaggtgatccccctgcctcagcctcccaaagtgctgggattacaggcttaagccacygcgcccggccatttgagctgtattaaatcaagttagacaactgggaaaagatgaagagagaaaaattaaagttatttatagtgcaaacccmaatgagatttctctgtcgctaaattcacaagaaagtaaggaatattattcaagattgcaaattctttcgctagatatacacttgctcagagtctaaggattttcttcataaacaaccacagtgagtattctgttcctaaaacaagcctttttaatccagtttggtggaggcagcagagtgggatggaaagagtaatcatctgtgatccaggaagtctgctttataattaccaagctgaccttgaacaaatcactctcttgtccctagtttcttttgttgttgttttgtttttgtttttgagatggagttttgctcttgttgcccaagctggagtgcaattgcatgatctcagctcaccgcaacctccacctcccaggttcaagcaattctcctgccccagcctcccgagtagctgggattacaggcatgcgccaccacacccagctaattctgtatttttagtagagacagggtttctccatgttggtcaggctggtctcaaactcctgacctcagatgatccgcctgcctcggcctcccaaagtgctgggattacaggcttgagccaccatgcccggccgtccccagtttctttataaaataaaatggtcctttctgactttgaacatgttatgacgagttcagtaaatcagatcagggtaagtgtttcagaaggttcaractattcctcccaaggcagttttggtgacctcaaacaggctatgactaaaaacacctccaaatacagttgacccttgaacaacatgggtttgaactgtgtaaatccacttatacacagatttttttcaataaatacattggaagtttttttttttggagttttttgacaatttgaaaaaacacaaactgcgttgcctagaaatatttttaaacattttaaaaggtatgaatgcataaaatatatgtatatactagtctattttatcatttgctactacaaaatatgcacaaatctattataaaaagctaaattttctcaaaatttacacacatatacagtacatggtgccattcacagtccagagaaatgtaaacaaatgtaaagatgcaaggttaaatcatagccacataaaaccaactggagtacgtactgtactgcaatcattttgtagctgcctcctactgctgcggcagtgcgcgcagatgttgtgaatatccactcaaaacgctatgtgatgctaatcatctctgcatgagcagttcaactctccagtaaatttcatgtggcagaaaaaagtactctctcgagattcttaagtatttttcatcatgtttagtgcaccataaacctcatataataccatgggacccatatgaagtgccactagtgatgctggaagtgttctcaagaagtagaagtcatgacattacaagaaaaagctgaattgcttgatatgtatcaaagattgaggtctgtggctgtggatgcccctcatttcagtcccaggattctttctgtaaacagacaatgtaaacttaacggaatcaataaatacagtaatgtaaatgtatttccttattttctttcttttttttttttgaacagggtctcactttctcatccaggctggagtgcagtggcacaatctcagctcactgcagcctcgacctcctgggctcaagcagtctgccttcctctgcctcccagagtgctaggattacaggcaatgagccaccacacttggccccttatcattttcttaataacctttgcctttctctagtttacttattgtaagaatatattatatactatacatataacatacaaaatatgtgttaatcaactgttaakcttatcagtaaggctcccagttaacagtaggctattagcagttaagttttgggggaatccaaagttatacaaagatttttgactgcacaaggcattggcagccctagcccctgcattgttcagtggtcaactgtagtacatgaaagtgttcaccaataaactccttaggtatcgcagaattttttaaaaagtcagaactgaaaggaatagagttagaaaaagggaaatggaaggtaatggagttccagtgacacaaaaaactaacttaaagcatgtgactaaaagatttctttcccccaagtcatagatcaggatcctagttgggtttgtttgtttgttttttgtttgttttttttgagacgcagtctctatctgtcgccaggctggagtgcagtggcatgatcccagttcactgcaacctccgaccccggttcaagtgattcttctgcctcagcctcccgagtagctaggtttacaggcatgtgtcaccacgcccagctaattttttttgtatttttagtagagatggggtttcaccgtgttgaccaggatggtctcaatctcctgacttcatgattggcctgcctcggcctcccaaagtgctgggattataggcatgagccaccgcgcccagccaggatcctagtttctaatggctcttgggtatttcacctggaatgctgctgctaagtggacctttttttcccagagtccttaataaaaaaccgttgttttagatctgccactgctatcagtgttgagaaacattttgtggtcgagaatttttatcatcaacaaggttgtctttattgttggctatcctgtatagaggttttcaatttgataacagaagacctagaggaaaggagaaaaccatttgagcatttttcttggttcttgccttctcttcctccataactggccctgcctcccccagcagcagatctcattgccttacctgagccaaaggctgaacttagcctgaggcgactgtgtcaccattattccaccacatgactatactctcaaaatgctggctcttctaataggcctctaaaatcttactagagtctcgggttttcttcctaaacagcagggagctcttcccttgattcagatggcaaaccagggatatttgagccacctggattgtttaaatcccaggtggaaaacttatctaatttagggccttttatatagttgatgattttcaagtggtttcttctcacgagctcggagacttacagcccgaggccctgtgaaagatctctcttgcttgtttctagccgttgagatgtctgtcctctgatttcccattactgaaggagctgagcaggaatttgatgtattatgatccaaaagactgctccagaaacacagttactattaagtgttctttagtcacctcctatttctacctcaagcctgaaaaaagtggttttcatagccctttttttacttgaaaagaatatttgttctgtagaatatgaaatacaaaattttatgaacttggggtttctatgcaagttgcactaaagacaggctcattctctattactggactgtataaaatatagaaagctatctggcactttaacttcctttgcagtaaaccaggagataatgagattccaaattagctgaagaaataggcacagattaagttagttgcccaggggtctcataaattcagaggtgggcaaagaactgtaagagggctgcatctctgctagggatagtaagtgggaatcagcctcgggcctacttctgtcgcaccacaaggtggcaggattccccttgtctgaaacctgaaaggacaactgatttccatagtgtatatattatctttgagtttaggtgactgtgtcagactgcttgtctatgagactaacagtgtttccagaacctgataagtctatatctttttcgagatgttaaccagcaaaatattttccacatcagcttggtagtagcttttcaaaatattcagcccctatctccgtttgcttcgtgcaacagtggtgccagtagaaggtaataaagtcraagaccagctttcagtaaaactaaaaatagctgttacttagtacatgattactatggggccaggcactctgctaagcactttacatataatgcattatctcatttattctcacaacaacactgagataggtactatacttcatccccattttatagatgaagaaaccaggattgcccatagctagaaagtggtagtcctggggtttgaactcaggcttgcctgtctccagaactacagctcttaaccaccatgaatcaaaaagattaattcatagggatgcactgaagtcatatttctatgatcagattaaatagttgatgagataatcatagttcataaagactttatgtcctaaagtggggccaaaattccttaccaaactgcaaaagtattcatgtataccctcagggcaagtatacactacaccctttgctttcaacaaaaccaaaccttagtttctctactttgattctaaagacagggcaaggttttatttgccaaaatttaaatcactgatcatttcaaaaagactttaggtatgtaaaatacaatggtttctaaaaaactgatttgcagccaggtatggtgtgttcatgcctgtaatcccaggactttgagaggctgaggcgggaggatcacttgagccaaggagttggaggccagcctgggcaacatagtgagacctcgtcactacaaatttaaaatataaaaataaaaatgttaaaaacctgatttgttcccaacatgccaataaggaaggttttgtatatatatgtattttttttaatgtttaattttttttttatttttctttaggagacagtcttgctctgttgcccaggctgtagtgcagtggcacaatctcggctcactgcaacctccacctcccaggtcaagcaattctcctgcctcagcctcccgagtaactgggactacaggcgcatgctaccacgcccggctaattttttgtattttagtagagactgggtttcactgtgtttcccaggctggtctcgaactcctgagctcagacaatccacctgcctcagcctctgaaagtgctaggattacagcatgagctacagcacccagccgaaggttttgtatattaaaagtcctgagaagcccttcagaaaagtaacctgtgtcactttgtttaaacctgttttttttgtttttttttttccttaaatgatttttgtctttctgctacagagcctttcttcctcccccagagaactggcacacatcccttggaatcagcatttcttgcagcccctttcaggacatgctgccctgtacaacagctgtaaagtacttaccattcctccatacactgccctctgtcatgcttctgtgcctttgtatgtagagttccttcttccaggaatggcttctcttctccatctggatgaactgctacttgtcctttaagaaatggctcaaatgtcaccctctctatgaagtgttttccaattctcatagattgtctctcctttcattgcactgagaatgctattccagaacttaaatttcatgttattatttcttcatgttttctcttacactagaatgttgtcccyttaagattaatgaccatgttttatttatctttattaccacctgcagctctaactgcacctggcacttagtaggtgctcaaaaaatgtttgttaaaggaatgaatgaagatgaagaaactgagactcaatgtttaagtgacttaaggtcgcatggtttttgggattcacacacaaggtgccttgactcagagtacagtgctctttctctatacctgaacagcaagtatgtggtagaagtccagctgttcccccacccgtaccccagggcagacaacactaataatcaagctccaccaaacccagccttttgctctggaacctcaagctctgcctgccctattccatgctatcctctcctatcagaccatttctgtgggcgtggcagagtagctggggattgcagagctccccactgctctgctaaagataaggtacactgagctggctcactgtggcttagcagcccttgttccccataaaagagaccctcaagcagggaactaaaggcttctgagttttcacttctctacctgccccaatgcctccagctagtcctagaatcctgatttggaaaagctgctgccccttgtttggctacctggctctggtggagcagattgtgctcctcactcactcataccaaggtttggccagatatttcctccttaattttgtagatggagtgttggaatgtttactaataaataataggaaaagaagatgaatgcagcagcctggaaacaacccagcttatggaacatacatttcatcactaaggtcttgcccaagactggtctggctgatacaaaatgtactgcagcatatcacctcctttctttttccttgctcacttctctctggaaataatcacctcccaaatccccatctccaccctactttccttctccagcccctcagcccaaaagaggctgttccattttgttcatatgaccaagaggactgaatatcactaatagtttaataggcattgaggcaccttccttactcccctcttatgaggagaaaaggatggttctccctgctccttctgttggtttctacagctttatacccatcaaaaggtatatcaaaataacttttcggtatgcagctgttccagagacatctgacagatagaaagataaagttgataacttcatgctttcatacatccagtaagtttgatgactaggtagagttgttaaaatggctgatatttattgagcacttaacagtataccagatactgtgctaagtgctttatgtaaataatctcatttactcttcattatgtttctacattatagatactattctaatcctcattagagaaaagtggggcttaagataacttgcctaatggcacatagaaagtggtagagcctggattcaaacacagatatgtctaactttaaatgtagtctatgaccttaactactacattcttctaacaatcagaactgtccagtaatggaaggaaggggccattttgagagataatgagtaaattcctgattatgggaggtatttaatcaggtactggacaaacagtaatctcaaaggtcttctctacaaatacagctcatgctaatatcagtgatgtcagtgattattttctatttgccaatataatggcttctgattagtcatccttccctttccatctgcaatcattgtcatcttcatcatcaccattaacatcatcatcatcatcatcatcatcatcatcattaacactctcatcatctctaattagcacatactatgtgccaggcacctttctttgcagttttacttacattaacttatttattcataacaaccctatgaagtagatattatattattatcatccccattttatggatgaggaaactgagaagtaaagcgatttgtccaagatctcacagctaaagacagagctgggattataacccaggccatctggcactagtccattccttaccactacatggcactctcttaatatttgacacatataccatactcttaaaatgtatcttttttatcatcacaatatttattgtaaaaagtaaaatgacacagaaatacataacatagaatttgaaagtcctccataatcctgtcctagagataattactgtcctttgcactaactacatatttacatatacttatgagttatgctatatatattgctcactaatgtgtacttttcatatttttagccctaacagtatatatgggaatattcttccatgacacttaaagctctacatcatgcctttgaatgaccatattatatggcaataaaaatgtactagtatttctactggtagacatttttttcccattgtttgctattataaacaaatctaaaagatatatttatgtatgtataggtgtatatttgtatatatacttatatttataaatacatattttgtgtaaggatttcaaaagacaaattcttagaagtggtctttcagagtcaaaggttacaggcatttaaacattctattaacttttcccaacatatccaccaaaaaggtgcaatcaagatacagtcccatataaatagagtattgagaaggctgagctccccatacttttgacagagctgggttttcttgcctgtatttttcattaccacaaaaacgataggttaaaaatggcattttatgttttgaatcctgcctgagattggaaatctgtgtgtgtgtgtttattggtcatatgcatttcttcctctttgaagtgtctcctcgtgtctttcgtaacaatgacactggcctctctttcattgaaactttgtcctctgatttcctattttttcctgactctcctaattctcaaggactttttcagagactccttttcagttcctctttctgcgtgatccctaaataatacaataatgataattacaataattaacatttcacagaagcttactatgtgccatacactaagtaaagcacttaaaatgaagtgctctatttctgtgcattttcacagatgaagaaagtaagccttaggaagtctcactataagtgggaaagctcaaatttgagccccagctgttctgctaccaaatcaccatattatattctctctgaaataagtgtaagcatgctccaaagttctttcctaagccttcttgtttcacatgtatgtattccatgggttattttatccattccattagcttcagaatcatttctttgagctcctggcccatacagccaacaacttaacagccattgccaggtgaatgtattgtgggtattgcaaacatatccaaagtggaaaccatcttccctcaggcgccctagaaatcctccaagattattcctcttgccaatactatttaatagcattgccattcacccagttgcccaagctagaaacttcaaagttacctttgattcctgcctctattaaacctcacatctgactggtcccacggtctgtcaatacagactccatatagcttctcgatctgtcctctacacgttcttcctactacggctttagataattaagggtctaaacatctctcccttggactatcagatctacctcctaactgctctccccacttctccctaggtaccatctatccttctcattgctgtcagagttaatgttttaaagctaataattgatcatgtcatatctacccaaaactctttgatggttgctttctgtctactaaataaatcccaaatgccttagcgcagtacataaaaattccataatctcaccccagtctgtctttccaaactcatgtccagcacgtccctccttaggtaccttaaactacaaccactcgaggccacttgcttttcctcagcaatatcgggtatctacgccactatgcttctgttcatgcaacttggaatactctcctctagcttcttgtctacctgctaatggctacttttcttcgaagaacctgcaacccatcccccaacctacgcagagtttccacccacatttctaacctcatgatttattacttgcccttttcctttacatttctactaaagacttactacagactaacttgtaatctggtcatacatgtctgttttcacgtaagggactatatcttaaacatactagtatttctagtgcttaaatgagctagaaatgtacaaaagaagtacattttacatttaggtaaaagttagactaaccaacctgaaagtttaaatctgagatttttgtatgccctttctgtacaccaaaattttatttgaggcccttgcaactatcatttaaccttgaaattaactctgatttcaaggagccatttctactttagcttttttgcagaggcttcaaaagccaagaattcgggctcctagcaatgaaagtccagtgagtgtagtcaacgagtttccggaagaggtgaggtaagaagcaggagagtacatcggaaaactagcagagttccaggacatctgggattgattactccagcaagatgctgaagtttgcaaagagacagcaatcgttgtaccaggttttgacatctggctttggcagttacccccatggttttgctcagcagttcttgaggaatgagatatgggcttgtttcagggaaagaaaaaccttctgccacagcaaagtccttaaaagactcttcttttccccttatatggactttcttggtaggtttggttttgttgtaatttacagaaagaaaaattaatttccaagtacctaaagaaactcataccacctaaggtctgaattagatctcctaatttttcctccttctatgaatcttttcagatcacctaaaagacacagtaaatactggaaggcaaagcaacctcaggctaccgaagaattagattcattccagatattctgaagtgtctatttttaaatacaagctgagtagaacttctgttcagttttgaggaaacatcatgcattttttctctgaaattatacattttgttcttttagtttcattattattaccttcagagcacaaaatatactttagatatgttcaaagattcaaaatctcaaaactaacctatggtaatagtggctaacaatcatctctgatttcaaatattctgaactgttgccctgaaagcaaaaggcaatcttctgtgaagaaggggaaggaagggtgttttacgaacacttattgagcgcatactctgccaggcactgtactatgcatgttatagacatgattttatttaaaactcacaacaactctctgtggtttactatgatctggatgttagcaatggaaaacaaggttcaaggaggttaagtcatttgcccaaggtcacatactttgtgagtggaaaaggcaggttaagatcacaggtcagactccagtaatgtatactctgtacctattactcttaatataaaacaataatacggtgatacaaagaagcctcttattttaacattctgacatattatctcttgtacttcagatagagaattgttattattactattttgttattaagatctcaacattcattgggcatttaagacctgctaagaccttccaggccctgatctaagtcttgtattatttatcatctcattaactttcagaaaacgtactttttgaggaaagtactaatattttactgatgaataaacagaggctgagggagttaagtcacttcacctaggtcagagagctgagtgatggagcctgagttttaaatccaggcaatcctgggtgcagtggcagatgcctataatcccagctacttgggaggcagaagcaagaagaccggccacagaagtttggaccagcccgggcaacacagaaagacctcatcttttaaaaaaaactccaggcagtctgtcttcagattgtaagctacacttcctggagtacagatcctggagtcagagagacccagattaaaattctacctttgtctcttcctgggtgagttaacttcagtaaatcataaaacttcagttttcccacatgtaaaatgggttytggagccttgcctgctgaacaggtatcctcatacgtatactcaaattcatcaaagtcagaatctgtattacattagtgaaatggcatttttgaaatctgatcaacccggattcaaatctta

SEQ ID NO: 95702 - DNA, 337843 bp, Homo sapiens
  misc_feature (1)...(337843): n = A,T,C or G
aaatctgtttcaagtaaaaaatatgtctttgccaacttagatgagtgaaactcgttactaattcttatattgattttgtatatgcaaatgtgcttttaaaggctctgacaaactttctcctaaattgatttaccaggtctcctataatttgtctgtacctgtagtttgattagtaagccttttgctggtattgttgaagttattctcaaagcacctaaaatataaacttagctcatttcatgtcaaatattctgaaattctaagtttagagaatccataatacataaagttttacagcatgtatatttcttggatgtttaaaaatataatagcacatatattttaaatgcaaacatttatgacttggaaccattaatttattcataattttcaaaatgtgtaataaaattagaattcaaagtaagagaaaggactaataacatttctctccagcatatatgtgtgtgtgtgtgtgtgtgtgtgtgtgtgtgtgtgtgtgtgtgtaggggtggggatgcatgtttttaatttcatgggtcatattgaaatttctctgagagtaggaacaatgttacttaggctagtaacttatatagtggacaccaatacattttaaaaattcattcaacaaaatttgttgagcacctactctgtgcccaaaactaggatatgagatgatgatacaaacatattaataaataaaataaatatgaaaatttattaaatacaaatgtataatgatcacagattgtcttgtcaaattttacataaaatatatctgtctgtattacacttagcatataattccataaattatagtttaatcctaatgggaaaaaattaaatttattcctgaatacatttgatacaaaaatttttaatgttccttgaaaaataacttctttaaatgggtaaaactgccttctgaaagaaacaaggctcaacaaaatttcaagagcaataaaaaaataggtaataaaacttccttttagtttgaacctcaaattagatctatgtagaatagcatatttcatagaacctctatggaagtagggtagaactagaaaatgtgagaaggaaatgtcacaggaattagctttaagataataaatcaaagtctcatatacattcatggccctatcaggattgactgtcctactttgcaggttcctcagcattgtgctccactaacttaagtgaggatagagcagacatactgctgtctaccatcagctactcagaaaaaagtgaatgcctcagaagagtcataatcagaagtttttttttatttttatttttttttgagatggagtctcactctgtcaccgaagctggagtgcagtggcatgattgcagctcaatgcaatctctgcttcctgagttcaagcaattcttctgtctcatcctcccgagtagctgggactacaggcacacaccaccacgcctggttaatttttgtatttttagtagagacggggtttcaccatattgggcaggctggtctcgaactcctgagctcgtgatccacctgcctcggcctcccaaagtgctgggattacaggcgtaagccaccatgcccagccataatcagaagttactactcaaccgtaatgtccaaatgataataaattcatccaagaaccaaatacaagttcaaaattttgaaagcctgttattttcaaaacagaatataacatacaatattttattttatttttaaaactaaaacatctgataaagcacttaatagtatactaaaatgtacttaatttactgtgatttgcaccaatggaagcttgctctgtggagcacttaaatgcacagatgactccaaatccacaatattttctttttttgcccacatatttatcttcataattacttttgataaatctaatagtttttcttctccaatagaaagaggaagtagcaccttatacataaatgtttgcaaatataatatatatctaatgatcatataacaagacttttaaatccttgaatgaaggaacaaaatctctgaatccttctttactccctacattttatgcatcatgtagcatagggcacagaacaggtgtggtcaaagaatattcattaacagagaattaagatttgatgctcatgtattaaaagaagtaagagtatttttagtcttctggtagttctcttatattacagtaaaacaataattctaggttttgctaaggaatgtacttttggaactaacatattactttcgtatattaatttggtaatattaactagtctaacaaacatatctccacattgtaatggagtaacacaataaatgagtaaagcctaatgcctattttcttagtaactgggtagtattcctctatgtggtaattaagggactctcgtctttgtctctggggttctgcctgccctgggtcttagaagtctctgcattccgctaaggatgggagcccatagactagaaaatgtatatctactgcttaactgccttgtcctgagagtgaccaaccatcttagtccacagtccattgatcagaactggtcacatggaccttcttcgaggaaagaagggtcaggctagaaatgggaatccctctctgggcagacacttcccagagtgaattatactaagggagggaaaacacatttttttggtagacaaaaagttgtcttttttcaagcttttcccccctcctatttcttgataagcaggacattgccaaagtcagcatctgggaactgaagtaaccccttcaaaatgtaaattccaaatataaagtattctcatgcaagcagtaatataattatggactgctagggcagtctaacacggaggttcccaacccctgggccacagaacagtaccagtctgtggcctattaggaactggactgtacagcaggagatctgcagcagagtgagcaaacattactgcctgagctctacctcctgtcagatcagcagtggcattagattcccataggagtgcaaaccttactgtgaaccgtgcatgcaagggatctagcttgcccgctccttatgagaatctaatgcttgacgatctgaggtggaacagttttatcctgaaaccacccccaaccaccatccatgggaaaattgtcttccgcgaaaccagtccctggtgccaaaaaggttggggatctctggacaggacagaaaaagaatggcagtaggagagggtaggacatctgaaacagtaaccgaataaaaaagatgatctgtctgtctacttcaggaggtcaggtgtatgaacacaagtagtccctagttaatatgctgccgtcctgtttccttagagcaggatccaattttgtttaagaggtgtcagtgttgcagcagttatggaatcatacacaggcattaaaagttcatgttgataatgtgttgggaagtgattgtgagtcataactttttcttcccatacataccttagctaggaggtgtcctagacttgtagcggactaaagggtgtgcctgaaaggtgtgcctttatttcctatctgtatcatgtaattttatatggtgctgacattttaagccttctgatcttggttcaaagatgtttatcctatacctagtaaaaagttattccaaataaaggtgggaacttcatttttttctaatatgtaggagagaatgtcttggccttggaaatgagcatccctggacatggtttcctggtctttctgaagcaggccctcttcacccacaggtcttggcatcgctccctgtgtgccatctggccagggaccaacttcccaaatctgccttagcaactagctctgcccgtgctcaggaggctgtttccaacaaccccttcctgagattacagtgacctctcagagctcataattttatgttctctgaaaattttaggctttattgagggcaaggacaattttcaaatacactccctccccacctaattacccaccacaaagtctggcatataaataaaaggagtacagaaaatatctttattgaatgaattgtctaattgccacccagtatcctggggttggaaattgggcagcagaatctcagtgccagtggcagcctccctatcttggtgggacacaccctgcgtctgctccttttgctaggcctccacagaggtatctagtgtgtgtttctattccgtgcagtccacatcaaagtcacgctgcagcacaatcagtctcttactcaaaattgattttcaagtttgagctttaatctaatccttgtctccaaaacatttcttttggcttcatctcccagctccctaaacttttttttttgtttttgttttctttgtgtgtgtgtgtgtgtgtgtgtgtgtgtgtgtgtattttaaaccttttattggacccgtggtccaattgaggaaataggaaaaacctgatactgaaggactttggaaataaaacaggaaacatgaagggtgagaaatttattcagatttcttcataattccccccaaaagctccaaccacgttgccagtccttgggtgctgcagttggtcggggagaggggctgtgtggaggtcaccttctggtagacggagacccgcttttcagactctgtggcgcagcaggcgggccaggaacatttgggccactattgctcttagccctgccgcgcctgactttctctcctctactttccttccgaccgtagggacaagtgtggggatccgctttgggctccaaggccctgcccgcactggcagcaccaagcgggtgtagaatgactggaaggagcagggaaggaagatgggtgtcaactgtcccggccagtggctgcgtgcatgtgtgtgtgaacagggaaaaggccaccctctcccatgtttctcccgtctcctcggttctcctcggagacccgcagggctgcccgaggtagctccgagttgccctgggtcgctggggcttggtccgcatcctcctccgctagtccgctcccgcgttccacagcgccccgccgctcggtgtgcacgcctgggtgggacacagtaacagcccctaagccgccaacgcaaaagcaaaaacaaccgtacaccgcatcgcagtcgtagctcttctccgcaaggtaagttgtttattcgtcgccgttttggcgatcctccctggacagctgcggcagcgacggcagctgcgccgcgggcgccgagctcccagcctcttccttcctccgccctctcagggctgcctctcacccccaccctcttccctcctatccccgccttctctcttcttgccctcttgtgggccacgcacacacccggagacaccctctgcacttggctactcacactgcggcttaacccagccgacaaggcacgcttgccaaagaggcgcgggtgtgtgtgtgcggggtccgcgttcggaggccaaaggagggtggcgtggtagagcccttctcctcctggccgcgacgccttgcccactctcctgccctaatctcggcctgccagcaaaagtgacacctgagcagggactggtccgtagaggcggcaggcccgctggtccggcagctggaagaaaacagagcaaggggcggggacaatgaggaggagcgggaggcgggacaagcggggaggccgccacctggcactgagtgatgcgccctctagccaatgaacgcgaggaactccggcgtcggggcgggaggtcgggggcgggctcagtggggaggaggaggctgcaggcgcgcaagaggcgggggccgggaggaggaaggggaggaggcggaggcgggcgcggtgttggcggcggcggcggcggcggaggggggtaggttgtgcccgggactgtgtctgccgagctcggcggctgtgccttggtgagtggaggagcggcgcggggaggcagaggcgagcgcgggcgatcgcggcggcgggacgtctccggcggccgcggcaccagcggcggcgctctgtgtggagaagcaggggcagcggcagcagcaacagcggcagcggcagcagcagcggcagcagcggcggccgcctctccgccgccggggacgccaaggtgcggctggtggcactgacatcggcggccctgcctctcctccctcgcccccggccttccccatgtgatcggtcttaatcctggccgtgtgtgcgcgcgtggggctccattccgcggtgctgggtctccgtgccggggtgggtgctcgtgtgtgcgcttctcctccccatcccccttcccccaagaataaaagaagaaccgggaggcgtgctcagaaaataaataaataaccaccacacacgcgcagcccggagcgagtcggcggggctggcggcagcggcggaggaggagtgaaggcggcggcggcggaggagggacgcgcggaaaaggcagcaactttaaagccagctcagagcctagacctccagccgagcggtttgcagcgcggcggcggcggcggcggcggcggcgttgagtgtctggcccgccggtccggtcggggtgtgcagtcggacggacgagcagcgcgtcgctgtcctccggcagctggagatgtccgagcccaaggcaattgatcccaagttgtcgacgaccgacagggtggtgaaaggtaagcggagcgccgcggtggcctgggtgcaccgtgtgccgcaggcgccagggcagcttgcctcgcctcgcctykcctcccctcccccgccccaggttctcctctgtccgctccagccgcggaccttctaggatattgtgcaacccgcgaaccccgcgaaccccccgcccccgcggcgcccttcccccacgcgtcccacccagcctcacttggggcatttttattgacgggggcgtcagttggcaaatggctgagccgcggggaggtggcggcgggggtggcggtggtgggagggggcgcccggggggtggttgctggtagggtgtagctgctgtgacagaaataggaagtgggtggctctgctcacaggcttgcatgggatcgggtttatggttttcttctgcagagggaggggtgattgatggctttttaaaaattaatayggcatttttatgtggccgtggctttccaccgactgcctcacttgggcagggttgtcttggagctccattgcagcaattccctccgcgcccccctccccctccccctccccctggaagggcctgcacaggactcgcgagagagcgggagagcgtggggggagcccggcgcttccttccgcgcggggcgggggcgggggcggtcgctggctggagggtggccgcggggggcgcgggaggcggggaacgacctgagagcaccagccgttgccgccccgggatttcccccgcacgccccggggagagacacgaaaaccacttctccagcctctcttgccatccccggctgtcccccgccgacctgtcattgctcttaaagggttctccactcgtgcacacctcccaagtgataacctcattccgcctgcttcctccgtgccctggcatcctttttgtaacgggctgttggattcctattattgcctcctcttcgccgcctacgggatgataaactcctggcaaggatgcactgaggttgctggcaaagagaaactgggatgtgcggagtgaggaaggggacaggctgtggttgatcactctgtcgcacgggaatctatyggcctccttgtattcctaggtgtagtgggggaggaaccatcctatgaatcctggaaggctgaggcaacagagcagawccacttggattaagtagtatctcacattcctgggggtcaggacaccaagcaaagcagagatgggcatgagctgtgcggggagcgggcctctgaaattggaaacagcactggctggtgtaatgtgtgtgtgttgtgtgtagaacagagatggtatctaatgtggccagagcatgcaactagagtgcaaggcaatcaagtcgtttgcaccatgagcacttaaaagtgaagtaacccagcagcccaaagaccatgatacacaagtccctctggggtttcagaaatgattctttctccttagaggtttactcagtttttaaagtaatttttctgtgtgagtggtggtggtgatgggggaaattacgttcccttttttcagaaagaacaaaatatcttcttttgttttggttttactggaatcattcctgcttcagcttcggtgcaggattcatatacccatgaaaataatgaggaaatagctctgcaaaaatgattcgaaatagggctgcagagagatgcacagctattttatttttcctgcaggcatggattttcatggaaacagtccattcacatttatttgagagagctgtgttttgcatgaaaggcttctgttgacattttcaaaaattgagaccctttgcagaaatatcagagaatgacaattatctccttaatgtgtgaagtttagatgtagctccaatctaggttaagatcaaaacaatgtaaagcttataattcaaatgatactagtgaacgtgttggcaattaaaaaaacacttgtgcacacataaggtcacattccctgttttaaatcataggatgtggattcttaatgtaggtgtaaagtcatcaggtgaacatgtaaaaataaatgtttatactttctggcttagtttctctactgcttaaaatggaagagcccactcaaccattccaaggctactttgccttgctttttttcaatactgtaccattrtaaatgacttttcattttaggtacacacactcacccataatttaaaaaattttattcacatactatgtggatagtagactcaaaataggaaaagttaattttgcatttgttttgatagagatcctgatgtgagatgtgaaatgtgaaattttgtttatagaagttttgttgatgaatcctgattttaaggtggatacactgttattgtttatcctgttttcttgtagaatattattggcatgaaaggcattatacaaggttggattcaaccttttgtcatacataagatttttattattagttatttgagataatctattttgattattagctttctgtgaaataatatttccccttgagtatgtatacacgtactgaatgaatggaargtacgcgtatgctggatgtgaaacatattaacaagtgatttaatttgcaaaaattagataatatggagtttagaaaccattatttacttgaaattttgttagaacttcatctcaatggctatttaactcattctttaatacagaaaagaaattatctttgaggaagtatttgtgctccataagttttctcttttttacgaagtatgtgtagtattatttactatatatacatacaaaaataaatattcagattgttattaccatggcatgccatggcatttgcttacagttatatttattagtgtcatctggcttttgttgtataagaaattgctatttacaaataaagatgtgcttgtggtttgtagtaatatgatgtgactgttttcttaattgtacttttagaatgcagctttagagacgtaggttgagtctgtctcaactatgttatttttgaggtttatagaatctgctagcatgtattcagagaccctgatcggttttctaaaccttaaaaatgaaagagaatgatggcagtggagatgaaaagtatttgtttagattatcccaggagagaaagttacttcagttagcaaaactagtgctgtatcattttgactcttcttggattaaaacaatggaaagtagaaaaattcagagaaaacatcttggtaatgacctttgctggaaatcaaaataatatggtccgtttattgctttacattatatttttaaagatacatacagcaaaccgagggcaataaatagaagaataactgtcttcctccccttgacccccgtcctgatttttctcttagtgrtactctacaggccttgtctcaaactttggcttttcttcatttctctctgttcctgcctagaatgctttgtctggccctagcattccctattggtcatggaactttgctatgtgatagttaaaaatacttagaggaaattaaaccctatgtgataatgagtatttggctttgttaaatctcttaacctaccttccctctgttcccatctccaagtattttgtgatgggacttctaccttaactcaaaccgatggtaatggtagaaattttagaaactatgggaggctgttgagggataaatttctgagaagagttttgtggaatctctcagaaactatagataatgcgttgttgtgctttgtgtaaggttgcttttggccatagagaatgagctgtttttcaggtgtattgccagcttacgtacttcatgtagacagagtacacataggagaattctgaaagatgctaagatcatagaagcaagaagatgctagttaagtattattaagtaaataaggattccagccactagtatttctagctgggtgagactgataatactacttaaaaagaaaacaaatatgtcacattcgtagtaactgtcgtgtttagaccttgatgcaacagagtagtaaataatgtcatttatttgtggtgttccaggaagagcttgtgaatttattttactgacattttgttaccatcagttgagtttcatgtatctggttttcaatttgagtatagtgaaactttattaattcaatatcatgaatttaaatttattgkgaaaaaacaccagtgtttgttggctgaagtttacatcagcattggatgtgaagaaaggggtccgataaccaaaaagtataaacaacatagttccagcattgttaatataccaagagaacaaattcttttcaatacttagtgaacagtatgcaaattcatcctgttcgttacgagttaggttggtctatttattaacatttccttttgggactattataaagtgaatataacacaagtgcattgttgtaaaaacattcagtaaatttaatgattaatgcaacaattgagactgggattcaggggaattccagtgattctaaaatgccatcaattagaataatcaacattttgaagataatagtttttctgagaagtgtgggatagaacccttattttaaatggacagtttatcttaagacatccagttaaaataggaaaaaattaacatctagaatctaattaatgaggtttactctaagatttgtttaaaaatatgccttttaaaatctatttgtctctttgttttatttgtaattttagcgagatgaaatataattttgatagaccattcatttataacttttgtaattggcctctcatgcttttccttatctttttttgtgtcagctatgtgtaaatttgaaactaattatgacaccaaataaagaatccatttagggtgacctcattggaaaacagcatttttgcagatactcactctccttttagcaaatatggttaaattaccattttgaatacttctagaactatgaagaatggtggtgattcatgatatagaattttgataattactaaaaatcattttgtcaatttttttccagcaactttctgatgtagcagtctcttgatatacaagagggatatggtgagaccttgaacttcagctttctgtaattccactggtatatgttataacttcacaggctaactttctctatacataaaaggggagtaattgtatccactgtcaacttgtgaggaccgaaggataatcaaatgggaaatggggagtgtgtggttaacactttgtccactgcctggtaatggcgattcagtcactgctaacacagaattagaaatgacacgtgttatgtattttctggtcacctgagaatagtcagaaccattagcattgaaagccatgagtgccttgggtcaagagtagcttatgatgacatttatttttatagttaaagaagtggagacagaatagatagaatggttacaggtaagtgtaaacacattattttctttattaaagaggcttttcttgcttgaaaacatttttgaaaattgccactggccaggtgtggtggctcacacctataatcctagcactttgggatgctgaggtggaagcttgggcaacatagcaagaccatatctcttaaaaaaaaaaaaaaagaaaaagaaaaaaagaaaatggccacttcttttggtatatttaagatatcttcacatttcatttcgcattttgttttactaaataattaactatgtaaaatagtttgattaggagaggaagctttttatatttctgtttttagcagacatcaaattctggtgataaatattataatttagtctgaccttggcctgaggtttataaagaaatactgttaaacattgctttctgttcaggtaaatatatacacagaaatagaatagtatactctcctgcaaaagaatgttatttactttcattttgaaggatgttgtcttaagcctgtttttctgaactccacttaatgacccacactgatgctctggtttgacaaacaaaatcttcagatttgatgattttgttaatttctagagcaggctcaggtgaaaatatcagccagtgattctgaggtgttgcattcctatttttaaagcagtcattaggtaggactgatgtaggcaatgaaataggatttcagtttgtaaattaagtctttagtactcttgacattttcagcattttaaaatcattttattttacaataattccatcttttatatgaatccatcaattatatttcatatgagaagtgaaataacaattgtgtattcctccatggttaggggttctgaataatggcttaaatcagatgggttatcaactttatgacctagcccagttgctggtatctcaaatccgttttaacaaatatgcactcgggtagtggaagctttagatattaaaaaaataaaagccctcactgacaaagtggcaataaattattaaaatgctatgtttttggaattcaggtagattctttttgagaccatcatagagaggaatagaactttgctgtcctttttgttttccttatccatgcttttgtctcacagcaaaatatactatgactctattttaaaaaatggtctacctgtctgtgaacttctgtctcttgcaactggaaattttgcttgtgtctgtctgcaaaagagggaaacaaatagatatcagggatttataaaagctatctcaatattatgacatactagtttacaatgtttgtcaatttcaggtacttttgacaactgtgaaaccggaagaatgatggttgatgttcaaagagagagttttatttatatggagctaaattaaaaaaattttcatcagctctaagattcttagacttagagtctttctgtggtgattttattgtcccagttttcctttctttggggaagaattagtagtagtttttatttaaaatgtccagttctttctatgtaatatcagaatgttttggaaattctagtatgtcagtgtctaaactatgtgtcttggttgctgcatatacttggaagttgcataaaattgttaatatttgtattcagagttttagtttggaaaaaatggtcattgtcttattggtccctagctcaatgccttgcttattaaatgcactgaataaattcttttgaatgagatggatattgtaaaattctcatgtgcctcctgaagccttctaaattgtttttattttgagtgtattatattaagttccatttgtaactggttctgtatggtgactggcgaattggagtgcttctttctccagcccaatcagggcatggagtatgagaaggaggcattaataaggttacacaattagaatgagagctgttctgttcggtcacttgaactcactttgtccctgctgaatgtaaaaggctaagttctattcaatttaatttatttgcttgaacctgacagctgtctttcagtttttattgtattcccctttaggctggtcaatttctgacaaatgagaaaaaatatgttaatcactgagtgtttgattattggatgatttgtgtattttagttattgtctagatttggacttgaagataaaatgacctggtaaatttcatgaaaaagaacaaattggaaaaaacctctttccctgtttacatctcaatatatcatttcctataatgcttctgtaatccagaaatgctgccttctccaacatgacctccttcccttctctggcccccaaaatgtcattggatgccatccagtggaaagatacatgggctatgaaaagttaagaaaaaggtggcactaacgctgctgtctccttagattctcacaagtgggctttgagccatccgttgacatttgtttttaaaacatcttgtaagttatgctgttttatcaagttaaattaaaagcaagatatattcttaaaaagatggaacctgagtcaggaattcaagtttgttttattttttgtttgctttttacaaaggaatttgattttaaaaaatgataaatctggcattgttggttcatgtatatttaatgctattaaagttacacacattcctgttctgctgggcctgattattgggataacaaatgttctcctgatcattcagttctcttctttcgagcttcagttcagaagttacctcctttgagacctgcatctcctgacaccttcacttagaataaaggaattgagcctcttccttctcacagaggacaccttgataagagcatgttgctgtgatgacttgtttccttgtctgcctctcctccccaggaggtggaaagtcctagagacagaagttctatctacttttgtgtctttagctctagcacagggcctgctgtagaataggcatttgatacatagttgttacaggaatgaaataacaaaggataagatggatttaaatttctaaattatggggttcctttatgttttgaaattttgtcaatcttaaatcgtgatcagtacacaaatgtctgatgagtcttgacttgtaagctccagtctttgtagaagtgtgttttcctgtgagtttttgaagtgctgtattttattaactggcattatatggattttgctcggtagccagcatgcagaagcataactggcagaagtggccttcccatrgggagtgcttgacttttaatggattattgtcacaaggtgtataggttgatttcctcaaaggtgagtgatggtttctttctcaggaagacaggtgatgatactaaattgaggggagagccatttgacaagcatatgggaggcccatattagtcttcacaatgtgcaaattcaaatgaataaaaatgtataagattaggaattagaacagagattaaaacatactgtacaccccgataggtgataacttactgtgtatataccaataaaaaatcttcaggcccatcacgagtacaggctgctcatgagtcacctctcctgatggcatgtctgcatggtgagtgtttttagaaaagctcagtactggactccacaccaacagagtggcagtatagtgaggcacttgctcttagtcccatccttacagaagaccgctaaagctgcgctaccccagatgtggttgtatgacttctggttaaagaaagccagctgggcctttccaagctccattttatttttgttctgaatgaatatttccagtctctcacatgggccgggatatactttgtctcactaacacagaaatactttcatttcaaagagttgaagactaaggaaactatagtttcctacataaaatctcactgttagcttctgttgatttgcattcagcaaccaggagggaatctctgttgtcctcgcctctggtcagaattctccctgagtactctatctcgttccacgtgcccttccagaaacggatgtgttaaattttggagtatgttttacaaaacagtccccaagatgattaaaggactttaaataaattgtgacaggaagtgagagattattcagtctgaacaaaaaagggtgagtggtgatttaactagaggcttcaaatattagaaagtctctttctgtagtggatcatactcagaagttgttcatcaccccagtcaactaaagaagagaaaatatttagaagcatcagagaattaggtgatttttaaaaaaatttaaccagttaggggcatttaacattgggatggtttatgggaatcttctgaatggagagaatagatgattcttatttatttttgttgtaaatgtgaactttatgtgtgctgaagaatagtctaagcctaaaattatggcattttgaagctggaaggaaccatggaaatctaattttctgtctggctcagaaccctctatttgctggggagaaggattgggggatgtaggggagacctttgatctcttacacttgctcatgcctgaatttaggcctacaaatgagactcccagaattggaaggtacaccagaattctagcttaggctatctctaatgtggaactccctctccagcctctctgatggatagaatcccgcccctgcatgtacacatctagtgagaggcagctccctattccatatacctctcactccatcctggacaagtctgctttgaagaaatattttcttattcttgattacaatctgatgctttgaatatatattacttgttcttagcattgtcctacagaattccatagaataagtcttacctgtttgcctccagagagctcatttgctattaaaaacagctttctttttttttttttttcattttttttttaagacagtttcactctgttgcccaggctggagtgcagtggcacgatcttggctcactgcaacctccggctcctgaagttcaaacgattcttgtgcctcagtctccccagtaactgggactacaggcatgcgccaccatgcctggctaatttttttgtatttttagtagagatgggtttcactatgttggtcaagctggtcttgaactcctgacctcaagtgatccacctgccttggcctcccaaagtgctgggattacaggcgtgagccactgcggccggccagctttcttgttcttaagtcttctagctattcctcacccagcatgtttttgtttgctttttttttggaggtgggggacaaagttttgctcttgttgcccaggctggagcccagtggtgtgatcttggctcattgcaagctccgcctcctggattcaagccattcttccacctcagcctcccaagtagctgggactacaggcatttgccaccatgcctggctaatttttgtgtgtgtgtgtatttttagtagagatggggtttcaccatattgaccaggctggtcttgaactcctgacctcaggtgatccacccacctcggcctcccaaagtgctgggattacaagtgtgagccaccatgcccggccagtttctaggtcctcctccatcctaggagtctacctttaaatccaggtcagtctattggagtcccttgaaaatggagaagtgaacaaaggttgatcttgactgacttcttccatggaacctccagcatcttgtgctctcttccttggtactcttgcttgcccttctgtgtcctcatgccaacttggaactcagaagtctttcataggtgggcccagtttagcatcccgagataccctttgggagggtgaggattgccagtcatgatgctcttagttctcatgcctttcccattgaaattcccttgttattttttcccagaacttaggcagtttcaagttgtcaaacgcctaatctggtctataagtagaagtcygtaaaacctagatagcagacgcgttttaacagtgactttctaaaggcattgctctcacctttcatttataatacaggcaagtaataaagacaggatgaaagcatagcaccatgtggtgatagtggggctattgagagacaggccatgccccctttatttgcttttcaaatcatgccacaaagacagctagctcagcacctcacttgaccagagccaaacctgcctcttctgcttgctttcacttgtgcctaatctttgaagattgtmtgctcctaacgccattgaatttggcaaatgtagtaaaattggttgtaatttgataactagtttcagtttcactgagatatgaaggagaccagtggcttccaactatggtgtcaacacagtgttgtgttaaactcagctgtgaggtattaacagctactgataacctaaagaagtttgcagatgacttattttaagatatctacgtataaacgagagtggatttacgttcaaccctaaaatgctactttcacttgcattctgacatgaagggatggagctgcaactgtcatggtgggcattttgtataaattgcagttgcttgatcttactgataagtctttaatcacagtggaaattacatatgtgtgtatttccctgaacatttttttttatagtggttcattagaatctggatttgtttatcctagtgtttcgtagaagtgaatgttatatcatgtatatctctggggggaagaaaggccgagacctgtcatgggagactgtgcctttgctagccagtctgtaaattgaataatcttgaaacatttaggtaggcacatttggggtgacttcaaagtgctttatgaagtcttctctcctcacacatctccagagactaccatacctgaaatttcatgattgtttaagataagaattgcttttttgatagatatttcagaagtaactgatatttaaaacataattaactgactaatttaaatttttttccttttgggtaatgttgaatctaggaaaaaaatcctgttattcaggagcctttttgagagttaactttcatgcttctttttaaatccatatcccatgcctctttgaaattgtyactcgggggttgggcgcggtggctcacacttgtaattccagcactttgggaggccgggtgggtggatctcctgcggtcaggagttttagaccagcctggccaacatggcaaaaaatcatttccactaaaaatataaaaattagctgtgcgtggtgtcatgcgcctgtaatcccagctacttgggaggctgaggcaagagaatcgcttgaacctgggaggtggaggttgcagtgagcagagatcacgacattgcactcaagcctgggcgacaagagtgaaactctgcctcaaaaaaaaaaaaagtgtcacttggttttctatatgtccttatttcccatatgatataatctcctgctcggtaagtagattatttggttgagtgtaaaatggctgttaaaaagatactgcttctacttattaagccatccatctacccatcctgctcacgtatgtgtcagacttttagtgcccactgcgtgtgtggctctgcactgtgttcttggggtctaacataatgtaggcaatctgaaggttactgtccagtgtgggaagcaaaaggaaatcacggtataagttttgctttctttaatagcagaaggggctacatcctactgtgggaatgcagaaaagggagtgataagctgccttcatagactgtgctttcattttttgcaaaagtaaatgtaatcaatatgaatttgtggaaagtgtagcatatattgccatgtgttatgactttgagcttattttaaaataaagatggatgcctgtttctgcctaacatgttagtcagtgttatcaaagacaagaggcagaccattcattcactcatttccaaaacactgaatgccattctgtgcctagcgctatacaagacatcggaaattcagtgtcaataagtctttgctttccaatcaacagggacgattttaattatagattgtcttcctattaagtatgaattttagcaggtattaaaattagtttgataatatgagaaaaaaatgaagattgaggccgggtgcagtggctcatgcctgtaatcccaatactttgggaggctgaggtgggaggacttgagcctaggaatttgagaccagcctggacatcatagtgagacctcatctctacaaaaaaaaaaaaaaaaaaaaamaaaaaaaaaaaaaaaactgggcatggtagtgcatgcctgtagtcccagctgctgctcaggaggctgaggtgggaggatcgcttgagcccaggaggttgaggctgcagtgagtcatgatcatgccgttacattccatcctgggtaacagtatgagactctgcctcaaaaaaaaaaaaaaaaaagaaagaagatggcattatatttgaaattctgcagctattgtaactcatttgtgagcagggtatatgagatagaatcatagacttttgaaggtggaagagggctcagacgtaagctagttaagctgtctttcaaaaagaaaagatatttctgttagatggttaacaagccactcttcactctgcctccctccacatacttccagtgatggggagacagcatcacagtgtggaaagagcattggtttacagctagacaaaatctgtatttaaatcctctgtcctccatatgccaactgtgtgtccatgggcaagtcatgtaaccatcttgaacccatttttcttacagaaatttggaaacgatactaattttttaaggttgttgtaacgacgagaggaatattatgtaaaatgtctagccttagtgcctgcacagaaagtgttcccaatatatgttaggtattgtaattttgctgctggacagctcctttgaaagacatgctttttacttgtagaagtagtagtaattttcattaaagtaatacacttcctcacctcctatccactgtcaaatccgttgtacagtcatttggggggccctaccattccatggaggcaggttggcagtggctgtccaatggctggtttctgtgatatttgacaggtgtcaccttgtttttctcgaaaggttgtcctcattggctttcatgaatttcttcttttttgactttttgctatctcatcttgactgaatcctaaatgttgatgttccctcattcctttatacctttctctaggcagtctcatgtccttacacttacaggattgattaatgcctgtaggctgatcactggcacatctgtatttgaaacctagacttttctcttgagctgtctctcaaaccctatatacaacagttgctgtggatgggtatggtgaaaatacagttggatgtctgttctcctgtgtttcctatgcttggtgatgtcaccaccacccatcccagtcaattaaacatacctctcagttcaagtcttttaaatacttctaacctagtgctgcaggagcctcccaacatcagtgtctctgctttcaacctttttctcttgcatacacatatgttttgtcacattggcactaggattatttttctaaaacgaacacttgattatgccgatacctacttggtggttgatccctttttttactggtttgcaggaactctgtatattacggaatttgaccctatcacatgaattctgaaaatatttataatatagcatatgttacattgtactgaacttattttaagtctccaatttatttgaatataaatttttgggagctgagaacattttttatttatatgtgtattctgattgtttatctgtgtttggcatataataaaagttgattgagctgaaggacttaaaaacctgaagcacaccttccatgcttttcatttgctttacctctgcatggaacacttttaatctgtctctcctgtgtgaaacttctctgaaacccttaccagctgtctgtgctgctacttgtctgttgtacgcacratggatcacaaatgttggcaacattttttcttcattaactgagaaatctctgaggggcagggtcttatccagttgatctctccagtgcttagtgcaatgcctggcacattattcttcatttgtttttttacaacaaaaaaattgactggggaagatatttctgtttattatacaagaataatgaagcaaagtacttcctgtcctcccttctattctaaaaattttaatgacattaatatccatgccttgcatgtatattacctcattttaagtaccttatgcaaagtttcctagtgagtaagtggtagatcaggtatttggactccaagtcgtgactcagatcctgggcttttaccaccataacactaacttcagggcaagatgaggccaaatatattagatggtgtcagtgaattgatagaaaatacttgttattagggatttctttttatataaaatatcattgctcctggaaatcattttggctgaacatctgtggcattttctgtgggagaaaaatctaatacttttcgtggggcagatatttttgtcttctttgtagaaatatgtagttgaggcccacaacaatgggactggaccataaattatgcttttcttggcattattgaccttattatggtgttataacacaaacgatccaaaacataaaaagaagtaccaactatgagatccataaaaaagtcattttaattggaccttaagtttttcccctaggttaaggctatgaaaaaaaagtgtagtgctagttattgtacactgttagcctttttttgtagacgttgcctttttatacaggcatattttagagatattgtggctttatacaggcatattttggagatattgtcggtttggagatattccagactgccacaatagagcgaatatcacargaaagctagtcacacaaattttttggtttcacaatgcatgttaaagttatgtttacactatactgtagtctgttaagtgtgcaatagcattatgtttaaaaaagcaatgtacatacttcacttaaaaaatacataaccgttgtgctaatgatcatctgaactgtcagtgtcttggggtggctgttgctttatcagctaaatgtatgtagtattggaaatcctttgagttgcttctcaaggatgagcaaagaaagtagattttttagattctaaagaaactatcttctttgctcatccttgagaagcaactccttatccattaaaattttatcatgggattgcaccaagtcagtcctatcttcaggattcacttttaattctagttctcttgatatttctaccacatatgcagttactccctcctctgaaggcttaaattccttaaagtcagtttatttcaaactcttgttaatgtggatattttgacctctttcattaatcatgaatgtgcttaatggcatctagaatggtgaatcctttccagaaggttttcaatgtactttgtccacatctgttagaggaatcactatgtatggcagtgacagtcttatgagatatatttcttaaatagtacaatttgaaagtttaaattactccttgatccatggactgcagaatgggtgctgtgtacaagatcagagctcttggatgactaggtgcattgcaaagagcagtaatattttgaaaggattttttttttttccctgagcagtaaatctcaatctcagccaagagcttaaaatattcagcaaacaataacaatgctgtaaacagatgtgctgttatccaggctttgttgttccacttacggagcacaggcagagtagatttagcataattcttaagggctttaggattttcagaatggtaaatgagcatgggcctcaacttaagttaccagctgcattaacccctaaaaagagagtcagcctgtcctttgaaatttgaagccaagagttcacttcccctctctagctgtgaaagtcctaggcagcatcttcttccaatagaaggctgtttcatccctattgaaaatttgttattgagtgtagccgccttcattaatgatcttaagcaaggtctcctggataacttgctgtagcttctacattaaaatttgctgcttcactttgcatttttatgttgtggagatggctttttgccttaaatgtcatgaaccaacttctgctaatttccaactttttctctgcagcttcctcacctctctcagccttcatggaattgaagagagttagggtcttggctgctgattaggtgttggcttaagagaattttgtgattggtttgatctatccagaccacaaaaacttttcttatattggcattaggctctttagctttcttatcatttgtgtgttcactaggtagcacctttaatttctttgaagaacttttcctttgcattcacaacttggatgtttggcgcaagaggcctagctttgggcctgtctccacttttgatatgccttgcatgataaacttaatcatttctaccttttgatttaaagtgaaacatgtgcaacttttcacttgaacagttagagaccattttagggttattaataagcctcattttcaatattattttgtctcagggagtagggaggcccaaggagagacagagagagatgggtaaatgactggtcagcacagcagtcagagtacacacatttatttgttaaatttgttgtcttatatcggtgtgacatgaggtgctttaaaacaattacaatagtaacatacaaaaccatggatcacagattaccataacatacaataataatgaaaaagtttgaaatattgtgagaattaccaaaatgtcacaagagacacaaagtgagcacatgctgatggaaaaatggcaccgctagacttgcttgtgacagaattgctataaatcttcaatttgtaaaaaatgtaatacctgcaaagtgcagtgaggcaaaacacaataagtgaggtatgcctgtattcattttcatatttttgttgctgaagcaaataaaggaagccacacatagctaaagtgaaagccacttcaaggagacgtcacatgaaacattttgaggagggagttatgtggtttcattgtaacattttagatgcaaatgtgaattgttttgagatcagaatttttcatttactacttttaactattcttgtactatgatgaatgtttagggttagcctagttatacaattcttaaattgtttgaaagaaaagatggtgattgagaattttagtgcttctcctgaggcaggtgattggagacagttgtttgttcttgtgattcataaacgcattttgaatccaactgaaccttgtttgattcactttgagaaattctgtggttgaggtagttgcaggtcataggtttaggtgtaagagaagatttaacaccctgccctgatttcctgggtctgtaaattcggggagctccaatttcacacggaggcctcttaccatctcttgcttcatggtgaatacctctgcatgtgggaaaatttcttcctgctggaatcagcttaggttcrtattttctttttcttctttttttccctggtgatatttttgtggaccctgaacttcaaatatattttttttggttgttgtttatgaaaggtgtccagtaccatgtagatgaaaaatttgagtaacgttcatacaactagagtgttttgttgacagttctcattttgttaatatatatttattgaaatgtaagggttttcatggcctgaaaaaacaaaatatgcattacaactttcctgctgtgtgtgtttatttcagttctgaagctagcctgaaataacctctactttataaggaaattgatgctgagttgtcattatgcccaacatttmtaatacatatacagctaatttgaatgttataagtatagaaaaartatcaggtaagtctgtattcaaataggaatatcaaagtaaaataaccagtgattaaacattccagtggtagtacatgggaaccaagtgagaaaatatgtaagaaacatgcttggattttttgtttgtcttttttttttttctcccacaaatgtggatttaatttgtgtcttatgagtgaaattttaaagtagaagattatgagagctcttcttttgggaattcccctagtaaatacagcttctaagttcactgtttttgttcttccttgagctaatgagagaggttaacatatttgtagtagattccaggttttagaattttttcttatggaagagaggcaaactggaatcccattcagtcacaatatttggttcagtcacaatatttgattagacttcarttgtcttggacagaagtaagactgttctccatattcttaaaaaatggaaatgtgcgtaaattattttctgtacattcactattttaaataattatttccctttcactcttatgctgagctgtatattgtgaccacatggatgaaagtctacctcttttcttcttcacaaggtttccgacagtgagattttgtgagtgatttggtttatttcaagaatggtggaattatcacaataatgtatattttaaaatgcttttgtagttatgcctcagaataggcagatagatactgcctattcatatttgaacttctgtcctgtgaagagctagccccagaagggatcttttgcttttgattatktagcctatatttaagaggtttcttttctcttgaattgttatccccagctacttgttcagagatgtttgtaaatgaagggagtgagtgggaggaaaagcttatgttacttgtagaccagagaatagtatagcagctagaagtggtgtttgtctgtaggctacccttagttgatttgtgttgtcatgcaagaaacattttgatgcatttatttcaggacacggcattttggagacttcattaaatgctacctgttgctgtttgtgatggaatctagtctagaatgttaagaggcagtagaaaaagctgaaatggcaagaagatggcactcttcagtctttaagattcacctgtttgcattttagaaacacattaccattctttttgcttctcttaaaattggagctatttggattaaaattaaatttatcattatgatgtgacctacttggtgtcagttatttttactgtttcttttaatccctaaggtaatcctgtgaggaggttaatatggaaatctgttctgaagtctgtgaatcaaagatgctaaataattttctcatgatcagagagctagtaagtgatcaagctggaattgaaaaacagaacatttaaaaattattttgaaaaaatgtcagatatatgtaggagttaggaggacagttaacccacatatacctatcccatagattacttatggagattttattacatttcctttattccctccttccttttttggagacagagtctcactctgtcgcccatgctggcgtgcattggtgcagtctcggctcactgcaacctctgcctcctcggttcaagtaattctgcttcagcctyctgagtagctgggactacaggcacatgcgaccccacctggctaatgtttttatttttattagagatagggttttgccatgttggtcaggctggtctcgaactcctgacctcaagtgatccgcctaacctcagccccccaaagtgctaggattactcttcttttttctttgccaaagtattttaaagccgatcccagacatcatgttaatgaatgcgcacattttaactgtgaggctagtgtttagaattctgtacctgatggcctaaggtataaaagagcatgacacaatatgaagactgtgagcagtagaagccatattttttctacaacataagttatatatctgcattgagttttcttgatatggttagccgtcatttgccactcatttgttaaaaaaagatcaatgcaataactaatatttattgagtactgactctgggttaggaacagtccctcatattttatgcatattaactcatttagttaacagtagccctgtgttctgtaatcatttattgtgggttccagttgcttgttgaaaacagttacctcttttacataaaaatgaaatattccacattgctttgacttgtggtatcttttccattccttacctttagtaattatgatttgttaaggaatgtatagaacagtgctactcaaaagtgtggtccacataacagtagcatcagcattgcctggaagcatggtagaaatacagaatttcaggccctaccttttgaatcagaatctgcattttaaattaggtctttaggtgatttatatgtatattaaagtttgagaaggtttgggttgcatttaaacagccttgcaagcatggtcacacattacaatcacttggaaaacttttaaagctaccaatgcccagcactgtccctgaacaattaaattagactatctaggtaagcctccagcatctttttcctttcctccccctttaaaaaaaattagattctctaaatgagaccttagtattgttattgttgtttttcaagcatcccaagtgattcttaagtttggccatgctttaacatgcactagttttataggagtagagtatctttgtgttctgttccagcttcttaacactgaagagaacatttcaacttgtaaatcatatattgaaaatgatgccaaatgagagtcaaagatggaagaaattccgggcttatacttagtcttgtgtcggtaattggctcctgatggcataaaaaataatttccttttttgcaagactgaacttcttcattgttcttacctcacttggcagtagggaatgaaagtgcccccaaagtttattgtcttttttttttttgttgttccattctttccttcaagtgaagagttacactgagggaggcagggagatatggaataccaaatggacaaaaactggaccaagaattgttaaataaattcgcatcattacactggataggattctaagtattttaattttttttaaatgttcttctgtttgtgcatggctgcttgattttctttaagttagtgaatttagttccaggcacatactttgttcgtttagctgcatttagtgagtactcagtaaaagcagtcaaaagaatgaaatagcaaaagggaactggaacagtggggagaaatggagtttctatgtgctccttacctttagttgcatatggtggagtggtctggagccagactacctgcattgaatcctggctctgctgcttatttgccctgttgccatggtcaagttaattatgtgcctctgtttcgtttccttccctccctcccttccctcctttccttccttccttccttccttccttccttccttccttccttccttccttccttccttcctccctcccttccttcccttccttcccttcctttcttttcttttctttctttcttttgtctcactctgtcacccaggctggagtgcagtggtgcgatctcactgcaacctctgcctcccaggttcaagtgattcttgtgcctcagccttctgagtagctgggattacaagtgtgtgccaccactcctggctaatttttgtgttgttagtagagaccaggtttcaccatgttggccagcctggctgatcttgaactcctgacctcaagtgatctgcctgccttggcctcccaaagtgctgggaggcatgagccaccatgcccggccttgtgcctccattttcttgtcattaaaacacggtaatagcagctacctatagagttgttatggggattaaatgaattaatatatgcatacagtagttagaaggttagacacatactaagtgctatataagtatttgctgatataattactgttattaaatatttccctacctcaaagagaaagggtggcttatatatgaaagcatagactcttaacctaatggtttcaacatctgagagattatttaggttaaaataggatttttgatcagggaaattggattcctgatttgagcagggatagaaggcattcagaaatatattctgacgccatttactcctcattacattgggaagtgggttaatcagtccatccttgactgaagagggagcaagtaacactcatcacacgtacacagttaaccttagcttgttgaagtatttcagattccttccataagagtcgctgaataaatccaaattttagtctttaaaataattgccttccccaaagccctatagtagcacagttgagtattttaaaaacaattcattagattagtagcattttatagtttcgctctatttgaggaacacctacaggtgttcagttcaggcatggaggaaatggggcaggcaagttagagggcaagcaagggaggaatggagcaataggaatactagaactgtcaaatgtgggcccttcaagggaccctaaagactacatgttagcccagtgcatttatttcccagaagatgaaatggctgaagtgtgaagattttagtgctctaatgagaaatacatgctctatttttacttattttaatgctgttctcattaattaaatacattgatacatatatacacacatatatatgctgagtgtagcaaaaaacagcaacagtaaatattattctacagtaagatatttttgtgtctatttttatgtctcttcaaaattgtgatattaactaaatattacctttttttcacagttgtcttagttcattcaggctactataacaaaaataccgtaagctggatggcttgtaaacaaaaatttatttctcatagttcctgaggatgcaaaggctgcatctttagatcaagatgtaagtagaggccaagtgcagttggctcacgtctttaatcccagctctttgggaggctgggtcggacggatcacctgaggtcaggagttcgagaccagcctggccagcatggtgaaacccggtctcttctaaaaatacaaaaattagccgggtgtttagtgcacatctgtaatcccagctacttgggaggctgaggcacgagaatcgcttgaacccgggaggcagaggttgtagtgagctgagattgcaccattgcactccagcctgggtgacagagtgggactctggtctcaaaaaaaaaaaaaaaaaaagatgtcagtagatttagtggtgtttggtgagagcctactttctagctgtgttttaagggcacttcctaatctcgttcatgagtgtctggcctcatgacctaatcataccccaaaggctgtatctcttaatgccatcattttccaagatgatggttaggatttcaccatatgaattttgtggagacataacatttagaccagagcggtagtgattttcatgcattttcgaatagactgtgctatctattttttatgggtaagattaggcatgtttttgttggcatagaaaaaattgctatgtgaagagagtgactgttatttctctaacatttaaccagaaagcctaaatatgttcaaaagagctcatttgacaagggttctggggcagaagtgttaaaggacaaatgaaacaaggatttcttattcttaattggagttgagggaaagggccaaccttctgtagggaaaatgactataaatggtctttgcagtgaagacatcctctgttgcaacagccacctttttggtcggcttgtttttcctctttcttcacagagtactgctattaaaaacacctttctcttggcacttgcactctaccatttgactcttcagatttttcttgtttctgcataaaattttattgctcttagttttgaacctttgtgcagccgtagtaccaagctctttgcctttttcttcatttgttattcccatcttggaggcttattcactggtactcggtatgcctggaagggttcccttgttttatgccagatgacaacaacaagtgaatcctgctccctagtccttttatagatagcttttgggggaagaaaatttaaaggaaaaaataaaaacaaaaattttattgtcattaccgaagatggaatgacattcattctcatctgatagactttttggtctctgctaatattttttaagccttgagggcaaggattgcttttcattgttttagtgatgtaatattgcatgctgcagtaacacccaacactgaaatgctcttttctttgtttcttcaaatatatgtggtttctgaactatatctgtttttttaaataatgtagttctgtaagtcggctataccagaggacttctgtttctactttttattttgggttaatttatataaaatatatgtgtatggacatgtttacctctgtagatctatccttgagtttgtttataagcattatatctataaaatgtaggtgagaaaatggaatcacagttttcgatctcacagatcactggtggacatagaagcacaaatcatgtcttttgatagaaaatagcttaaatcctgccaaaaatactttgtcttgtaagtgaaagtgcaagggttagatttgactttaagcacatacacaaacatcaatgtttttcttgtctttacctctctgtgatgctttcctcttaggtggcttcactgccctgtagtcatttttttatgctggagcaacaatacccatcttgtagatccggatttaacctggatctcagaataatacctgagatcttttcacaaagatctcagaataagcctgacatggtatccatcagaatcatataatctctcccgaagattctgaacggatcatatgcctactcctggatcaggcaatgtgtccaggtttgttaggccagcctgtttgccagctaatgacagcttaattatacattgaaacattgcttgtttaactcaagtttggaatgaaggaatagctgtatgtcatgttttaggcaaggtttttagccagaagcattgtttctttctatatgaaggttatttctttctaagaamcatgaccaatcacctggaatccaagcccctccgccctccactggaggaaacattgacatattgtctgtgtatgtgtgtgtgggtgtgtatacacacacacacacacatacatacatacatacatacatatgagtggttttgtgtatgtgtgtgtaccattcaagctatgccatagctatgctgatccattttgaaaaatcttcctttagtacataatactgttttagtaacaatgcaagtaaacaattaattttaattgattacattttatgttagttgtttttgggcagcttatagggaatgcctccctaatgctaatgcctaatctcaaatataaacttaaaatcacagttttgaataggctacttcttgaaataaaaaaaaaattcactacagattctgtgtgtgtgtgtgtgagtacatgtacacgcgtgtgcatgtgtgaattcttagttgtttctataagatagaataatattacctgatactgttttgtttttagagttgatgatccttgttaatattttggcttgttgtccctctattcactgactcgtatggaaattggggattgggtagaagaaattcaggtatacacaatatcttatatagtcttcaaaattatcctagaaagctggtgctatctttgagatgaaattcaggtataaggctacatgtacatgacgtagtctgcttaataatatatgataccacaaagccaattgtacttaagagtttttgctgggtcttctttatcactcttagtatgctatttattttgtatttaaaataggtttcttgatataagtttatcccttggatatttaaacagttttcatcaattgataccattatacttctgttctaaaacatcttctaaatatccctgaataaattcttacctcaattttttaactgatttgtgagatttctttttctccattaacctgattcttattgaaaggaatgaactgctattatggaagtactgycaatttcatatcatctaatctgcccatttgaaattgatgatttagtcgtaaaggagtatttttagtttgctttaattaagtagcatggcttgtaatgtgaaagttttgggtactcttgaataacattagattacagaatttatagttctaaaaatttatttaaattattgaatcctaaacatatgcttaagaatgtgagtgaacctttaattggacacttccactaatttgtagcctttccatggaaacatgccacaaatcaataggttaaaataaaacttagtcactttgtaaatagtatagtaagagtttttaaaagtaataatgccgtttaactttcattcttttttgggtatacattactgaatgaataaactctctgttcttcctttttaaagccaggctttttttttttttttcaatatggtataactcagaattcttcacgtttaagagcccagtaaattttaataaattttctaagtggctgcctgcttttaaaataatatttgtcttcattatgttctcattcattgctaatttaatttttaaaaataactttagttgagagattgcttgtccagcagaaatggagctatcctacattgagaagagcaaacctgtgtagaagaatttaagaatatagagagtttgaaagaagtgggaatctccaagctatcattgcacgtttcttagattctagatccttttgtgcaaagttaaatatgagtggtaatgtgtaatgggcagaactttgagctattagaattctcttgatagcgagtttaatgttcatattgaaaacagaatgctgactatcaagttagactcaagcataaggttttggaccccaactttaagaacctatgaaacctgaatctcttccttaggtacaaatgaaaactttaatgactcttattggaagccattgattatatttttgttcttagtatctactgcatacttttatgcttgtactatatactggatatacaaacagagcagttaccacaataccacacagatacacaattctaacaatataatttaatacttcatgattcataagttaatgtattatttgttaggtggtaagtatgatgcctatcaatttggctgaaatctaagcacatcattaatgaagcctagtttgcttaccacttctgtgatttctttataaaatatttcattattcaaggaaaaatacacgtttctttgtgtttcctttcatgggaaagtcatttttactttctaaaaggaatttaatagctgaagttccttttaagtatgctatgaactcagtttaaaaggaataatttaattggcactggggttttctgagtctaggccttttatgaacagatgttagtagattatttcagtagtgaactttttttatatcattctgtggtttaaattttttctgaatatttcttaaaaatacaactccagtgttcaaaagcatgcatgtgaacatgctatcattttgagtgggcaatttatattaccaaattgttttgatacgttgtttactacactacaactattttttaagagaagtgagaaataataatagacaatatttgttgagtgattacatttatctggtactatctcaacctacttttcacataataattttttaaataccgagggcaactccaagaggtagatattgttgtttttccagtttacagaagaagggacttgagtcacagtgcgcagcttgcccatgattgcacagttggtaagtggtgatactaggatgtcaaccagtgaccatcggtttcagagcccactgtttaaccattaaacaatgtgcttctcaaaagactgaaagattgttgagactttcatcaagtggatcaagtagaccaagtccacaaaagtccagtttattaaatagtgttctctgattttgaaaaaagtggaaaaatagtattgtcagtagccgagtagtttttggtatgacaagtaatattgttacagcaaatatgttttgatatgacattatttctgtgtttaatttcgagcctcttaatcatgatctttggaaatctgtgtaaatttaaagaatgataaaatatactaaaacacatagaatacaaccagataaagaatttttagatactgggaatgtttagtcttgcattaaagattatggggagataaggaacttcgtttatttttacaagtatgtaaaatggaaggaaacattttgctgtcttgattatatgaatagattgaattattagaaattgtatcactttactattggagaaatttagggcagtgtgtgtgagtgtgtgtgtgtgtgtgtgtgtgtgtgtgtgtgttgggagtaccgagttaaggggcctccaagaccatgttgaagggatgacacaaatggtctggttttcttttgctgtggactgcttgtctggctttgtctagctgaatgcagccagatagattgtggaaaatgatgtgggaagccgggaaggtttttgagagaggagatagataggagagtgaagtggggaggtaaatgccatagggaatggaatattggggaaaaatacttatagaaaattttaagtatgtttactctgtgtatgtgaaatgactccttcctctatcttcccaagaagattttgtaagaaatgtactttcttcattagtgcttttgaagtcatgttcatgtttttctcaaatgctttactataagactgacttccagaagaaaagactgacttataagtgaaagcacagccaagaaggccctcttactacattcaacttacagatgtaccaattatctgatagtgttttaaaatactaacttagcaataacacattggaggatagttgtagatctctataaatagttggacctagctattcaggcaactctcagatttgattgcttatcaatatttgcattttcttctggattctctatttggctatttgttcataacttttggatataagaataattttagatgataaatatccctttaaacttagtggcacttctactggcagaacttagctttacctaaaccaactccctgtattctaaccttgggaaaacattagtatttataaaacaaatcccacccgagtttgtctgacagaaacagtaattctttataatgtaaatgttgaaaatagtttcctaaaatgtaaaaccacatttacttatttgattgcttataatgagatgattccaatggggtattatagcctccctaagaaataactctggatatgtcaacttcaattatctttgatttgcttgaaaaatttgattatattatgaataaattggagaatatatgcaaattcctgtggcaagttcatctagttgcctccaaatactcatttttaccttatgttttagtaataacacaactctgatttttagctcaacacattgccacccagccagaaaaacctacattttgtagattcctttgtagtcacgtgagtctgtgtgataagttcttttcctgggcagatgttgaagtgctgaatgttacttttgagatgtatccttaaatgtttcttaccctgcttcctagaacatagaattgatggctggagctctggcagccattttagaccttgaggataagattcatactaggcaagcaaccagccttattttgttgttttgctttgttttaggttttcagcagtccgaaaccatggtttttagtttatgtttctagtgatgagcagaaaagggggtgaggaaggggctgtactggcccaaccagaaaccaaaactacgaacccatgactgtattctgttcctgggacatgcctgcatggagtagtccaartccttgatgactttgtggaattgccaaactataggctagattacccactttgacttaatttctgtgagcgggaactgagcttctatcttatttaagtcattgttattttgggtttgtcatatacagctgaattaaattctagcagataccattctcagtgaataggacctttmttgtatactttattggctttattcttttgggcatatttctgcgtcttgaatgagagattctgattcccacatgtcaatgtcagtgaataatgagaaacagcaaaatatgcatgggggaaagagcatgaatctgactttgaattttactgattatgtgatcttgggcaagttattttaccttattgagcctcagtttacttttttataaaactggggttgtactgtgtcttagttcatttgggttgctctaacaaaatgccttagattagatggtttataaacaacaacagtttatctctcacagttctggaggctgggaagtcagggtgccagcatgggcagattctgatgagagcctatttccttcatagatgtgtgtcttttcattgtaacttcacatggtggaaggagtaaacaagatgccttgggcctcttttttaaagacgtgaatcccatgtaggaggactcagccctcatgactcaatcatgtcccaaaggccccatctcttaatacgatcagattgagtattaagtttcaacatgtgaattttggggggagcacaaatatccagatgttaagatttctgtaagtaggactgtyrtatttaatgaaaaaattataaaaccaagagctgttgttttgaatcatgttttgaaaaaatacaaatgaaatatgttgttcttctgcgaagtgatttttataaaagaagaaattaagaagcagttacccttataatgaaggaaggtagccattcagataatttgaagaaacagaagaatttttatactttgtttccatttttctttctctagttcaattgaaaaaaatgtcaaaaatatctcatagggattacttttattttcttagaaatatattggtagatatttttcattaaattatttaagatcagatggagtgagaggtattgccattatttatagtttttacagcagagcaacaagtaagagttaccattttgaaaattaaatctttttttttttttttttttttttggttttgagatggagtcttgctctgtcacccaggctggagtgcagtggcgcgatctctgctcactgcaagctccgcctcccaggttcatgccattctcctgcctcagcctccggagtagctgggactacaggtgcccgccaccatgcccagctaatttttttgtattttagtagagacggggtttcaccatgttagccaggatggtcttgatctcctgacctcatgatccgcctgcctcggcctgaaaattaaattttttggtaacttgattagtaacatcttaattgaaatttgataatttagaagcccatctgccgaacttactccttaaaattaacatatgttgaaatatctacwctaatgttgtcagtacaagtgttggatagtgtatcgcaaacatatttttgcaaatttctgattccttttagtttctggattgcctcccagttttaaacatagggtaggtgatgaaattgttgggcatcaaatgcatttgaaagttgcaaatgcgttctattttcttttaaaattatttgacagactctcattagtgtttgttttacaataacaattgtatcttctagtgtttgcccctcaagtgaagttctccttagaagagaagatcttttgggatcagttccccccattttcttatatgttcactaatcagctggggttaacatttaattattcctcatattcacaaccacttaaacatttaatagagtttttaaaaatccaaacaatgtgtatcttgtataattttattttcatttaaaattctattaccaaaaaagccaggttagccatttgcttataataaatcatgccttcttttaggaatttttagagtcagtttaatgggactcctgagttgacagctgtgcagtctgaattgccttagactctgaaaatgcttcagatttaaaatactaccaaccaacatggagtactgatcttcccacttgttgccaaagaggctagttaggaaaactagggacaggctgttctcttgcaattcaaaactgaacataaactgaaattgagagaaagtcatattaaatcctcatgtctgccatgtttgcagaggtcagctatacaaatatgaatgttaatttgaacttcaagaaaaggacactgctaaaatataatacatcttgaaaatgaagatgactctctacttgttttaatcagaacctcactgatatgtctcagggattaatttcatatatcatatccttaggctgagtgtgttggctcacacctctaatcctagcactttgggatgctgaggtaggagaattgtttcaggacaggagtttcagaccagcctggtcaacatggtgagctctcatctcaaaaagaaaaagaaaaaaagacccttcaagaactcagttttgtggtattaaaaactgagagagagatgtttataataaaaaaaaatacagtcctacccataggatctttagtaataagtaaggacagagcttcaagaaaattgaagtgtttgagaggtataaagtaaagggtttggttaacttggaagaagggaaggaaagaagaaataagattttgtacatttattagaatgctcttctcagtaacttgtattttattgtgcattttaaagtgctttttatgtattttttgccttctgtagccagaatgttgatatgtcaaagatgctggttttgcctgcaaccactttttaatgtctctgatgatgtatctggtgcagtgcttaggagaaagcacttatgcttacttttgtgttttgactgtcttttatacattttatttgcttgctgtttgtcacttattgtattaatctatacattttcttttaaaaaattaataattaaagattatttgaagtttcttcagtaaatggttatacagcttaattttttcagaccacattttactaaaggaggaacttttttttaatttttaaatttttcacataagtctgaacatttgaaaaatgaacggccattcagccagtctgacaataaagataatttgtgaatgttctgtaagaatgtaaaaagatgattctaggtattttatttatttttatttatttgctttttattcttaggtaaaaactcttctcccagtgaattcttttattatttaataaaaaataatgtttaataagttccagctttctatatatgtcttatgttacataatttaagttataatttatatacagacagttttcaacttaagagtcttttgactttatgatgattttattgcgatgtaatgtcattgtaagtagaggaacatctgtacttacaatgaaaatgaaattgaatatattttaatgatccattttatataattgcaatgtatgcattatataatacatatatgcatgtatatttactttattattcagtttaatcaaaagtatatgtaatctctttatatttattgactcctgattgtctttttcaactgcttataattaaatgaaatgtctgtgtaagccacatagaaaagtgcttggcaaagagtaggcattcattaaatgtcaactattatcattagtttagtttttaaatgatacatagtgatacaaagtagtagatattagagagttcagcctggataacttacaaattgattgtatgtgtgtcttcataactaccttgagtggaaagagataaaaaaaaggtaataaattggatggcttggacaaggttgtatgttcagaacctgagctttaccarcagaaaaattgcagcatcatactgagcgatggtatcatttttttggtatcatttttgtatccttctatcccccaggctgaagtgcagtggcacgatctcagatcactgcaacttccacctcctgggttcaagctattctcctgcctgagcctcccgagtagctgagattacagacacacgccaccatgcctggctaattattttacttttgctagagacaggttttcgccgtgttggccaggctggtcttgaactcctgacctcaagtgatctgcccactttggcctcccaaagtgttggaatcacaagcataagccactgtgcctggccaagaggtggtatcttaatgtttagtrttgccttacaatatagagaggcagcatggcttaggggccagaacacctaacaaatagctacagacttcaggtaacttattcagttttcatgatttttaaatatctccttagataaatagggataatactatcaagctgatagggctggttgtaaagattaaatgagataatgtaaagaataaagcacagtgccttgtcacatactaggcaccaaacaaattttaattctcttcctcctaaaacagagaagagaaaaatgataggagtgtaagagaagaggaaaattaaataagtggcattgtgtttacataacttttaaaaaacataaattgatctcttggagtttaagttatacttggatttgcaagctaataagaaaccctgaagtgaaggattcttcactatttcttttctgtgaattattaacgtaagttagaattgtctaatttttgatttttaagttagtctccttccataaagcttatttattttttgcttcaaaaatgtgttaatatttttcaccattccattcaatattaattacattttgtactctttaggatgatgactttgaagttgtttgctgctttcattttaagtacattcatttaggtgaattgccaagtacatttatagtttttatttaatttgaataagatcctttgctcaaaaatgtttgtgctttcattgtattgaattttgttgtgtattttattctcaagaaattttttggatttcagtagtttcacttttcaaaattaaacaaatttttaattttacttaattctgttgttatttcttcagagtgtttctctctgtcacttaggctggagtgcagtggcgtgatcatggctcattgtattcactaactcctgggctgaagtgatcctcccacctcagcctcttgagtagctagaactatgggtgacaccactcctgggagattttttatttttgtagagatgggtctcactatgtttcccagactggtcttgaacttctgtcctcaagtgatccttccacttgggcctcccaaagtgatgagattataggccttttttcttttaaaatgtagtttatataatttactatttctgttctttgcaagatacaagtatcactctttttgaaaacccttgaggtcttgtgtgattacattaataatwtctgtgagtcaagttgatcaatattaagatagaacataaccatcattattattggttactgagaattcgtggtatttcgatttaagccttagttttatagcattgtgttaattatgagaaattcattttaaaaaccttggcagtgaaaggtagaaaaacaggaagttaattatgggaagcttttctttttactaacaaacacaacaatcagtagtactacagctgaagagagtacaactggtatattttagttaaacgaaagtagattttagataccatgataattgattgggttttctctttatttacacactgatcttttcatttgaaatactgtctcaagctttctaggacacggaatacagaattaaaatgttgaatcaatcataacgtgtygttgataaatwcgtactttctttttaaaataggggaatgtgtmgcacactatttttctacaatattttttgttattaagttgtataagaatatcctatagaaacattccattgtatcacacrttagagaacagtgtctctcttggttaattctgactgcttgaccattcttagggagactgcaacaagaatcaaccaacacaacatgtggatatcttttttaaaaaaacgtataattggaattttcacagggccctacatggcagatatatatttttctgtttagctgctttattttcaggcagaacagcacatctttctttatagtgttccaattgtccatgtttaagaatgttttccctgagtcctagaacaagatgagtttatggaactgtgcagtgccacctccccaccctctaccaccccccacccgctttgctttttagtttcaagtgtttatatgaaacctacatcacaacataactgctttagaagcctggctgccacctcttctgaaagattatgtttcttatagtctcttatttatggattattatcaagtagaaagctttgtcattttataatatccccaggaataaagccccttgtaactggaagcaacaggaagtaccaagataatacctgatgtgtagtatcgttttgtttcctttctgttccatagatgacaaaggccttgctatcaaagtacagaaaagggatgacagaggaaggtggggctggggttgggaaggtttattattattatgattattattattgtttttgagacagggtctgctccttcaccctggttggagtgcagtggtgcaatcatggctcactgtagcctcaatagcctaggcttaagtgattcttctgcctcagcctcgcaagtagctaagaccacagacgcacaccaccatgccaggctaagttttgtatttttttgtagagacggagtttccctgtgttgcccatgcgccacaatgcccgaccaggaggtctttgtagaaaactctggattcctttttctgggaagtatcttcctcttgctaatggaaaaatgtttaatcttatgtatataaaatttcacattgcagaaagtatgttttacttgaattatgaaattttttgtgactacaaaataaatgaattttggctaacactttattaaaaataattatgggccaggtgtggtggttcacacctgcactcccagtgctttgagagtgagaggacctcttgaggccaggagttagaaacatagcaagaccctgtctctgcaaaaarttaaaaagttagctgggtatggtggtgggtgcctgtaatcccagctacttgggagkctgaagctgcaagatcacttgagcccaggagttggaggctgcagagagctatgatcatgccactgcactgtagcctgggtgacagagaccttgtctgtgaaaaaaaaatctgaaatattacatgtaaggggattttgtgaacattctatatgctaggtattgtgataaaactgtaaccaagtatattgtatatagtatggaatgatagtaataccaatatctttcatagagaagtttctcctttccagttttaaaatttaggattactttgggtcaggtctattcatctttgaagaaaataattttttaaaattccattgtataacatgaagatttttgtatgtgaaaaatacattaaaatcttgataaataagttttaattttacatttcaggccagacatttgttgtatgaatctatgagagcacatacaggattccttgtcatatgtggacatgagtcattataaagtgtactgttaaattgtttggaggcacacccaatagatgaaaaggctaaaaaatgtaatatgtaattatgaaattctcccttgactgcttagtaaccattatgctttctttatcactaattatttcgggtaacagattcaataggtttacaataaggattcaaatcgtgaagtggaagattgtgtcttttactgaaacctaacttaacatggaattggagtataaatagaatttttataaaagagaagtttgtccttaaaaaagcagtgtatacttcagtataacctccttggttactttggtttgtgttaaagcattcagtatggtattcgcgctggaggaaggcttcacatactaggcaccaagtgttccaagtgttggccacaagtacatctggtagatttagaaacatccaagaaaatttccaccaaaaactgttttatacttgaccatgttttagtgtttttaacactggacttatgaccagttgtaactacattttatagtaagaatggcaaccatttgttacataatcaagataagtaatttgttaagcmaaaacttttttagggagttaccttctttatctgtatatattagagtttgactaatgaagatttattttcagctgataaggtcagccaactatggtgacgtatctgatttgctaggtttttgctctgccaaaccaccttctcagaattgtttcgaaggtaaaagctcccaaatacttgacatatggcagctattctcatttcaacacattctgtgtttcagttcctgcagaccaggaaaacttaatctgtaatcacaagtggagctagggcaaacatatcttaccctcagacattcaggttttccacgtaaggtagggtcatttgtataaatacactgtaccaacagaatctgttttttttttttttttttggttcaaagtgaaattagtgcagtgattaatcccattttagagtctttgttcagcatgattgaagtttaatgtttttgctaggaaaaattacttggtgttttgatagagctgtaacacctacaataccaccagtagcattggttcttgagaggagacatagcatgcattccctcagatataatccttcaataaatactactgaagcagctctctaccaggaaggaaaacagcactcatcctcatcctcccgtggactcactgtttttgtcttgcctattctgtgctgtaattctcacatcttaactaaaggagctaccacaactaaacaaacagacaaaaaaaaatcagagtataccttcacaaaataagcagtctatatgaaataagggagttgcatttggtttttttgtcagtaagtctgtaatgctcgatatatcaactttcagaattacagtaagtcagagcaaagagaatgaaatctgtagctcagcttgtttatttttttggtttgcttctgctgaattttgtttcccccaagtcagaatacgagtctttttgtgttctctctcttctcttattcttccgagaagtgaaggtggtgggtgtacagcccatatttgtttactttttctgtagctcatatatctattattactggtggtttcttagtggaaatttttctttcactctcactttggctttacctccaagtgctttcttctcttggctgcaattgagcactataatttgtggctttccggagggggagccttggtggtcaggtggaggaggcaggccacattccaaaagtggagtggtaggtgttccagacagagtgctgattcaagagtgagtaggggtgtagggtgaaagttggctactaattcaagcctcacctgaggcagtgttgctcaaacagaaaagtgccctctctaattagctgcccccatatgcgcttagattaatgacagccaactaacttagaaaccccttccagagtaagctagccaaacaatagatgttccatggacatgacaaagagctaattttcttgtgctaaggaatttttagctcttgtatttgtggtggactgcctcatcacctaatgaaggtgaagtacattctccattttaggaggcagagttaaaacattttcctcctgtggatgtctgattagaaaaaaaaaaaatctcctacttcactgtacctttccagcaagtcttatcctctcaaagcactgtgtaaagctttgaaattaactggttcagtgagtagattatattttggtactttcctatttgtccttaaaaacattttctgactgttggatgtaaaagaagatattaatgaaaggttgaaacttcattatcattgattctttttaaacacccccctccataacctgctgttttctgcatttgaaataggaagattgtgacaaatgatttcattctgaaattgctgttgaatagaaagttttgatattataactctcattcaattcaaaggatatagatttcatttacctttatataaaaaatggtgatagtcatttttcctccatatttgtactctgaaagaaatatattctaggctttctcatcagttagcctggccttaaatgaaatcatggaaacaaataattcacatcttaagtattttttcagttttctagaaaactttatgattaaaagttgctaagttcatttcacatttttcccaaggtgtgaaatacaattctgtaaagacatttccataaacaataatttatggggtcacactgtgtggtactttcaaagttatgtggaaagtgtttcttttgatctcctctgaaacatgtgactgaaagaataataccttttgtggtctcaaatatttcagttttcagtcgtgaactttaaaattcacatgagcaaaaagaaacaccgcctgaaaaccaggcagtttttcttccctagatgcccagaaacattttgagccattccaaaccactgggatcatttgctctgatttcagataagcagaataaaataaacaaactcttgcccatgtgggaagtggttctgctgtctcttgttctaaccctgcaaagcctgaatgtctccccagcatctttgaatgggtctcattgtttatttattgtgcttttcacaagtgcttgtaactgtacccttgttttactaatagctttcttctaaagtgggttgacatttcagttaattttcagtgtcctcaatgtttttccttaaattgggccagactgactggcctgtttagttagtctcgtatagattgtagcacataaaaataaggaacatttattagatatttttgaatttgttttcttctttaagaaatgtcaggtcaagagaaatttttctttcacattcttcaattatttgtgttgataaataattgaatagaagttttaaacctgtgactatcctagaagttttaagtttttacattaaaacctattagatatgtaaatgtatacatttttattcatttttgaatgtaattctgtttaaaatcttaacatgacgaaatttaggaaattgttcgaagtcttgtctagatgagcaattttgaacactttacataacattcagatttttattgcatttattttaaaaacatacataaaacctttttcatctgtagaaataaactagaaatgaaactacagggaatattgtccttgtaccaggaagtaaaatctaccaactgtaggtctctattggcacggaaatgggcatcattaggcaaaacccagaaacaggttccagtacatagtgaaccttactgaaatgaagaaatgacatttccattaaataggaaaagcatggattattcagtaaatattatggcgtggctctcaccaaagatagtactataaggaaattccaagtatagtaatagcacaaatagaatcaaaaaacaatttaaataaaaagtattaggaaaaaacataagagactattactgaaatatcctgatgaaagaggtctttgtacacatgttaagaaactttgattgataatgcataataacagatttggttgcataagtaaaacattctcatttataaaagacaccataaacaaaggcaaaatactagcagaaaatatttgcaacaaatatggtgaaaagaaggttaactaatatgtacagggcgtcagcacattaatggaacaaaaaacagttttgaaaggacatgaacatcagacaaattgcaagtttgaccagtgaagatatagaaatatgttcaacattatgagtggtcatgataatacaaacaaaaacagtaagatgtcatttttatcccatcaaattggtgcacttaagaggacttccaattgccagtgcttctaagaatatcagatagttgacatttttatgtactcacgataasaaggtgaatgaaaaatgtactttttgtctcagtgatcctatcccacttctgggaatccatcctatagagaataccaatacatagagtacgagaatgtctattgttaacaacctgtacattgtgaatataagttaattgttaaagatgtatttttatttgttaaaaatatcagtgaaacatttttggattacatatggtacattcaaactatgggatgtcatgcagctatattaaaataattggatcaccgtacacttgggaaaatgtacatgatatttttgaagtgagcaaagaaagttgtagatatgtaggtacatataaatatatggtcatgtatttcatataattttgctgaaaaaaatacaaaaatgcatatgtttgtatatttttgtgtacttgtagaaaaaataaggatatttccctagggtgagctagtgtatcttgctggagaggtggatgtgaaatgaatatgaatattacatttgtcattttaaaagtatcagtagaattttacatataaattttggccattttactttagggaaacatgctattttgaaatgagtcagaattacacattttttgaacaatgtattactgaacctagaggtaaatatacagaattacagaatctgtccttgtatttccctcgcattttgacgtagtcacagtggagattgaatctctttttgatgatgaaaaatttgtctagagttttttaagggaggtatgaattttgaagtagaatatagctttgartgatactcaaaactaaatttaatggccattcccaatttttaagcaagacatacattcaaccttaaagttttcaacttgattcctgtgctttgttaataactctgccttagagtaattagggagtctgaattgcatttactcttaaaaggcagaggttggagccagaaacttctgtcttgtcatgttgtattctgtctggctgacatggggccaaatcactcttgtggttctgggactcagtttctccctttctcaattggaatgataatattgaaaattaactggttttttagattagtttgagttctgcataaaaatgtgctgtagtcccagctactagggaggctaaggcaggagaatcgcttgaaccaggaggcggaggttgcggtaagctgagattgcgcctttgcactccagcctgggcaacaagagtgaaattccatctcaaaaaaacagaaaagtgccgtaatggcagccttagagatgtcatgtcatgttctgttaattgtcttattattgaatgctataacaaacttgttacagattaacagtcatcactctgtaatagtgtgctaacttagaaaagtttatccttgctttttgaattataagattcttgtaataatatatcatcgcagtttggtcttttcataatgttaaatccagaaggaaccttgaagatgaggatgcatcagcattttaaagatgttcaaactgaggtgaattacttgtccctggttacacagctggctaatgagggagctkatgcttgatgcttcatttgagcaacattctggggagtatttctggcataaaaccaatttacaaatgagattactctaaatctagtgctctatctacagcatttatacattttgtttttcattattatcaaatggaataaatatttaaaagtatacataatctctatcagtaaaactagtatctaaaaaagtataccctttagaagctgtgtagctttgcattcatttttaatttttttcttcgaaacaaatttctttaggatattctataaactacattaaatgggtcaatttttgcagaargcaaatataaataatatttacttatttgcatattttattttaattagatcattatctagtaatttcctttaactgtgatttttaaaattatatatatatatatataaaatatggtgctatataatactgctttaaaagctggacgcggtggttcacacctgtaatcccagcactttgggaggctgaggcgggtggatcacgaggtcaggagctaagaccagcctggccaacatggtgaaaccccgtctctactgaaaatacaaaaattaaccaggtgtggtggcaagtgcctgtaaatcctagctactcggtaggctgaggcaggagaatgtcttgaacctgggaggcagaggttgaggtgagctgagattgtgtcactgcacttcagcctgggtgacagagcaagattctgtctccaaaaaaaaaaaaaattacatatatattatatataaatataatatatataatatataaatttaatatataattaatatatattatatataaatttaatatacataatggttgttaacattacttgtgtcaaggattatcaattgaattgggtgattcataacacagatttcattggaaatgtttgagtagggagggcctaatatttagcaggtagtatcatgttatttgacattaaatcaattgaattttgtagtttcagtaaacacaatgtgaatgttggacatttgaagatatgaatgctagtttgtatgtcagtgtctgtgtatatgtatttatataaatgagtcattttatatacaaatatatgcatttatgtaaatttgtaaatgtaagtataaacatgtttactgtcttggtgtttgagatgattccatttgtggtgaatgatggtgacttctgttttaaggatgtttggaatgatttaaagtaaaatcctgttcctaaatctaaagattgtgataattttagatgaatacttttcccttttcattattattttttggtgtctaccagaatatttatacatagtgatagaaacagtgattttttttgtatggagagaactcagaattattcagagatattattattttgagggaggcagatatacagtacaatccagaatgacatttaggactactatatgaaatattacgtggcagagtctcgttctgtcacccaggctggagtgtagtggtgcgatcttggctcagtgcaacctctgcctcccggcagagcgattcttgtgccccagcttctcgagcagctgaaactgcaggcgtgtgtcaccatgcctagctatttttttctattttttagtagagagagggtttcaccgtgttggccaggttggtcttgaactcctggcatcaagtgatccacctgcctcggcctcccaaagtgctgggattacaggcatgaaccaccacacctggctggcaaaaagggattttaaaattaatttaaaacattaaaacaaaaatggttttatcactatggtaatattaatggtgttgcaccggtaggttgctcacggtttatgtttttgatgtgatatttgtcctttatgtgttaggaatacccaagccaagatgtgtgactgccaatttttgatcctaatagcttttctgactaaacctgttttatagctacyatgatcaacatcttctggataccaagtgtttatatgggtagcttgacttgagagattgaaatgtttaatgagtggacattaaccttactaatttgtatctgttaagtgaagctaatttgtagcttatttgtctgatttgtggtatgaccctatttgtggtctgacccaaattatttgtctctctgaaatagcagtgtgttagtctgttatctgcttatttacttcctccaccccgccttcttagtagactatgtttctgggaagcagaggctattatattgttttaattttaaaagatttttatgcttttaagagattattatcttgatcacctttgcaaattcagtgccaagcatgaagctgggtacacattcaaaaaaagtgtgttcaaagaatgccttttaaagtagctgtaagactatgtggcatgctggtccttgatgatatagggcagacagtgtaaacatggccttacctcctaatgcttatgacctgatgaaaataagttagacattttataatggaaattataaatttatttactcatattcatttcctgaggctctgtayatatttggtacaatgggggtatttaaaaagacaagtgtctgtcctttagcattccaaagagttagaggacaaaactgtaaaattctggtatgtaatatttatttcttataaataaatacatatatacacatagcagtcatgtgctgcataacgatgattcagttagtgacagaccccatataggacagggtcccatatgattataatggagtatatttgagccaggcatgatggctcattcctataatcccagttacttggcaggcagaggtgggaggattgttcaagaccagcctgggcaacattgtgagaccctgtctctaaacaaaaaaaaaacccaaaaaacaaacaaaaaaaccttctgtcattgtccagcttctaagtcttcagtgttttttcactgatctcagaacaaggactgcaggactaatggggtcctcaagccttgcatctgtagcctggaacactctaatgggctgtatgtagtggcttatgcctgtaattccaggactttgggaggctgagacgggaggatcacttgaggccaggagttcaagaccagcctgggcaacatagcaagaccccttctgtaccaaaaaaaaaaaaaaaaaaaaaaaaaacgatatatggcacttgatattgacattgcagatcaattaagagaaattattgatattcagcagtggtgctgaatatcatagttttctatggggaaataatatatacatatataccatctaggtttgtgcaagtacactctaatgttcgcacaatgacaaaattgcccaattatacatttctcagagcatatccccatcataaagcaatgcatgagtgtatacacacacacacacacacacagtagacccttgaacaatttggggacttggggcactgacccctcatgtagtcgaaaattcatgcataagttttaactccccccagacttaactactaatagcctactgttggctggaagcctgatggataacataaagttaattaacatatactgtgtatgttatatgtattatatataccatattcttacagtaaagtaagccatakaaaagaaaatgttacgaagaaaatcattaaggaagagaaaattactatgcattaagtggaagtggaccatcataatcatccttgttgcctttacattgagtaggctgaggaggaagaggagagattcgtcttgctgtctcaagggtggcagagaargagtakgtakaggaggtggcaggggaggcatgcatactctgtataacttaatgaaaaaaattcatgtataagtggacttgggaagttcaaacttacgttgttaaagggtcaactgtaatatatatatatatatatatatctccctgcttggtataggtattgttagttaggtgtctttacatcaagatttctttgtcttagaccaatttaaaaggaaatatgaggctttggggtcctgaatgacattgggctacaycttagggactcttgagtctatctgagggtacatctttctgtaatgctggcataaggagctatgagacccattagcttattctgaccctaggatatatataggagaaatactacagtcctaggtctttggaactgagaggaatctctggagtcacttattggaattgcctattcccactgagaaagccgcgtgagaattttccaggggacacaaatatgaggagtcagtttaagatctgattccctgattcctggtcctatttctttgcatcaataatgtgccctcactcctgatacagtggagagcaaagtaaaaacagctaaactattcaaaagaaacaataagaaaacattataaggcatgaaaacccaatcaaacagttgtatttcaacatgagagaaacagtttgcagcagattttcagtttaaatacatgtttaatttcatgtttaaatgcaagccaaatctcagatttaggacaggggatcttcattatccagatgaatattcctgcataaggaagtagggaaaaaggcctgtagaaacctctgtcatggtaggttatatgcagaatccaatgccagcagctggctatatgtgtctgggctggcatggttgactctttcccaaggatggtcatctagtgggttcctcttcctgacatcscaggtacaattggccatgatgccctctgcatggtcaaactatatgtttcctaagagaccttgggcccacttctgtcaccttacatggatctgttaacattacactggataggttaagcaatgacctgtattatgatagccagttcatgatgtctatatagtaatctcttaggacatggtaaatgattatgatcatcattagttttgccccatgtgtcaggttcttcatttaaattggaagcttattcttatacttactacgtgctaggcacagtgcgaagagagataatatttattttcatctggaattaatgtcattctaactccaaaagaaatgactagagaagattagggaagcccagacaacttgtcacgtagcagtctcaatcaaaattcattaaaaagaaaagacgattataaatgaggaagaaagcaatatataaatatttcctgttttatcattatgtattattttatttgctactgtctctgaaccatggtattttgataggagttttataagttcctagaatgatattgtactcaattgtgcatatattaaaactttttaaaagaaacctcttggtgttttaaatacatgttatttcaatgtattgctatttaacttcagagtatttctgcagtggtttgatggcagattggtgttatagaaggggccactaaataagttagcagtgttttactgtgagtcattgactaacttcagctataatcttgagtctcctaacttttagatgtatgactttttagtttatcaattataatcatgtatgcataaatgtaaacttttgcacgtctgtaataaatgaacttttattttaaaaaatgggaaacagaaacaatctagttgaaaccctcaggaaagtaagcctgtgataaaacccttaaatgacataacatactcaccagaattaataggaataataggaacatatgggattccacctttaaaaagagaatggacatattataattacttatctgattatttttgaaaagttcagcttaaagcaaaaaagatgaactggtttatcaaaatatggagtgtagtagaataaaagtagttcatctttatttttctttagctttctcatgcatctgttaaggagcagtaaaatgaacaaaagrtactgtgagaaatctggactgtggtagactctagatgaataatctgaaaatttttcacatacaaaatacttatatttagttttaaaaacaaacataatagcctctgagaaatggttaactttctatgttccactgtgaattacataccaatagaaatttaaaatgctttaaaatttgctgtaatttaaatctattgaattttatttgggaaaattacccccttttataaggttggtaattcttaacaaggttaggaaattccttttgtgctaccatttaggaacatgtttaaaatgcatatatataattctaaggttaaacagtcaatgtgactctcttcttgacacattttgcttgaaagacctgtaatattccttcagaaacaacaacaacaactccagcttattttcaaatctgttacaaaagaaagcacagaaggaaacattcttgaggtcttacagttccaaagaagtttatctaaagttcataacttgttgggtctgatccattggaataaaatatctcactctctagtgttaaacttgcagaatgagtgattttctttttaaactttttacactttcctctgggattccaaacctgttctgaagagaaatcataggagggaatggaaacatctttaactcatgacagtaggtaatgcctatatggcaaaaagttatttgtaagtttgctaatcatctggttaaatttattagtgttgacagctaaaagctgtaatttaaatcccaaagagaaaagtttgaagcaaagtaataataccaaagaattgccaagtccccattttgtttcattctgtctagacatggtcttaaatcatggagtctacagtaagattttgaatgacagtgtccagttttccaaaaagaaggttaagaaaatgttatttggaatttcttcatagtcttagaacatgcgtgtactaattttggaggtttttccacctgtgtaagctttatgtacaaaatagaaaatagatgaccgttttgataaaactcatttgcctgactattcataaaggtgttgaagccactaaaatatgagtgaatatactttcttttttttttttttttttttttttgagacggagtctcgctctgtcacccaggccggactgcggactgcagtggcgcaatctcggctcactgcaagctccgcttcccgggttcacgccattctcctgcctcagcctcccgagtagctgggactacaggcgcccgccaccgcgcccggctaattttttgtatttttagtagagacggggtttcaccttgttagccaggatggtctcgatctcctgacctcatgatccacccgcctcggcctcccaaagygctgggattacaggcgtgagccaccgcgcccggcccgagtgaatatactttcacaccaagtataccagtagccctttttcttaagtaattgcctattgatcccatagctttaccttgtgtataaacattaatggacattttgtattttgggacccatgactatttaaattattttaattttttttttttagtggtttctggtgcaggaagcgggtgggtttcgcaatgtctgtagttatttttcatcgctacaactagcaagagagtgctggtatctagtgagtaaaagccagagatgctgccaaacatcctacaatgcatagaactccccccacaacacagaattatcaagcccaaagtgtaaataatgctgaggttgaaaccctgccccagatggaaggaaccttatttttctcctctttgccatatataatgtattttttatgattaaaattcataaagcatactcttagaatatactaatattagagacaaatataggccttaatawtaaatgattaaattaggtacatgtaaggcatgaaattatagcatctacttgatatgtggttataaaattataatactgaaataccccaaggcaaacaaataaatagagatttggtaaaacttaatgtgtgtcatagagttacatattgctggactggaaggagcctaatttgatggttcctaattgggttgatgtgttgatgagcatcagtgcttcagaattatttgatgagatacctagttcaaagatgaatgcttggagtcccacgttagtactggattatgaaggcacaaggtccaagaagtactttttataagctcactcattttctgtaactgcaaatataagtgattcttattatataagtgattcttatgacctcagccaccatctccattccacttcttctgagatttactgttctatctgtattacatgaaggcttgatgatgttgacattcctcagttactattgttagtgaactaaaaaagcggatcattgtttcttccttattgctttgttaagattgccttttaaatgtgaaaatattggttttcctatctcggtacattcattctccttacataatgcctcctggctgtcttctgccaggcccgttcctagtgtctgatgatacggatattgtctctgccctcatggagcaaaagagagatagagaaaaaaaataagcaaacaataaagcaaagctgtaggagtcttaaaaaatggagcagaacattcagctacaagtggcctagcaatcacatggttcagctgagacctaaggagttgaagtgacttgcccaagttcacctaattacatggctgtggtggaggtgaagggagggcgtgggcctctggatgtctcttctctcattccacactagaagacatgcaggtggggaacaggagcatcttctacatgtggaaaaatgtgagggactggcccatgtgtgttataggacaagttgataccaccgtcaagcctagtggaggtaagggaagttgtgggccattccaaagacatgtgttcactccacccttcacactcttattggaataggtaaacatcaaagagaaagtgaccaatatttcttcctttcttacaaggacacagccatggctgggctggttggtattcctttaaagtctgaagaatcaagagttcctgagcgtgtcttattccctgtcctggccactaggcagtcagtggctgcccaaattgtgttatggaaaagtgaagcatgggaagacagaaaaggggggataatattattacctgtgattgagcaagcaggtaaaggaggagaaaacgaagggtaggaggattcaaatggggaaaagggcatgttttccatgctgctttccctttcctgctgtgaacttcagaatgcacttgcccattgaccacattgtgagtgtgggttatgattctaggccagcttcccagaccttacttcaccagtcatgcattctctgaccgtaacactaagagtacaatggtaccaaaattttaatgtaacattttgaaatagtaggtgagatttggataggatggttagcaagttggtttatcaaacttagcctgtaaatgaccacacaggtttggaaatagaaaataatttacattatgtgatatagtacataagattgtcatgtggaaaaacaatacaaactagattgaatattcaccatatgagaaaaacactttcttcccttttgaatcacattagcttttaagaatcttcaaaacttttcaggaacatgctatatccacccaaccccttgttttttggttaattgttgtttgccctatcctaaggaccaaaagctatacttacttccatttagtttgtcagtcttttaaatttatttttctaaattgagaagagcctgattaaggagttctgtggcaatagaaaatctctcttcaattcattgccaaagcatagaggcttctgtatatagtatttaaaagtaragctctaaagtaattatttccttggatcctaagaggactcgtgttagtgaaagcaaagtgggacttatttcgacccacaaagaagagctgatttagaggccatgtggtgatgccatgggagaggcgcatgtactgctggtttaggacgagctcttctgataagctctcagctgttacaacagataagagaaaattgatagtttcagaaagcaatgaaagtcaactaggactacagataaacagcatctatgattcttttcaaatgtttgagtacaaaacacccatattttaatttaataaacaattactggagacttactatgtataatatgctagaaatgttagaagctctaaaagaatgataggacagagttctgcccttaaagactttagaactttttagggaagagtcaggtcccactataggggccgtgtgtgtgtgtgtgtgtgtgtgtgtgtgtgtgtgtgtgtgtgttcatgggctcagtgcagcctcgaactccccgggctcaggtgatcctcccacttcagtctctcgaatagctgagactacaggagtacaccaccatgcctggttaattttttatttttgtaaagatagggtttcgtcacattgcccaggctagtctcaaacccrtgggctcaagggatctgcccrcctcggcctcctaaagtgttaggattacaggtgtgagccactgtgactggcccatgtgtgttataggacaagttgataccactgtcaagcctagtggaggtaagggaagttgtgggccattccaaagacatttgtttactccaccattcacacactcattgtctcctgcatatcactctgtccaagtaatcagcctgtgtttgctattacagatattcattcaagtattttccttcctttttgaaatgtcctggagaacaaggatgttgcgttattaatcttattctcagtgtttgtcagtgtctgctaaacatttgttagagttaatgattgagtgaataatgcagggattaattcrtgaatgctttgtgaaagcaatggagatatggatgtggaytggtagagtggaggaccttcctctaattgwggcttggagtggagggcagaggaagtactccagagctggaacaaggacatagtgatgagcataccatgtgttgggaaggcaatcctcagattacataataaattagaatgcatgccaatacagactccttaggttgcaagtcataggaaacctagctcagagtggattaaacaacatcacacagcaactcttgacttttttcaaatgaagaattggccccaaagattactcctattagtgaaagcaaagcaggaaattattttgacccacatagaagaactaatttagttgatttagaggttctaattacgctaagtaactgaataactgaatagcctagttaaggggcaaaacatcaggtacagtttgcagcagacaatcaaataatgtaaacaatcctggttattttgctctcttaggttctgcttttcctacattgtgctttcctacttacgatggcttcgttcttatggtagcaaaatggttatagtagctccaagccttgcctgttcacaccaaaatacagtggagcttgctagctccaatgtctcttgcgtctgaatgactctgattttatttgcatgcctcaaaaccaatcactgtatccagggagttgggttatgtcagtctggccccatgccatgaggtggtattcattgattgcctccaagccctgttgttggtgctggagatgatgtttaagttgyaaccacatacctgtacccttattctggcactccctgtgttccttctttgttttatttttctcaatagcattaactgccttctaacatactatttgactcttgtactgggttgtctgtctctccttgttggaatgtaagcttcacgagggtgtatgcatttttgcctgttttgatcgctgctccatccgctgtccagcatatgtagggactctaaatatttgtttacatgaatgaaaaagaaacaagattctgactttcttaggcttacattctcatgtatttatattatttaagcaaggaaatatttatattaattaagcaagaaaataccagttactgataagtgttgttaaaaataaaacatggtgatgggaaagcaaatgtgaagggtggtttaatgtggatggcaattccacctcagttgttgggccattaacaggagcggaatgggtgaccaaaggaaattcctgggactgcaccagataaagtcaaactggagatagaggtaacagaaatgatctttcttatagaatgcatcttatgacttaatcaaactagaaacagttatatcctttagagaaattactattttcaagatttttgctagctgcttcttggcaagttttgtaaacttttgttgacttttaactttatgtcactcatctcttaaaactgtagatcacttttgtcttgctaggtrcaatgttggtgtcacacagtcttcattacrtgcatgtgggtggcacatttctgatgtcaggctagcttccttcctaacacttccttgcaccattctarcagcatgatcttagggcatgtaagcccattttaatgttagtcttaaacatctgacacacacacacacacacacacacacacacacacacacacacatacacggacattttgggattatagtgatattgttaaattgaatatataactggaatcaagtgacatttgaatgagacagattcacagaagtcataggctcatatttgagggtagggagaaatttaatgtaaaatgaaaggtaagtttaaaaacaacctcacatatatgcatatattatgtataaaaaaatctatgaaaatgtatacactaaattatatatgtttatacataagagactggatttacaatctttgactcattaactcacctgataattaatcatgaaatgattaaattcagaaagggagttttattacatgaagttgctcattgcaggtttcactgcaaaatgaggaaggcaactggaaacatctgaagtgtccaaaaagagaatagcggaaatcataatagtctacctcaaatgagggtgattgtatgctaagcccattctataagaaggcaggtagaaataaataagcaagtggataaataggttacgcatttgtggaatattatggaattcttaatgattttacaaatatgtggagcatgtggaaatgttatgagatgccaagtgaaagtgcagaatacaaaactataagcaaaccatgattacacctatatgtatatatgtattctgatatacagatatgaaggaaatgtgcaaaataaaatgcarattttatctgtagagttatttttgttgtaacttttcttttgagtatattttaatgtagatatacatagttttaatgaaattggaattacatttataatgggtttataaaagatagcagaccagtgtcatttttcttttttttaaaattgaaaccggtaagtaagagcttgtttttttcctcctacgcagttggagagtgacagatattgctgatgaccctcactttcaggatttctgtcttgcagccaagttgggaggaaatgtttcgaatcaaaaaggggaaggatgaagagactcaaggcacttcattttgtgtgtgcctgtgtatatgtgtgtgtgtgttttctagggggttaacacattgccccagcttggattatttctatcctcagaacagcatataaacattttttggggggaaaaagttaaaatatttacacagctgcttcctttatttttttttaaatacacagataatatttttactacctcatgaacatcatcatgtctttgtaactagcatgctaaactttatttctccttttggtagcactattttgttattaatcccttctgcccttcctccttcccctccttcccgttgttccctcttatcccctcctccgaccactcccctccccctcccgctcccttctcccttctcctcccctctcctttccttcttttaaaaattataatctgttaatttgtttgaacctagggtgcctgaaaattcagataacttgagagtaattaattaattccacattagtattccaatgcatttgtaatgacagccttgcaatttttggggggtaggtaaccattaattttgcctcagtaaaataaatggcctttatgtataagctaagacttgtacaaaagtagattaatgtccttcacctgtgactctacaacaccaattcattcactttggtttttcagccagacatctggccattttagtgatttattgacttaactgattmatttggtaggggaggttaatactattgtgccttcagatatagccttaagtttctgtcaccaagaggtgatggcaatctaacctgttggcctcaggatgtgctttgccttccctggattcctcagactcctatttttatatcagattctactttggttgctggcatgactttaagctggcagggcaaagggctttctygaaggtgactgtctcctcaacctgtctgacttaaacggttgggtcaaggaaggaaaaaaatggtatgatgcagcaggaattgggttgttgaaaactgtattttatttgcatttcttgagtttgcacagaacttaagttaccagcctttgattagcaatataaatttaaagtttgtcttgggcaaacttactgaaaactcctttaggcactttcctcacatcaattaaaaaaaaaaaaaagagaggttaatagaacactagctactattttgtttcctttttaatgccacgtgatctgtataccttggaaggcagaaaaataattttatacttgtgttaattgaaatagcgtctttcttgtcctggctgtagaatgatggtgggtcctttaagcagaggactttgtgcrcttgaatgggagcagaagacaggctgctcagggtgtctgaacttcacactcacatgcctagagttgggctgcatatctaaggaaattaacrtgttgccactgttttgatcagaggcttgtgtttctatgctgaatattttcaaaacaagaatgttgtcaagaagtaaaggtcaacatcagttctctctaaaggcttttaatttctatwtcttttggtgatgcactctaaatgtacacattaaaagtgttatataaaaatgaatgtgactttttaagttgtgtttctaatgcttaagtatgtataattaaagtaatcaaaaatgtaagatggtggctaattcaaaaattttaagctttgttaaaacaaggtaaattagctaaggtatttctgctagtaactatttttttttgtctgtcagttactgggtttcagaaatgaaatacagatttgagaatgaccttgttatttaatttttaaacattaaaagtttagtaaacatagcctcacattactatttattttaagagaaaaggtatattaatattacacacatactttttttttttttctgttgtgcaatccaaaacctgctggaaagaatatatatgcttttcatcaaaaaaagttaacaacttttaaaatcctacaggttcaagtcccagctgtcgaaaactgatcctgggctgctgcagctaatgtactttcttgtgagaggctgaactctgtcacaggtgacagctgacccacttactcagaccttgataaaggatcaggcttcttttataggccttcagattctcctgagatggtctgtcatgtccagctatggatgctgaagctgaatttcttatacttaattttttatagcatttgtgtaaactaycagttttggaggaatggttaaaattctgacacagtggcctgtgagagtattttgagttccattttgaaattatggctagcagatgctatgagtttggttatagagacccttaaagtgtgtaagacagtttttgttttttaattagttgtttgaattttattaacgtaattaacttcataacttccatttgtgagattccaggatttttctaccttcttggtaacttttcagtgaagtagatatttccaggtgcaaaactttatgacctaaataatttgtaatcatttccatagtatatgcaagtattttaaaggagtcgggtgtctcaacaaaagccacctaagattgtggttggcatttgtgtttatttgccttaacatacatatttatttgctttagcatattttctctaaagcaggggtcccctgggcctccgacctgtagcagtctgtggcctgttaggaacctgggcacacaggaggttagtggctggccagcaagcattactacctgagctcctctgccttctgtcagatcagcagtggcatttgattctccttggagaacaaaccctattgtgaactgtacatatgaggatctaagttggatgcttcttaggagaatctaacaaatgcctgatgatctgaggtgaaacagtttcatcctgaaaccatccatccacccccgccttgtacatgaaaaaattgtcttacacgaaaacggtccctggcaccaaaacagttagggaccactgctttaaagtatatgtgcttttgcattgcaatttaggtgtaggagtttatgctgtttttgcctttctgttttcattgtgtaaattatcagccaaaacttttgtcgaatgactgcaaagtcttggtctgtgttccctggaccggctttgtggtgattcacactagtattgattaatggcatgattcatagcagcttgcattgataagttcaagaactccccttgttgactttgtgggtcgtgcttgaccatcttgggagaggtgtttccctgagataggagtagccaacatcgatatgtattagaaaacacacacacacacacacacacacacacacacacacacacacacacacacatacacacagtggcatttgaaagggaagggaaaggaattagtatcaattaattctttgaaatgtatctctttgtttcagatgatgtgggacaccggcttgtgcaatgtgatataagaagggggaactctttaagccgtacaaaaacatgtatcaagtgatttgatatgtacaggggttataaatcttgtattccatttatttacagattagtgatattagatgtaaatctatttagcagggaaagtataagcaatttatctttaatggaagggatggttgggaggccataatctcctcttctactacttgataagatatgattaaaggaaagcaagttaaggataataattatttaaacataatcctttatgtcaaaattaatattgcatgaattttgaattctatatttacctgaaagaaacctgtaaaatctcggtgctgtgtggacgttacagattttagtgcattgaggtgtgagacagtgagtacagatagagggagacaagatagagaatccttgtctcccatcagtatttgggtttgtgtttgtgtggttttcttgctgttgttagaaacaatacgtttcttaagaagatgccaaaagaacttgctttagcaagttgacatctattgatgaataagtatgacattttaatccccatattttaaatgatgtttggttactatttgtttaaaagcaactgaataaaaacatcttcagctatccagattccaatctgtacagatgactaatcatgtggaatatttgaacataaaggttctagtgaaaaataaaaattaaaacaaaaaatgtagttgctcccagatttgaaagtacagaatgttttctgtgccttttagatatgggtaactatgacattgaaaacaatggtaaccacgggaaatgcaccttacaaaataaataaggggaaaaaaaaaagacatgggggtggggagtaggaaggagttggtgtagtaacagcttagtgagtaaataaatatttaaacttcatgctttgttacttgtgtaatcatgagatttgcagaattatgttttatattacatttttagttggtatcttttttatcttgtgttaaataatctgttaagccaaatttaagtactgttcagaaacaaaagcaagttacaagctttgtgggtgttaatgtcttcatgtgtaaaaaaccagaaaattgaattagatatatcctaaggttttttccaagcttttaaattccatgattctgtgacccaggaggtgtccaggagtcatgtgagtaaacttttaagttttgaagtaacgttaactccaagacttgaaacccttgaaattggctagaaatcctatacaagatttscagaaagttaccrttatacttcctgattacgcttatggatacaaatataaagcaaacaataaccaaagacacataaaacaaaccctgattctagcagtttacgaaaagaggaaatttattagaaggttctgggggatcattgtccagtagaactttctgtgatgaggaaaatgtttagagaatctgagctatccagcatggtagtcaatagtcatatgtgactatttagcacttgaaatatgtctagttcaactacaagactcgattttacattttatttagttttaattaatttaaatgtaaacttttaagatttaaaggaatcctgggagtaaccgaaacrtcggtcttgagaagaataggaagaaaccagggtggccttaggractaagaactgctttggaagcagtagtggtgtgttcttcagagtcataccatgacttagttattagtggtacccaacctggatttatcagataacaatggcatcttccagggagagaaaatctgattgtctttacatgagtttggtgtctaccctccaaatcaatcaactgtaggttgggttgcagaatgattgcgtacctgccagagtgctgacagttcccagggaaggaggaagtggagccaggcagcagtcttaagagcggtttgccacattacttaagagaaatatgtttttccctgcaagcactgatttttctaactttaaaatactcttattttgttaatttacttgtattgcacctgacttatttaccttttttattgctaattaaaaataccactctatgttgagtaaacttttactaacctgagagactaatgatttataacattgtgtagaaggaaatcaaagaacattatarccaaaagcaacaatatgagccatgctagacaatgctctcttgttacagagagtattgataccaaggcttagatgttttgctatttcaagtcacgaaattatttgccacattagggatagatacttgctttaatctgaacctatgttgttgaccagctacatgttaaaaccaagtgtttgaaaaccatctttttgaaatttgacgctttcccgtaaatttttattttcctgtaaagtggtaatactaataatttgtgagaaaactgagtagtgcaggttttgattttgaagggttttttgttttgttttacatttttaaaacatgaagaaagagctttgattgagaatgtgttaattgtattatgtgaacctataaaattaactcttattatttaatacatatgaaccaaataatacttgacccagataagtgaaggatagatagaaaagaaaggcatttacttaaaatggctgcttattttatcaaagttagatttcaaattagagttggatgagctgttttaaaagtccatgctaaatatgttggggactgccccggaaacakgttttcctcctctgtgtaaatcagccatgtttctgtggtgcgaggtgggtgggagccttgctttacttcctgcatctcagcaggctcaggaagggaagcttgctagggtgtttaagcagccacatgcattatgttaaattaattctaccccagtctttggacatctattgacaatagtattatttgggttgcaaaatcaacaagtgaatagaccaaagaagaaatggggaagaacccagaatgagtgtgagtcaaacactaccttgacacaggaagccaggactagaagccctgagatcagtccaatccagggaatatgctgactgcgctgtcatttagaacaggccagtggaattcaggacctatcaggtaagtccatgtcttaccaacttaaagcaatcttctgggaagaggtctggacctgtatctaacatgaattgtagtgaggtctgtccatcacatttcactcatctaatcacctttgtcattcttctggttttcacagataggatagaaaaactgtagtttttttctgttgccacttagctcttggttgcaggggcctctaggtaggtgtgaagtggttatcaaggctttgactgtcaaaaacacttctactcaaaattggccttagcagttaagccagatttaaaatgattttggtagtggattatctaagctcatatagaataactgcaagtcactttcaaacttgccatagatgcgaagataatatattctcattttctggactagcttttcccaggaaaaggtatggggtggagggatatcaaatatcaatttttgtagatatggaaagctccatgaatgtgtatttataggccccctgaggtctaactgaatgtatgttgaatgcagattcttctgttttcctccccaggtttgtcatttggcaactagtacaggaaaaagaccctcaataactagcaagtctgtctttgttatatgtagacaagcattttgattaatttagggaggatgcttttttcactatataaaattaaaatgaaattatggaagaacctagtttgttttcttacttgagttgaatgctgtttaaccactttcttattacattcgattgacttagttgagttggatgctgaatgtttaaccactttcttattacatttgattgacttaaaaaccatctgtagcatagcctaaataacttaagactttcagaaagttgtggcaaatttttttgatacattctcattcatagccaactcaattatattaactttttatacaaatcaaattatattataatccatacacattaaatttcacttagaccaaagaagagccaaggcttctttactggatctcaccccctcttacgtatttaagagcattgccccaggaagtcctcttttctgcatcagcattttctattctttgttggatcatactcattagcagaagatgccatagtttttactgtcttgaaataataaagcttctcctgagcccatgttcttatccagctactgctgcatttctcttcagagcaaaactctccaaaagaattatgtacgttcactgtctcaaattgctcttctcccattcttccttgaaccctctccaaagcttttcctcattcactgcttcagagccttcttttgtcaaagtctccaataacctcagtgttgtcargttgaatagcaggctcatctaatttgacttagcatagcatttaacacagctgatcacactgtctctcccggaacacattcttctctggagtacttgcaaatcacatgctcttggttctcctcctgcatcataggctgttctctctcagtcatttttttttcctwtttcttctttgtttctccagtctctaaccatttaaccattggaatgcccccttctcttttctatataatgcatttgtggagtgagctcaagcattcttcttttatgtatgacactgatggtttccagtttttttttttttttttgagactgagtctggctctgtcacccaggctggagtgcaatgaggtgatctcagctcactgcagcctctgcctcctgggttsaagtgattctccagcctcagcctcccaagtagctggaactgcaggtgcatgccaccatgcccggctaatttttgtatttttagtagagatggggtttcactatgttggctaggccggtctcgaactcctgacctcaggtgatccacccgcctcggcctcctacagtgctgggattacaggcatgagccaccrcacctggtccgtttccagtttttatctacagtttgaatctttcctcagtgcctctagtctcatawatacaaaatacctgcttaacactttcacttgcctgtctaaattaacttgtccacactcagactcttgctttcccttgttctttctgagcagtaatggtggccttcttgatatttatttaaaaaagaaaacagattcacagctcaaggcctttatatttgctattacctctgtttgccatgcttttctcccagatacccacatggcttagtctccccacctccttacgtctgctcaaatatcactattctcaatctggctactttttcttcttaattttctctctaatgcttatttgacatgccgtatatttgtctgtttattgctttacattccaagaatatatgctctaagagggcagtgacttttgtccattttattcgctaatgtgttcccatttcttactacagtgcctggtccatagtaagtgctcaattaatatacattgagggaaaagactacatgaacattactaccacgatgatgttatagttgatttcagttccaggaactgaaaatgtgaaagtgcttccgtcaatttctcctttgaaacttcactttagataacttacttctttagtgagaaacagcagccccttattcttaaaggaagatttccattgtgtgcctttttcttctgcagctgtctctgagcaaattgctcattctagcttcttcttggaatgagtctcttctctgaacttctcttggctcttccctctttcagcttggcttctgttcacggagcttagttctacttcctgacctcacagagcttgccctttttatagtaaaaagcctgtggtgatgtcattggctcagctggtttcaatcaggctgctcagttgaagctgatgaatgactctgcaagttatcttttggagggctgtacttattctgatacaaaatacgcagttatatacagcattaaccatttagcaattatcccatgtgagtcatgggaatgctttttcccactctttactaacggaaattctaattgatcattggctgccccacaagcacagcagagtcaggtatctgatgttggtcaactgcttactggctcttactctgcttctaactctctaggacctcctgcagcctttctcctgcctgttactttattctgctttctaaatgtcattccttagatccttaattaagctaccccaaacttgtttctcaccttgaacctctgccttactgttactcatccatttgctgctcttggatcacacatttttttttgaccttgccatttgtaaaatgtaattgaattgtgtgtgtgtgtggctayccttttcttttttaattctaggcactcatctttactattaattctgtaacaattgctatttttgactttagaacattgtcctaacttttttcagtgagaaggtgattggtttgtgatttatttctggtaattttatgcttctaagtctgatgcaagacattttaattacattttttagtttggaagagaaaggctttattgggaaattgatcggttttcataaaacaaatctgtcatatttaaaaatgggcctgcatagaatatagtgtgtatgaaaagtggtggctacagaatccttgtagttaaagctcagaaagttttgatagccagtggcacaaagggggccagatgtccacgggggtgattgtttaaagggatggtagggaaaatrtaaagtgaatgtgtagaatgaaggggtgcttatgaccagggtgaacttctaatttattgtgtaaatcaggatgctttgaagatraaagttgtaacagacataaactgggactgcccacgcaaaccctacctatatataacattgccgacacacctcagaattatgggtaggcctggttggccttcatgatcagttgtttttcaggacacaatgaagttaatattccacctctgtggtatccgcagtctgctttatagcagagcaagagtctcaggaaacatagtttgagagctccaagttcaatatggagaggtctgtttctgagcagcagctatttctaagccactgcagctgggaaggtggtagagggagtgatgaggaggggatcaggtgtctttggggcagttaatggacctaattctgagggttagtgagaggcaaaatttggggtaatggggtaatagcagagggctgacaaatgacaggtagactaagcaatctttaaataaaattgaatatattttaaagacatgcttacctcattgtaagcttataattaagaaactgaatatggcaaaataattgcagtgttaaatttatttcataacattgaatttaaaagtcgtagttaaaataactttttaatttatttwttttttttttttttttactaatagcttttaaagtttcattttttatgttkggtgccagaattaagaagtggccctttctctgtataaagcaaatggagttttatatgctagattcaatgttgtgaactgggaaaaacatatctggttttatataggctttaagaaaaatcaggactgatcctaggaagattaggaaggggatttataggactaatatagtcactatctcagtgttatgacttactgctttggttttcatggaattttcttctaaagaacattgtgagtcactggtgtagacagaatcctgaacactcttagaccactgacaagtagaaaaccctgtttgcagccagcagggtctgtgatttgcccatagtaggtacttaataaatattgttgacttgatttggcttaggtttgtcactggaaaatgtaaaagccaatgcacatttatagattgatttaaattttggggagcrtttttgctatgctatgtacatttagagaaataatggctatttttgtctaacaggaattgtaggcatgcgtaagttgaatgtgcaagatggacctctgaggagacaagaaccattagaaacttttgcatactatattatctgaatattcataagtaaatgcaaatagaagagcaatttctgtcaaattgggacatttaaacaaatcaagtgttaactttgttaytaaatttttaaaatgcgttttttgatatttacctaaatgaattggaaatgtaggtccacgcaaaaacccgtacacaaatgtccacagcagctttatttttaatttccaaatagccgagatgtctttcaataagtgaatggatagataaactgtggtacatccatatgatgaggtattattcagagatataaagaaatgaggtaccaagccacatagaaatggagaaaacttagatgtcaattggtaagtgaaagaagtgaatttgaaaaggctgtgtatgattccatctatgtgatattatggaaaaggcaaaaatatggtgacagtgaaaaggttagtgaatcccagggcaagtgggtagatctggggagtaagagggatgaataggtggagcacaggggacttttaggacctgaaaatatcaggtcctagccataatgctggatagatgtcrttatacatttgttgaaatccgtagaatgtgtaacacaaagaatgaacctcaatgtaaactgtgggctttagttaataataacgtatcaacgctggctcagcaattaatttcaacaaatatacagtactaatgcaagatgttaacataggggaaactgtgtgggaggtaaaggggtaaatgggaactctgtacttaccattcagtttttttttctctaaatctaaaactgttccaaacaacatattttattttaatatrgtaaacatgcaaaggcaaaccctatttcctgtacatagtggatgtctgataaatacatggtacatgaatgcatgatgggatgagtgaagaaatgaactgcgtgataatgtatgtgaaagtaccatgtaaacaaactgcctgacaaatgtggggggaaaagctagtgaggaaaaatggaaaacaagtcatgaaaaacattcagtgtaaaagtttgagaaggcataagaggaatttgaactaaagactgaaactattttaaactgtttaattttcagaaaaaaataatatagtttttattaaataaaaagttgatacctatgctttcagagtctgtgaattagagacaccatcttgacaccaattacttctcatattaatttggttttgttctagaggcttcagcttacaagtttcagaggaggtccttctctaaaggtgttttttgtttccttcattgtttaatatgggcaggtttccgtaatctcgatacaaaaccttgataaggccaggagcggtgattcaagcctgtaatcctagtgctctgggaagctgaggcaggaggattgcttgatgccaggagttcgggaccagcctgggaaacatagtcacatcttatctgtacaaaaaaattagaaaaattagctgggcatgatggtgcacctttaatcccagctacgcaggaggctgaggcaggagaatttcttgggatctcgagttccaggctgcagtgaactatgatttccacagcactccagtctgggcaacagagctggaccctgtctcaaaaaaaaacaaaaaacagaaaacaaaccaacaaacaaaaaacaaaaaaaaaaccacacatacacacagaaaacaaaaagcgaaraaaaccacaccaccccaaaacaaacaaaaaagatgtaaaagtgaccttgcacataacaagcttccagccaagaaaattgaaaagcaattaaatagaggaataggtagactatcatttgcttagtattttataattttgagtctttgttctgaagaaaatgtgacctttgttaaattttagataaatatgagaatgaccttgattctttggttttatcttcagtaatgttaaaaatgcaagtatgttgaagtcatttgttgtttttctcagataagcctcgtgtatttgaaaataattggaatgatttctgctcggtagtagtatgattttcctagccttatatcttttatgcagtgctctcaaggaatatgggtggtacaaggttataatatactggcaaccgtgtttcttaaggatttgacgtgaaagaaggtataactttctataggcgattacagataagaacatggtactgtgagagtacataggaaaggtgcttacctgcagccctgaggatcaggaaggtgctttatgagaagtgacaactaaaccaggacctgagatatgggtggcagttaaccaaataagttagtgagagaagggatgtgaaagtaaaggaataattactgcagaagcttggagtcagggctgcagagagtttagagatcagaaagatgttcttcgtggcaagaatatataccgttaagtatgagggttatgaggaaataatgaggctaatgaggaagtagggtcagtgaaagactttctgccatgttaaataattaactttttggagcccaatcactgaaaatgattcagtttcatttttgaacttttgaacattttgtgattaataaaaaagatgtcaattattgcttattaaaggctttcaatgctattactcacacaatttatctcatatgaattgttttattgcttaaagtgtcttggattataagaaagcacctgttaggtttgtaatgatctaaatgcaatttcactttagcttgattattggtatttatgaaattaaacattaaatgaattacatatactagatttgtgggaaggaaagctttctttaaaggcagaataaactcccaragattttactaattggacaacatgtattttttccctatagaaatgaaaaaaatatgtaatccatgactttcatgctgtaatacgtacatagaaaaaaagatttttgtaaaaaagaaagggagtatttgtgaactctggaagaatctcatgttgaataagaaattttgaaatcagaatgtagtgtgggtttagtattttctgtacagaataagtttgccataaattactaaataattcacagatcttttatctgattaattgaaataaaataattgaagatttgttaattttggatgttgtgcccaattaacagctgaaatatccttcaatactaattgagtaaagactcaaaataatttgagacatgaacatattttctcatctatgttagttctcctttatttatttatttttgagacggagtcttgctctgtygcctaggctggagtgcagtggcgcaatcttgcaatctcagctcactataacctccgcctcctgggttcaagtgattctcccacctcagcctcccaagtagctgggattacaggcacccgccatcatgtccggctaatgttggtatttttgtagatacggggttttaccatgttggccaggctggtcttgaactcctgacctcaggtgatcacccgccttggcctcccaaagtgctgggattacagtcatgagacaccatgcctggccaacctttaatctactgtatgctacttaaagagttattctgcaatttctttgtataaagattttttttcagctgttagttttttttttacttaaatcaattataaaatttaagttaaatataaccaattgctattgcttcttggcccaagatgttttcttatttcatcattttatttttatttgcaatgttgaccgttttattttacttctgtagaggaggtgtcactcttggccatttttgcttaaatagttcttttattctattctttcattcattctgaccttagaggatttatgtatattgaagcttatttttgaaaagtggagagataaaactactcatgcttgggattcagtttcttaaatgtgaactgtcatcataaaatatgtaattttaaaggccaggcgtggtggctcacgcctctaatcccagcactttgggaggccgaggtgggcagatcacaaggtcaggagttcgagaccagcctggccaatatggtgaaaccctgtctctactaatagtacaaaaattagctgagcatggtggcatgcacttgtagtcccagctacttgggaggctgaggcaggagaatmgcttgaacccgggaggcagaggttgcagtgagtagagcctgcgccactgcgcgatcactctgtcactcaggctgcataggttctctgtccagcctgggcgacagagcaagactccatctcaaaaaaaaaaaaagtaattttaattattttcttttattaaaaatagaatctctgaatgaaaaatgtgttaattctttaagagtaatagaaaccatttggtacaggtattgggaagttacaaaaagattcttgacttagaaacacataccagtttgtattctcaaaacaattaatatctatcctacttacatctatcaagtcatgaattggaggatcaataatgaaaatttataaaattcttgtcctttgaactcaggatgatctgaaggtcttatagtacttcaaatgaccaaaagtcaatctggagaatgttcttttggaattctgaagccaatttagtttctcttctgctcccttcctgctttagttgttagcttttcgttcttacctgggaatagtttgctccttgtttgtcccctttcagctaactctcttaccttaagggaacattaaaaagtatttgggttacaagttatttctccataaataaagtgcatgtgtatcaacagagttttccattaagaagatatgatacagtctacccacagagagtttttgtttaataaacacttccttactctgtgccaggcaccgtttcaagtactttgtagatattaatgcatttaatctcatgaggtagataacattattgtccacattttgcatgtgaggaaactgtggcacggagaagtaagtggaggaactgaggttgtctgactatataattttgtgtgctacttctctgagcataagagaaggatcagtactaaagagaagcatgcaaatgatcagtaatgttgaaaacatacttttcttggatgaatttctgttgaatagataagtgaatcttgatatgattgccttattgtcctacgtatcttgtatattatagaatgaggcattatgtctctggaatttatccaggctttgggggttaacagaattgggtttaaattctgactgccacgtacttataattcttataattatttataattctaagcaatgtctttaagtataaaatggaactagtagtacttcctaaggtagttatgggataaatgagataatgaatgtaacaggccaagtatattgaaggcattcaataagtggtatgtagtattaagtgctataactaggatggtagaaatagaagttgtatagtggaggagataaacctagaaacagtttcatgtaatcatattatcagctaaggatggtgattgaggagtggcggggtgtaagggaagccctttgaagcaaattaggcctaagtaataataaagaaaatttcattattcctaactattaagtgaattaatcattatcttgttatagtataatgattacgaatgactaagttagtagttaaaatgttacattttaaattttgttttaaaaagttgtagcagtgagcaacatagacatttattcaccaacagcacttttgttgtttgtgttttgtgtgtcgttaattctgtccaccacatttttgggcccatcttttacccttgtttgtggtttatctacactatattagtttatggggagacctttcctcttaataaatagcaggaagctgtccacttccagtggtgctgactcatgtagcaacaggaagaggaatgattcctaaagatgggaggggaaggggcatgatcctcttccctcccttaaagagacaaattcgggacagaattacaaagcagtttatgtgatggatgagtaagccatgggttaaaagattttctccttaattatgcttttttatttgtgttttattcttactgtactggcttacccatgtgaaagcaattcctaatgcccactgccttttaagtttatgtttactttctctgattagaagattaaagagaaatatcatgtttacacttacagtcagtattaacttctgcttgtaactggtggtatgctggtgggaaaatggttaactagcacttaacagtgatggttggcaccagtcagttcttattggttgaatcgaaataattactgaaaggattttaactatataagatataacttactagctaaatgcataaattgttagtatgtgtcatgagtttattgtcgactgaaagctgcttttttaattatcaagttttggraaacatgtagaatcctgtaaagagaaatccagaagatttgagaagacaggtgggagtgctgttatttggagaacagtttctgtgtgtgatgtgaactctctgaaagaccttgaggaggaggaggtgaacatagatgaagtggctggctgaggtggraggattgcttgagcccaggagtttgaatctgtactccagccttgggtgatatagcaagatcctgtctcaaatatatataacagaggtctaactaaaaattattagaattgatttttacatgtagtttatggaacaattyttaaaaattcataaagtcacactgtatttaatctactttggggttcaaacttacaaaaaggacttttaggcaatgattttttggaatgtaaaatataccataattaaaaatgaatattatcgaattgttaagtcttatgtagggcatcaaggacttcactagcccacctgtaaattaagaaataaccattcagattaaacaaagcaagtataaaggaagttggatggaccctttttgccaatatgcagatgtatcatttctagaagatgtactttaattatgaccatttaacagaccaatactgtctaccttaaaacctcctttggtatctaatttcttgcaacatagtgcatctcaaataactggtaggaaattgtttgtgtctttaaacatatttttagtgtctttaaacatatttttgtttgtgtctttaaacatatttttaggaacgtatggcatsatgcatatgtccttttctttgaatctgggaggtggaagaaagcttagtttgaacaagcttatctagtacctgacattgaacatcsctgtatgccttgtgatagagtaatagattgagacacatatttacaacaattgataaaggttttattggttgtgaaggtgstatgcayacrtatgaatgacctgtcacggatctcacagatacttcctttttatgcagtagctatagccactttaaaagatacagatgttatatagtaaaaatactacaaactcagaacctcttaaaacaattttttgcttcttgcaaattgctgtctttatgcaatattcctcaaagatcttgtttgcagtgaagcatccttcraagcatgtgaaatgtatttttcattaccatctcacatgttatatgcccttaattccatttgtaggaactccttctaacatttaatgaaatcctcagcagccagctgtatgccacagaggttaccatgggttaaccaacattttatgaaatgttcacatgttcctggaaaaaccaatgagcagcttatagagactggtaaagcaaaggcgtgacttctactgatgttgcatttctgtagtactgccatatttggacacttatcttacaaatacttatatgttgtcttcttcatgatgttcmcattgaggtgggtaattatgccagcagtatactttgtgtttcacagctatgaaacaaagtggatattactacaggatgcctgtgtttccaacaaatatttaatgaatgcctattaataccaagatgttttccaggttctggggatacatagcagttaaaacacacacacacacacacacacacacacacacacacacacacacacacgttccttgtttgtatggagcttatgttcttttctgtgcatgataagagaagacaaaaccaaatcgaattctatccccattttcatggatgggtataacaatttaatattatttatctgtattctagaatataagtcagagagaattagatttaaaaaggtagtttgggggccttgrgtgttcaaagccttgtgtgatgaactaagaaagttgcatttaattcacttgtgaatgtggagctaatgaagatttagtgaatattttgaggaggatagtggcatgattgttgctaggcttctggaaagatgattcttccataagggtatatggtgaattatagtctgaatcgtaaataaagagtagttaaagttaagtctggcaagatttattatagcctgtcatagacgatgaggagggcatctgtgtaatcttacagcagtggatctcartcttcttgacaaatttttgaagacagggaacaacattgctaaaagataacaataaaaatgaaaaatgctgactaagttggtacaattagacatgataaatgaattttatatctgctcttctgtaattttcatagcagttttctcctgggctgaacaaatagtttataaactttgggcagctgatatttagcaggacgtcccatgagacaacttagtaaaaagaataaaataatcaaataccaagaccagttttaggaacacagcatagacatcaaattgtgatattgtcctttgacttttttttcccatattatcttaaggaagatatcttgagtgcgcagaagtcttggacatttggttcagatatgttacttgtatatatgactaatacattaagcctaatgtgttccagcaagtataaataatatgctatagggattgttataggctgcgaatcttccttaggtttatttaggtatagaggtgagataaagttgcaattttattatctttagttcattagcagttaaatacagtgttactctatgtattgttgactgtccgagttgcaggtttttatagtggtatagacatatttagggtactattgtagaggaagatggttttacgtatttaagttgatttcagcattgtggtcctatggcaccataaaaactgtgaggttggaattctctgaaattgttgaaggcctacgaattactgtgtaccagcttaagaatgtaatcactgagatgtgacagaattttgccttcttttctcagacttctctcaccgatgattaggtgcaggtatttttgcagaaaagaagtaatacctcttttccatttgctttagttgaaaattaatgagaatttatcaatttttcttcttcatattgatttttattattgttattgttacttatttatgttttttagagagtggatctctctatgttccccaggctggagttcagtggcacaatcatagctcactgcaaccttaaacttctggactcaagtaatcctcctgcttcatcctcccaagtagctggaactataggcacataccaccatgcttggctaacttgttaatatttttgtagagacgaggtctcatcatgttggttaggcatattgattttaactcaggctatcaaatatagtccctgaaaaggaggaaattatttatttcaactaaaaaggttttaaaagtttaaaaaccatcttcttatgcaagttaacaatagtatcgatagtataaatattaatagtggagtaaatattggtgtataaactatggttataaattcttgcacaatacaaatctcatcttggactcaatttattgaacatttttagtaattttgtcagtctggagttcacttttgttastagtataaattgcattttccagagatagcgtatgttaatattaatctgcctggacacatttccctacacttctttgtcagattaggtgtcatctcctttagaggccattcctcagatccgcttatcccctcctgcctcccatctcagtatagtacgggcttcatgcacttccattattaaactttatgcttatagccctcaaaagcaggagtcgtagcacagtttctgtactgtaattatttgattacttggttgtctttcacactaaataatgagtacctgaactacamggacattgtaatcccaagtatataacacaattcctagcgtatcataggccctgagaaatattggttggaaagaaatctttattcacatttatggataattcatacctattatgtgttacattggcttgtgaaaacctttgattctgtggaaattgaattttattcaacttttagatgagccattaattctatatttaatgcatattctgcacagtacatggattatccactaatatacttttttctaacactgaagtaattaagttccattatctagagtcctcctactcagtttgaggttgtggaaatctgtgtatacatattatttcattcctagttaactgaggacgccccagggcagaggcagattggtaataaggtctgacttcacaccatggccctatcagtggtctgaaaaagacagctaggcatggtattctgaaaaggacagctaggggtgttcgtctgtctcatgctcctacagaatttggcttaaatgaagaaaatagttggtcacattctctatatgagagaggacagtatcagtaatcaataatgattgagcaattgctacttactttctccttttatacccagagatactactggaaagatactgttctcttaattttctttagtgaatgtgtttgtgtttgctacacatagcccctaattttaaatttcactttcactagttgaactcaggttcaattgctagayctgtatggactggtctagtatggactgtactcttgtttctcatccagtcatctctgagtctgtcaatgtaaagaaatttcttcatgtttatcccaaccttgatatttccttgagatttcattaggccatctttaattataggtttttaattttgtttttaatggacagttgatatagactgaataacactgtgattttaaatgagaaagattaatcacgctatataatactgtaactgatttttataatgtagtagtaaccattcttataatttagtagtaaacatagctagggccatatctaaatttaataacttgattgaaaaatgcattcacttaataatcctatttattttttgtacctatgatgtaaatacttatgatgtaagatataaatagtaaatgtatagagctgtatgcaacttttattctctttattttcttctattagtaatttactggctttacatattttgacagagttaaaagaataagaatatgggaactgatgtaagaaaatacagagttttcatgaaaagtagaggaaataggtgaggtaagaaatagtgaaaacagtctggaattattaattattattatatctaagtcacttggtaagaaagtaaataaacctgttgaggtataaattattttacttcctctttgtgtatgtaaaggtagttctatatataaaggtgattcatccacaggcagtaacatgtaaattccataatccctctgtatgctatcacaaatacattaaagaaacactttttttttcyaggtagagcatgtgagctgcattatcttaaagacgtttatgttgctttctatgtttattcccctctattacatgaccaggtctttctctactttgtaagtgaatgaccastggagtttcttagatggtttaattttgttattttgggatcagggtaaatgagttatgtttgttttgaagcagtgtttgtatatctgttgtttatcttgtgtggtttttatttgggttatcatttgactttggaatttagccactccttacctttcattcatcttctccttcaaaatgctgacacaagcagagaagtgaatgaacaaaaactcactgtttgtatttattcatgtttccaagtgattcatgtttagttatcctttccttgaatcaccattcattaaaagtggtttggtcttctttatgcctatcttctctgtttgtgataatctttctattctttgggattcaggtcaatttactaagaaaaactcatgattaaatatcttgaagaaagcagacatgggctgggtgctatggcacacacctgtaatcccagcagtttgggaggctgaggtggaaagattacttgagcccaggagtttcagactggcctgggcaacagagcaagaccctgtctctacaaataaataaaaaaaataaataaaagagtagctggctcccagctactcaggaggctgaggcaggaggatcgcttaagcccaggaggtcaaggctgcagtgagccctgtttgcaccactactgcagcctgggtgacagagggagactctggaaaacaggctctattgcattatttcatatggctaacaaattataacctacaatacaacaaaattcagccaaattcttatggatatagtggtaayataaatttttggtttctctcctgaattgtttttcttttaatcgtctagaccrgagctgaaggctacttccccctcagagagaattgtttggcctaaaagagatttaaacagtttgtattagtttccatcataggggattcagaagataaaatctgacttttccctgctacctcctttaataagggcatatatcaccagaactctaccttgcctcctctatcctgtcttccctcatacatgctatgtttactttgcctcccctggctcctataggcatttgagtttgttgtcttttcttgaatgattaaatgagatatttgcttagtgattatttgaacttaataaaccattgtgagaaattgaaggtcactgtgcaactgggcttttagaatctggatttacactgagactgagggacaaagatctgcacaacaaactgaattttatgtgcatttgtacattttgcatttttctgtatgttaaatagtaattgcttgctggtctcaaaaaactgattcatgaagaatgttttcaaaggaaatgtttttccttccttcttttattttaattttttctttttcttgccctgtcttaaggtgctgatttttcctgccttcgtatgccttagaagtcatttcagttttcatattaaactaaagattaaaaaaagactcaattcctattaaaattaaaaagtcaaaaaattcaaatgcaactgtgagctacagtgacttctcatttactaataaagtgctgggtcataaaaaataaataaaaaggaaggacagacaacagaaacagttcctgccttgggggaaaaagacatgggggaaaaagatatgaaaatgattcatgccttatttcatttatttgatgtaaatgaagaactttatgtgaagacatattactttttatgtctattttgaaatctagacatagacttcgatattggggtcaaattgctaatttaagtactgtgagaatcagtgtactaagctaatcttgtgaaaagatggttttggatggagactcttcccagtaattattacggagttaaggcaccctttttaccatcttctctgtcaacctaactgacatgaatttctaacctggtaaagtgagaagagtgatcaggagaagataatttgcatagtatatatagatttctattccatttatataaaacccttgaatggtaccttagtagaaacaatataaaataaagctaatatgggttagatgataatgtggttaagtggatttttttttcctgtctgaacaaaagaactgacaatttaatcagtagacccctgtcagtctggagagatgcttctagtggtcagcacggcactctggtctttgtgtgtgcatatgggtgggggcagggcagggtgttgcattttcccattaatcatggtaaacattaaaaaaaaaaacactagatatcaaaatggaaatgtaaagttgacagtggaaaacaatttagaattttagaaagttaccttaattgacagtaaggaacacaccttgtctgtcttttcttgtgagccttattgccctctrtgaaggaagtattaacaaaaacatttgtttgttgattataagattgaatgagatacaccacatcttttacagtaacagggacaagaatggcactgatgcctagaccccactcttagaaattctgatttaatttatctggaatggggtctaagcagtagttttttgtgtaaactcttcagacaattggactgtccaaccagagttaaagggtcactggactagtcagtctaagattttctgaggcggagcaaagatgacatattcccacatactctgcaatagctactgctgcctagtgacatgtatttgtcctgaattttttcttgataagattgaaagctaaagaaaatgaaaaatatctctcaaggataggggattcaagtgttcagcttaattttatcttcccaaccatgtacacacagtatgcactgcattgtgcatcataagctcattctctttatagctgctgtggattctattggtatattttcagtgttgtttctctccagttgagtgctcttctgcaccttcctccttcctttgtttttctgtcccttcccctgacagagagcctacaagggccacagggttaaccatgtgtgtaaagcttaatrcaaaytttcttcttagcaaagtagccagcccactaactatgggagtaaggtggtcaggtggatagttagagctcacataagcttgacacacatttttctgattattcctagaaggcacacatacagttgaaagttatggagtatgccatattccaggagaacaaaaccatgagagtcaggagacctgcatcatagtctgagaggtttagagtccacctaacttcatgtgtttgagcaccttacttacctgcctctatctcattttcttctctgcaaaatgagaagctcaaactagccacttcctaaggttccctctagcctttacaatatgaagtgccattttatttttattactagtttaagagaacataagcatccacttgttgctaagtattcttttcccaacataaaaaggaarcccagacaaaaactaaatacaaattaaagatttcaataatgtaaataattatatatacttatatttgggttgttttaattggaatgtgccttaacgatatgaattaagacattaccagaccagaaatatttcaatcttggatgagggagaagactgggggggtttgtatatactcttgttattaatttcacttaaagtgcttctgtaaagtatagataacactgcctttgactgcctatttgcagagtgattattagtaaaatgaggggggacttggtggatacttctttttttgctaaagaaaaaaataaatgtaatataaaaactgctgaggtaaaaatcggtctttgtatttaccttagttcctggtcagtttttaattcattgaataattcttagaaaaatcattgaatgtattttttttgttattgtataggaaggttaataagctctctgaatatttcatactttaatcctacagaaaaatatgagtagttagaatagattaccttaaataattctgggaagaataatcattaatgcttgattatttcttttgatagctttttttttgggtggggggagaggggaagttaaaacacacattgactgtaagtttttttagaaatgagttcttcagaagaatgtgtgagaaaactcatgatgattttatagttgatttgggaatttgcagagctcacagttaattagatatttctaaacttatatgtaaatttctggtaatgctttgcaatgagatcactgatacttttgaagaaagtgaagttctattttttaaagtgaaaataattatactacattagtcacttataaaggacaatgcttattttttttcagactgatttgctgaaaagagttaactgtggtgtttgcaaatgctttggaagaaatgcagatgtttggaaaatgtcttttaaaaatctggaagttgtaaatattatgcagcaataatgttacattatggtagacagaatatcttgttacaaatactaaagagtaaagaaatttatatttttgctccagatttaaggatttgagtctggagtgctcagtgctagatatgttgccttcttttatggtattttctacaataccatactttcaatactgtgattgaaaactgactatacttctattacaattcttgaaggagtttacctctgatatgctgtaagagtctcatctccaccatttgttttaatcttggtcaaatgatttagttagccagacctcagctccttatttctaggagatatgaatggtacctacctgatgcagttttatggaaattaagtaaagcaatacacataaagtgtttagctagagactgctatatagtaaatgctcaacagaagttagtgatratgttacctkgcttgtggaagatcttgtcaaaaaatcatttgttcttttgccattggcttgtgctttctctgtgaaaatgatacctctaaccccttttcttttgtatcctttcttttaagaactcatttattccctgggacagtggaagyaattaagtgatttactttagtggaacttccttctakcttactccagatagaagtaaccagaaagtaggtgacaatgttaattagaaagataaattaataccttttatgtggataatttacctgatgataatgactgagaaatcattgtgagattgtcagagggcagtttatagaatgaattacttttgatgaacgaaggttgctttttcaggggcagaagatagtttggacttacattttagagagagagggaaagttacaatatgctgctggcattcatcgtttagttartaatttggctcatcagggctgaarcagagtttgcattttttgatgaaggatcatttaatataaaggcttatttagatgacctattgtcattccatagagatcttgggtatttccatatggactagaatggtgctwggaagtaaaagattttctgggaaatcagatgtgctattttaaggaatgaytttatcaggtcatttaaattttgtgctagacttccaatatttttgttttgttttgattacgaagtgttctgtaagaccagaaaggaagccagcatgttaagaaagttttaaagttattatatttctgatactgcacgtatacagacacacacatacaaacacaccatttcttttccatctctgaaaatctaaggtaagatttaaattacagacagtatgaaatcctgtgatgccaagatctttattagaatagcagtttgcacctttgtcgttgatacgatttgccccgtattcagaagcctgtgcagctgaagatgagtcattaagagaaactggaatcagtaaaactgcattttacaataatgctttctaaactggtcaccttgctaaaattggatgaggctgaagacagcagtttctgccttgaaaggaaggagtaattactattaacattggtcaggaactttcttatgttcgtgccttgacagctcttagcactttatttaaacatatactttggaaacaggttgtgtggcttgcacagattttaggggcatgaagctgataaagtgggagcatattcacaatataccagtgtaagagaagagagcgtgtggcagaagattgacaacttattttaatttgccagtccagatcttctgttctgatggaaagtcaacatcctttaggatggtgtgtgtgtgtattttagtccaaggaatctaaaacaactttcagaatttgtaaattttcctgaacataatgatttcaatgtracactataaataaatctggcttataatgatgtactttataatcctgaccaggttacttttacgtcatgccagaaacacattttttaagctagcacttagaaatattacttttagctccagaaaataaattatctggtacaaaaaagaacaaagttttgacctgtaaggaaatggtgcccactgtggggactggtctgtggagtggagggcaactgaacttactgggatttatcgatctccttggtgatcgtggtccatgtggcatccaggctcattgtggatgcttgcttgcttgcttgctgaatgaatgaatgattgccttcctgtcaactgggaaaggaggaagaaaaccatgaaattgaaaacaaacgtgtttagcagtaagattcctatccgctgggttcatgacccatgttctgactagttatcacaattgaatttatctcaaggacacatgagaggaaaccgttggtatgtggggggtggctggagaggaatgatgatagaggaggaaagtacttgtagtgtgactttcctcagagtcaagagaaggaagtgcttgcagcaataaaagtatttaaatataaactgaagaacacctctggttcttgtttttggtagatggagaaacccagagcagagctgaagaggtgtcatctgctctccagatggagtcagctgacaactcagaagcagaaaccaggtcttctgactctgggcaaatgttagatgctccctttagtagcaggaagacctgggtggaaatcctgatttggagtgtggtttgttgggcttcaacagttcacttgtctggtttctcctaaaagacatttgatttcacagatgtttaatttcttttgggaaaggaaactggacttcattgtcaagcttgagagaagwgccaggcttaccatttctcctttctttctgagttttagcaaaggaagtctcaagctcttcaggtaaagagatgaggaccaggaaatgggtggtggtaaaggagtagtttagctcagtagtaggtaaacgagaaagagaaaaaaattcaaaggaatgaaaaattcctcaggaggattatggttttgtgttaaagtcacacatttcttatcaaagcagagatcattgattagctaactctaatttagatagtatttactgtttccagttggaaagttagtgtctaaaacattgagagatttgagggaacatataggttatcttcttgtccaagaagaagactcaggtgtggacagtgcagctgcctcttgtccagcccttctctttccttttgcttgctagtggttcattggctcatcagaaaatttgggcaagttgaccttgagggatctagaccatagtttcttacctcagtggtaatccatttggatagttccttaagaatcctctacaatgtccactttcttcgtgatgttttccttaacttctgtattctatagttttgaccatcaataagtttatgataattttgtatttatacttcagatttagtgttcttgattaaagtcaagacttttttgataactggttgtgtattgttttgratgctttactactactggaattgtgctttattttgagaatcatttatgtatatatttgtttttgcagcagatagtttttggacacctacttatttcagggaatttttttacgtttccctgcctctggacaagtaggacataatgttaataaatttgttttgaacacagtttcatttgctaacatggttttaagagaaattatttttggtcacgttttggaaacaaagataatacctttagaattgtccacattgatgatagagagacaaatgtaaaatgttcctgmgtatatcctaaatacaaataatgcgtattcagtaactaatgttgttgggctaaaaataaacaaatagtacrtttatggtaagcttgacacctttcacacagctgttaacattttctctcatctctgtgtaatgttctgtatgtttcatgaatgaagaggtacctcatccaacataataaaattaagtagcactttatagagcatgctacatgccaggcattattctaaatattttacacattgattattttaataatcagaacaacactatatgataaatactttaaatatattaatatattaaaccattagtctctgatttaaatacttataggtgaggttaacacagcctataaacaaatatttgtggacttcagaacaaactgaaagcaggttctaaatgtcaaataaaatggcttataatatgtccattggatctgtcactgaatgtggaattctgaaaaaaaaaaaaaaagtctcatacatgtagatggagacctctatctccctaatccagggtggaggtaactaaccaacccatttctttaatatttttccttttggaactttaatatatcttatccttattaaacaccccttcaytagaagaagacatcaaaactaaaagaatcaggagtaaacaataacatggaagtatttaacatggaaaattaacttggagcttagtgtatgatttggaaactcagtctcagaaacgttaagtgacccatccaaggtcacatagcagaactagaatgagttccataataagaaatactaagattctaatcccaccccttccctacttgggcaaccctggcgaagttaatctttcacagcctcagtttcttcaagcgtaaaacacatagcaatgataaaacttactttacagcattaatgagagygttaaacaaaataatatacttgaaactatctagttcagtgctttacttcatagatgggaaacrwtaaatgcttattttcttttgtcctcaccatctctattagtctattggtgactgaatctgctacctaggaatacaaccctaacattacagtgcttctcagggaaccagaaaatcctacttgtaaacattcccaaaacataaagctgtttcatattaggtctattgactccttccatcattaaaactctgcaatcatcatatctcagtttaacttcatcagacttcttaatagtcatttaaatggaaatttctattgtagatatggtttatttggtatcagtgagtactaacagtagtgagcaggcagccttgctagccaaatatttgcctttggagttggccagtgattttgattgctttaaagtacatgtagttacatttctggcaggtgggtatttaccatttctagcaatgtttatgtaccatcatgtaattagcaacctgttgtaaatcatccagccagtgatgatttgccagaatgaacaatagctgagattatgcattgctgactttgctattgtaacccaaaagacaacatcctttttcctggttggtaggagtctcttcagacattagatgatttttaaaaagttaactctatagactctgactctattcagagagcaaactaatatagcatttttattgtgctaatagcaaatctctattaagaattcatatatgtacctttgttacgttttgtaatatgttttcaataaaaatcttgatgtaagaagagtggtgaatagaacatcagcacccctgttcaggggcagaaaagaatataaattgttagggatactggtaatccaccaattactttaactatctaatgacmatagtttaggcaaaagagagaggaaaatgatttaaaattattcattatcgtatttaaaaaatggaggaggaagagaaaggtgagaacagtaaagtagatttgatgcttatttaatgcctcccttgtgaaaaaataacattaacacasaaccaacagtgattatggtaacaaaacaaagtaacaagctaaacatgcttatattttagtacacttttgaacaaagtatttaaatgtggcactacagagaagtgtaagatataaaaataagaggcaataaatacatcttcaattacttaattttttaaaatttcacttttagaggattaacattaaaataatagactacttttatagttgcagaatttacttacttttggttgacaayaagatgttagaattgtttttattaattttaaaataaaatttttaagaatgtgataaatataataaaatattagagaggagggtctgtatcttagtttgatttctatctctgttgttgcccttctagtgcacatctttgtatatcataagtgctagtgaacaatttatgttaaactgaaaaatgtaaaaactgaaaacgggaaactgtaattttcacttgcaagtagcgcatgtaaataacatggagacattacgttgtttcctttttaaaaagctaacgacaacagtagcrtatctctttcttactggtgaaataagaaattaggaagattttgtaagagatgttttagtggataggcttctgaatatggatttgcagtgaattagggcagagtaattcccagagaggagaaacaaaattggaagtcacaagggataggctttctcatttcagtgatttttaaatctgtaacatttgaagttttctgtttcctcaaagaaaaaaataagaggaactttgtcctgtataactttacatcttgtcctgggactcatgcttcttttttttttttttttttttgagacgggactcatgcttcttatgtttattgtattgtcatgataaggcatccttcrttcacatactactcatttcctgttaattacatacatacraggtcctgtcttatgcatggtggaaaataaaaagattaattggacacagcgtttactttcaagaatgtagtagtttagggagagaatcaagctaaggtcattaaatgttggttgagtggctgaataaagcaatttatagacaatcatagtgactataggagcaaaatttttcaaagggcaagacacaagatttaacatttagagtaatgagggaagagtcaattaatactgccttatggtattaaatttactgactgaagttgatcagagtccatttagataatgttctctcttggatcatgtctgtatgaatgatatcagtgaacaccttcccagtattgaaatgatgtgtgggtatagtttttgttttatttacaaattatttaatttttattcttagagatattgtcaggaactattagcattaggtaatatgattaccattttagagcctgaaaaaagtgatagagcaatcacaaatcaatgactcttgcttttaaaaaaatttaaaatgcaatataaaccatttatacagtacataaactgggtccacacctgtgaccagcaaataaactatacacattctataactagcagaatatttccattaaaatgaacttacgaattatatctgataattctttcattattcatcaagtgcttaatatgtattagcttctcttgctgaatgcagagatcattagtggacccagctatatcctcccagtattagtacttcaggcagatacgtaaaccaatacatttagtacagttttctaaattgtaactggaagaacaaactctactgggactttgtgaggattaagtcatactgacttggcctctttggatatatgtcttgaaggataggatgattttgcttttgattttacctgacatgagtataacaatagctgtaaaatgccttattactatagaatttaagtctaatgattatgaatggaggtgggaggggcaaagagagtgtacagagttcaagtgacttcctgtattgtataattttattggttatactttttgccatatccccacagagaaaactggaatcaatttctacttttctaaggagcatcgtaaaagagaggtgctgcctcttcccctctttcgttcatatatccacacatttctgagactaactcatcattcattaagcctagaataatgtgagtgtggggtagaggatggagtaagctcttatataagtcatgacgttatcataatctatcaaaatatgttaatttaatcagataatctgtaaacacaaaatttaaagtctacagagaaaatcagataatgtttagtaaatatttattgaacaaatgaggatgttgggattctttaataattggcccaagtgatggagatgagtgtttttatttagcttttatttaatacgatgaaattaaaatagattttatgtatcacaaatagaatgtaacccttgaaggtgcttggtatatgtattccaaatgttggaagagttcaagaaagaaggtgactcttagtttcagtattatcattgtctttctttaatctttgattaattttctgaacttaactagctatgcaaagagcagatggtggaacggtgccaagttaacattcaccatctgcttctcacatataatttgtaagaatgtatgctaaaaaataatatatagtagcagggacattctattttgtggttgttgatcagggaagctgtgccatttaagataattgtatttaaacatgaataacttcattaaataaacatagcaagaacacttttaatgagcaatctcagtatgttgttttgtcttttatttggtctatgaaatgttgttgtttttggtgaaaacttagaatttgctcttggacccttttcagcttaatcagagttggtttcacagtttcttagagaggtgtccctgtgtattaggcttctcaatgagtcgttttctctgcatgggaagcacatgccttagcaagcagcaacctcttagagtcagcagctggctaacagccttgcttctccactgtttcactttaccccaaatattaagtgtgggcctcttggtagactgaaactgatatgagagcaacygtctatcaaataagagagacagttaagaagtacttcaaaggaggcaagaggacaagagggcaaggcccaaaagtagttgggcctctgagccaggctgcaaatgtrtaaagaagttaatactaccaataattttyttatactttcaagtatccataaagcagggttatacctggacctatatgtgatgaatatatggtcttcagaggatctgsaaactaaaattccatgtaatatttttgtgtatagatgcacatagttaaaaaccattaccatggagttataaatgtgtgcagaagggctttctcctagactcctttcacctgtttcacagtggtatgccttagttttagtttygtttttttttaccaactgagggagaaaaatcacatataaatcagaaaaaaagataagacacaatgacaatgttattttaattgagtgaatgcttatattcctttagtaattctctactgtatttacaaccctaccaaagtcttcatttagtcatatgtcagacaaaccaacaaataatttatgtttacattagttctttcacgactaacatgggaaaatgtcattgtgctggtaatatggggacagtatgacattttggctaaggacatggactttagaatcaaactagagtttgaattctgctacacattactgattgtcattgtacatgtaggcaggctcttcaaacctcgctttctttatctggaaattggagataatagtatttacttcttagaactgattttgtcttaaaatcatagttttagtaatggcacgtgggaattgtgggtatgcccgttttcagcaaggtgtgacctttctgaaacaaatcctctcttgcagggggatctggtcctcagtttaaaactttgatgaaggaggaggcaaggtattggcttatttctgtcctgtggttctcattacttcaacagtcagtacctttggtatctacatatgttcttgcttataggtggacatgagatcttgttttactytttgccttcagaaatgatgaaagtttcttccagctagctraacgcagtgtacacttcatctctgaacctcttgggaaaggaaagacagtgttagaatgtacttttattatatatttattattattatagttgtaattsgttagtatacacctttagttcacctgtcacttgcatgttgcttttaatctctacaagttttttgttttctgttattcaggaaaagcactagagcatccctgttgttaacaattataggacatttaacgaacagtctttgattctaaagagagaaacatcattgtactctattctgaagaactagtcattgttggatccaacttaatttttgtcctgtgtaatttacacaggtgtttccatttattgttagcaactaagaatactgcgtgtcagtcatattttcacatagtagaaaaatcttgtgttgagttttgtgattagcaaaacataagtaaagatttctaaggccctttatttataagtacaatataatgaaagatatttacttctttgggaaaacatagaaatacgtatacgtaaatatatttcatttttttctaataaatgaaactttaagggactttgttcagctctccccagttgttttctttcattgttctacatttgtcttcatatgatataattttatgagcccatgagagctaagaatatcattgctatttcttcttaatgttaatattaataaatagtaaagaaattaaagatttgtaacatgaaaattttctttgtgtcaagtggaagtattgtttttctgataaaattgaaaacattattctcttacaggacttaaagatacattatttgaaataaagaacaacctttctttttttctttcctttgttagtcatcataccaaactgattgttcgggaaaagagccccttggtaatcacagttgagatcgtttatttgtctttaaaattttttatttcctkttaatatacaggttagcaatctattatatttatcaagaagaatacacttgcttattaaacctattaaaaatgtaatagttggaaaaaatttaacctcagggaagaaaaaaattgaggctaatgaatakaatggaaaaattattttaaagtcacttctaagtagctaattatgttaatttaatatttagggggtaaaagttacagttttaatctacgagattcacctaattggaatgagtttcaaaagtatgtgggaaaaatatgtattttgaatcacaagctaccagtaagttaagcagaatgtcatctgagttatagacaagaaggcaggaagcctggatttgtatgtagctgtttctttgataaggacagagcttcacataagtttaccatcctttctaygtaacataacaatamtctattaaatatattcttatggcaacatatgaaatactcattattatgtcctttttacagatgttgaaactaagggtatgaggatatgaaagatacagccacaggtacagtataaaacagtaagaagtagagcttggattagtattcaggtctgtctgactgtaaatcctaggcattctcataacaccacactgcgtgaccttgacccagaccttgacctaggtgcttaacttatttaagtgacagttcttaatctataagaaaaggcttagattaatttatatcagaaatctcattggctctcaaattccaaaaactcaattattcttgtgtttaaaactgaaccacgaagcactcatttaatatttattaaataacattgaataaactattaccatcataccttatacagcgtttcagaagtacaatctgtagacatccaaaatctaatgttaaatggctagcactgagaaaagtaaagaaacagtaatttgctatataatttgggaaaaattcactagaaaattagtttgctattttgtattatgttgtaaatgtattgagggaactgtcttcaaaatataaaataatataaaatactaacaatttgttttgaatagtttagttttgtcatattaaaacatgatataatacattatagtgctaaactgagattgataatataatgttgttggtttctgtcctatattaagaataaagcaaagcaatgtaaatattttaaaagtcattttgtagaagataaaactgaaagctaatgttgactgaaagttctctgccrtgtacttaaaacccagtaataactgaaatgtcaggaaattgaaatattaatattttaccctcacaaaatattaactccttatgttcaatactttttttttgatgtttaactttggtatttcaaggaagaatgaatgtactaaaaaacacacacacacacgtctttccttttgcaatgggtgaaaatttctagcaatcttgttccaaggtaatttattgtattttttaatggatgctttaawataaggataaataataccaaaggcattgttttaaaaatattttatattttatgacataaaataaaaatttatagctaagtttcttttagttttgctaatgctatattaaggtggataacgtgtctgtaaaagggggcctggaatcatctgtgtagtagtacctacatttagaaaagcattttaaaatccccaaaagcagtaatttgttttttggttttttttttttgagacagagtctcgctctgtcgcccaggccggactgcagactgcagtggtgcaatctcggctcactgcaagctccgcttcccgggttcacgccattctcctgcctcagcctcccgagtagctgggactacaggcgcccgccaccgcgcccggctaattttttgtatttttagtagagacggggtttcaccttgttagccaggatggtctcgatctcctgacctcatgatccacccgcctcggcctcccaaagtgttgggattacaggcgtgagccaccgcgcccggccagtaatttgttttttaaagtgtcgtttaacacttaagattctctgacagatgattttaagataattcagttcagatttgaatttcagagtagctactaatgacagaagaaataaattgaatttcattaattacaagtctgatactttaatcagtgtgtaggcatccagagtcttagtacctttgggaaaagaggacattagtaatctgaaatgcaaaaaggtaatccagcacatatttttgttttatcaacagtattgattgagttgattttatatttccaccagttagtataattgctaaagatgaaaccccttccccagagcagtwgaatttatagtggaatttgatatgatgtttactattagtraaagtgatgacatataaatatatatgtttaaatattttagagatgagaatgtgtcttttattttgtgatgtagctgactttctctgaagaatagtggtttccttttaattcaaaaattgccatttattccagagcagttatgtattgcatgcattaaaagaatcatctttaattctaacaagaaaactacatgaaggaattctaatctagaaatttaatgcatatttgggtctgtctggctctaaaactcaagttatttttacatcatactgctgtcaggtgacttcttccacattctaaattgcaaatagtcataggatgttagagacggaaggaacgaagtattggtcatgtagtaaaactttttggaagggccaaaagaggtttatggacttgccaacaaccaacagatagtggccagactagaatttttgtcttctaattactgatatttgctgtttccaagctcctttccgttaccatttaggagcagttaattaaacacctactctcttgggacattgtttatattattcaactctctctctttctcatatatgtgtgtgtgtgtatacacacatatatagagttttaaaaagtgtgtgtgtgtrtatatatatataggttttttgtccctcttcaggcagtgcatagtgaagtggcatatatatagtagcactcaataaatatcgattagtttgctgctactattttgttattgtgttcttcagtattgctattttgctcttttagccctctgacaactgtaagcaactttctatattaaaattcttttgttgaaatacctayattgatatctagtttcctgattataccttaatacatacaaaataaatcagaaactgaatgaaaaaatatgtatagggaaaacataataagctgcatcacttaaattttgtaaattctttgctcatggtaaatatagaaatgatgctcatagtgtgtttagtacaaaatgcagaatagtataatgggacataggaagggttggtggggaaaaaccttctgtgatggcaaagaagtagacatatattaagatgacaaggaggcctgtaatcccagcactttgggaggctgaggtgggagaatcacctgaggccaggagttcgagaccagcctggccaacacagtgaaatgccgtctctaccaaaaatacaaaaattagctgggtgtggtggtaaacacctgtcatcccagctactccggaggctgaggcagaagaattgcttgaactcgggaggcgaaggttccagtgagctgagattgcaccactgcactccagcctgggtgacagtgagactccatctaaaaaaaaaaagaaaaaacgaaaaggaaaaaagaaaaacgatgacaaggaagacattaccacatctctgttaggcattaaaaagactttatgttgagggagtataytcttctactcagtgagtttgtgtgtgatttgcatttgaatgcaaactaattatatttgctctaaagaaagtacgtatgttgtacttactgtatatactttgtttttctcataaggttgatgaatttttctcattctgttattttgtggggtagctagaagacgaagggttataggagaagcctgcaaattcaaggttaagtcaattggctcagaatgagtttttttcacctttgcctcattagcactactctttaattaagtctattataaatcacaaataacaaagccctttaactttatatatatagaaggagatgtgaatatatatcatatatatgcatatatacacagacacagatatatatacgtaggtacacactgtgtgtgtatgtgtaaaactatgtctatactgatttaattcacagttgttttatactcagagtaatatgtggaggctattttcttgtttatataaagaaagactaaaataaatactttaacctatatagcttgtaatttgttyctaattaagatttcattatatatagcttgtaacttgttactaattaagatttkattatcatttgactagaaaatagatgtcagtggttttggatgtacatttggtctcctttgcaaaagtggcctaaagttttgttttcaaatcactttggattgccatagttgttcatatgacttcactggttaaagatgatcagaataaataagtagcatctcattggccccttcctctcttaaaacataccagtgctgtattctagtgtgtggattgtagttgatatctcactctatatgggcatttctttgtatcaggtaataatactgccatcaacacacattcatttagtccctactacatgcaccttttgctgcaagtaaagaaaatacttcataagacatgtagatactttatttaaggagtttatgccctaattgggaaagatagaagcctgtgtaggatgaggtgattgggaagattatcatggaagatttcayggttgacgtataacttgtgaagactagtagaatttaactgtgtagaaacgaggaggcagagataggtggagagacaacatgagcaactgggttgggaaagaaatgagtgacaatgggttaataggaaggagaagggaattgaaagccagggtagtgtatggaattgatgaatgatmatataatttccaaaattacttctttaatgtgtgttctgaagggaggaagggtcccttgttcaagtaagtgtgttaatatacacagtgagaatccaagaagggacagtaacaagcagaatatctcatacctgatgggccgtctgtatttttggtggtggggtgaaggacaaaatatatgttgataagtactgttatagaatattgatggaaccaatataggatttagaggatctatttacctattgttttaggaagataaatcttctagagataaactggatacatagaggagtaaaaaatagtagctcttgaaatctctcaggggagagctgatgacagtccggtctggggtgataacaatgactttagaggataaaaggtaaattcaagacccttttcaaacaaacaaatgaaaaacctgtaggattttgtagcaaattgcaaagtaatggtaaaagygtacagtatatggtgactgaattcaattcttgtttgtactcttcgggataaaaagatgagaaatcagaaataagcccttgatgctctgtttgaggagattacaaatatgttggtgctgctaataagactgagctcagatacagaggagctagtgctctttgggagaagatggcgaattaaacatgtgataaacaagtgcagttggatggtaggactatccagcagttccatgttggaaattgtcctaagcagtctgtgagccttgtcctttgtgtaatcagattgctttctttttatcttttaaaaagcctgatgggaagccattaaaaaaaatctattcggactagtatggaaaaactattcacgaatctcattaaatttcacaagatttctttgaaatatactcgggctggtgtttatgatagcccaatttcataggcagagtcgatttttcttttcttttttgtcagtgacgcacatgaaattatgaaatagctttgaaatgactttaaatagtctcctttaaagccgtttcttacagagccatgtatttggcatctctaaacattttgcaggcaggtatttcaacgaagaacagagagctctgactgtgccagtttgaatcaggtataaattgcatagtaactaattccaaacttaactgaatcatgtatagcacaacttcaaggaataggtactgaagtattttgaattcttctgaaacatataaagtgtatgccacatcaaataacagatctattctgtatgttgtgttttcatgtgttgatttagtgtgtttgtgtctgagctgtaggcgtctcttgtctaccacgggggagggcgtatagygtactcttaattgtgctgttagtcagtcctcattagcactatggtgaggaaattgtttctcacttgcttttattctgtggtgttgattaaaagcagcatgttacatgctcttggaatactctgtgtgctgacttctttgtgtgctgttccaggttgttcgacttgcagattgaagaggttaattatataacctccctgttttactcttctctcactaacataacagaaatgaaaaaaataggagatcccttagaagtgtgtggactctaagttacttttgtgtggtaaagagtaggcattggtagagaataaagacatgcatattattggaggttggtcctggtgtgacttttctatagaaggcattttaggaaactaacttgtatacagaaatcatgttttaaaaataacattgaaactaaatatgagatgatttaaggacaaaatacctactatattcctttcatggttcaaatatttggaagatatgatctttcctttggcataggcaagtcaatatactcttcacttagagactatgatcccagttgccatgaggtagaacatttgtggttctgtaaaaaagataccaaaccttatcttataaatcaaaacttttctggcttcgtttgaattcacttttattctttcaagacttaatagttttgaactggaaagtacattagcattttctttgtccaggggtcaatgaatgagaaaattcaaggtcaaaaagatggaataactacccaagaccacacaggcatgtagagaagaactgggatttgaactgagatgtttaactcctggccaagaattcttaaccatatacagtcctccctcggcaaccatgtgggattggttctaggacctcccaaggataccaaaattcacagacactcaaatctattatataaaatggggtagtatttgcatgtaacctgtggatatccttgtatatatttgaaatcatytctagattacttataatccttaatacaatgtaaattctatgtaaatagtggtcataccatgtttagatataatgacaggaaaaaaggctatatatgttcagtatagttgctgkttttttyccctatgtatatttaatttgcctttggttgaatccatagatgtggaacccagagatatggagrgtcaactgtacttatttccacagccccagtctgtaactccctgtgctgtttcttagcctaatgcttttatacgtggttcagaatgggcaatatgttctatatccttaggtgtacaaataagagtatgcactatgtgaggatatgtgttcatgtgtgcatgtgtgtgcacacaaacggtgtatatgggagtcagggagctgcctaaaacagattgacagtgggagttgggcagtttgaggaagctgagcagaatgaaaaagcaggagtggattcttccagtttgtaggttgataaaggtgagctgtaaaggaaaatggttttgtcctacatgttttcctctggttttgagtcattmttgttttggagccactgccatggtcatcatcaacctttctgttccctttaacccagtaatattccactgcaccagctactgccatattagtggtttacagaacccagattcagtggtacaatgagctcttgttcaaggaatgaggtttctctgtgttacctaggctggagtgcagtatgtgatcatagcttactgcagcctccaactcctgggctacagtgatcctcctgccccagcctcctgagtagctggggctataggcatatgccaccatgcccagctaatattttatttttttgtagagacaggggtcttgctatgttgcccaggttgatcttgaactcctggtctcaagctattctcctgccttcttagcctcccaaaattacaggcatgagcaacygcacctggcccagatttcttaatgtaacatatttcgataatgacacatataagacaccctggaagtcctgcaaatccatgattcaggatatgggtggagaattcagttttactcttttttttaattaaaccaatattttccttactgaacaatctcaagcacatagagtaatttatttttattctctggcacttgtctcccctgagtttgacccttcctgtttctccttaggacttgtgtatttgactaatagcttaccagttttcaattggaaataagtgattttttaaaatgtagttttcaggtcatctcacataagtatgttttgtgtcttaattagattttaaaaataactgattaaaaaaagtaactgattaaggtcatgtctttaattgcttatctatccccattcagtgtctaatatgatgcttattgcagtcattagtaaatcattaatgagctaatgctgtctgtaaacattcatgtaatctaggtgtttctactatgagtcttaagaatttcatttttaagcatttttatatctacacaaaacaagatgctcaattacaagtatatttggggaacagagaaggaagtattttgaaggcagaagagtgaaacaggttatgtaattgataagatgccataaaactgatatcttatagttccagaatattaaaagaattatgactgtgtagcacagtacagttaacaacaatcctgaattgattttacctgaaaatactattttggtcatgtactgtaacatttgtacrgatacacttagcaatttgactaagtgtacatgtattaatgaattcatttttagtttaaaagcatggtcactggaatcagattttctagctttgagttgagactgtgtgatttttggtatattatctagccctgtattttagtttaagtaatttaaatgaagtaaaaaaataaagcaaataaagatttacaggtgaaatagattctaataatacattctatctcaggaaggtattgtcaggttaatatttctagtctttaaaacaggacctggaaaatagtaagcattggattaatattggctattgttatagacaactaaatattctacaatatgacattaatataaatataaaataaaatgattggaataatttgatttcaggtttagaaattattttaaaatattctttcttttattcaacaaatatttgttgagcgctttcttttttcgttagagttagcaacattaatatcacctgtaatttgtgttatctttgatctttatagtgctctaacatttacaaaggccttccacatattatcttaggtggctttcctgtcaaaactatgaagcagctaggaaaaatgatattgctggtttatagatgaagcacctttccataggagtgcaaaggtttacctcattgcaagaatgaaagcctaggtcacttctcttttcactgtaccataccatctcctcttatgtatcttggccaggcatgttggcttatgcttgtaatcccagaactttaggaggctgaagcaggaggattgcttgagtccaggagtttgagaccttcctgggcaacatagggagacgctgtctctacaaaaaattaaaaattagccagcygtggtagtgcgcacctgttcctagccacttaggaggctgaggtgggaggattgcttaagcctgggaggtcaaggttgcagcctggatgacagagcragactgtctcaaaaataaaaaagaaaaatagaaaaagaaaagaagaagaagaaaatcatcttgcttacattcctgtggaacatattgttgcctctgcatgttacaatgtgatcttttggatgtagggcaaatctgtgttgacttggagtcttctaaggttggatcacagtaattccatccttattatttttttaaatttttagaaagattttctgaatattagcaaattttgtgtattttaaaattgaaagtatttgmtttattgagaaaacatttaaattctgatgtgtctttttattcttttgtgtctgtcttacccaaatcctgctttctctttttattttttcctgtttgcgtatctgatttcccagcctcccacattgtagattccaagaccaacctggttatttttctttaaacacaaacagaaatcttaataaagggtggggggaacaaaactgcccatcagacatgtaatgggtttctctaatatacctgaatgaattgattactctagcagctcactcagtggaataaaaagtgaaaggcactcgtcatgtagttgtaaatttattcattgcaaagagcctccattaattttatgtaatttggtacttcccagtagttgctactggagtggttttgtgtaatgatgtcctctggaggaactctattgcatatataaattttaaagggcgaaaagatyctcagagaactcacaatcttaactgttgttttgttcctgtgtgtactctcacttttagaaatgcgttcatctgctgtatttctgaacctaagtatgtgcagaactatagcaataaaattatgtacaaaccagttgatcctgtgttccagtaactatctacctcacctccccccccgctcccccmaaaaaaaaccaaaaaaattaaaaactagtcactgtaggctctttttattttaaacccccttaatcaaatgatgctagattatatttgcttaagatctgcctgatgtcagtgtacagtaaaatgtgttttactgtacccttggtgcactacattttaactgttgttgtatctaaagagtgagatgccttttcatgcctatggaatccctgatgtaattgagaacctaaaggagtaatgactttgatgaggcagttttagccagtgctgagctctcaacttttattactgaatatcaattttgtatacaaggcccatggcagtcttaatatgccttcatattttatcttgggtgtgactggagaacagttgggaaagcagaggtaaaccattaaaatgatgaccatttttagcatttttactgtctacttgtgagtttgtatttagctattttcatatttaccatctacttgcttttgtgtgggtgtgtgtggattcttcttgcttccaaattgtgataactaaatttcctaattgtccttaggtcytgtcctatacttaagtggaattgttttcttctggaattctctttcttctgttggtagacagaatttcaaaattcagtttcttgtttgttggcatgtttgtttgctttcaattagacaattcgattttgagataactttactgagaaagmaaaagggagtaatcaacagtgacatcaaactgttttagtgcttttggaataagattaaaccaaatgtttaaattttgttgaaaagcagaatttagtgagactgtgcctttttaagaaaattacttatttgcttctgagaagggtgagatgtttaaatttgcatttgataaagtaaaagggaagacagaacactctaagttacatattagcctctttactactattggcaaaaataagttttgtttaaagttctgcctgtggggctcagcagcccctcacaatctgtttcctgcccttcagtaaactttctctgaatgacagtgtttgtagatggaggaaattaatttaattgtcagcaatagatgtgtgtatttgttatacttggtagtactggaaaatgggaggatggttacattagatttttgatcctaaaaataattatgagtcatcaaagtgccagtaaagcaataattgtgtaagacattcaaaacstcttaggtcagagaaagaattaagtctctgagaaggctagttgaagggtaggtgataggacttatttgaaaacataattctggtttctctttttacatccattagaattgaagcgcttcccaccaaaacgattaagatctagcttgtggcctgagataaatattgattcttgaagtagaaaaacgatgatttttgaatcccatctctttaagatatgcacttttaagacttcaaatggccctaggggattttagtactttgtatggaggaaaataagcttgaatgtcttttccacacctccttttttagtattttctttttgatctttaagctaaaactttttttcatctattccatttttttaatcagctttgtatgatgaagataatgttattctaaagaattcataaactgctttttatatttaaattcttatattaattgtaaaaaaacctgttatttcttaaattaaaaataatcttcttgagatttctatagaactattgtcagcttttaatagatttatggtctcagagtgaaggacaaggtattaaatcaattaagataataattatattttgttcgataatatcaaataatatagtgacatatagtgatatgactttttaagcatatttgtgcatctttataatcaattttactgttgtcttatgctttgaaaatgtatttttctttaaaaagaaggtttgtctggatctgrtggccatatcacactcatttattctacaagcgtttgttgttgccgagaaacagaatgtaagatttgtgtgcagtaggtttattggagagcactcccaggaccaacacctgtgggcctaaagagagttggaaagagggagttgaactttgatgcggtaggaatagagatgtgagtcagccctatggtgagctctggagctgggatggcttttgagtttggtctttacagtcttgcatttaccagggaaatagtgcaaccctgagtggcacagctgtgagtagtcagcagctaatactcctaaaagtcaagggaaggatatccttgattctgaaggggaatcctgactaggggatctggccagtgccccacagcatctgctgcagttgcccaccaagtatcagactttgctggggacaccatgctaaacaaaatcagatatgctctgttcgttcaagaagtttacatctagtgatgaagatatattgttcaaaattacacgaattaaagcaagcttgtggttgtaatagatgctagtgcatgatattatgaaagccagtagagtaagaagctaaagagcaattatgaagctataggtaaaatacttaaaaatacatatattgctggtagtcaaccaaatctttatgcaagtttgttactggtttgccttctctaatataagttgatcgtgtataatatttttcatgctactttgtgtggacattgttttagctactcaataactgaaatgcctattaatactcaactcaccactccctggaatactggataaatctaatttagatgattcagcggacacaacgataatgttatatttaccyactcacttggaagagtgttactgtatacacattagacctgattatttgagaaatcacaattgcagctatattttctgctgaactttgacgttgcaggagaaattgtattttctaaataataraaaataatagataatagaaaaaagagagctaataaaggaaggcttctcaggctgaatttcaatcatagttaaaataacaatactatatctgattttaatgatctagttgccaagtgctttatatgaattattttatttaattcttattagcctgtgattataaaaacattacacagattatgtaatttaatcttcataatatctctatgagataaatgctctattatcgccattttacagatgaagatactaaatctagagtcttcatataactagtaggcagaaaaaccaagacttaaggcatcttatttgggattcaaagaatactgttgaaattgcccattctccctgccaactagtcttcaatctgtgtcacttaagacttctggacattcctactccagaaattttcttagcaaaatattatgtttatttaaaacaatgagtaggtagtggaaaaatcaaggattacttaaaacataaatgttcaacaattcagaggcaaataaacaactttaaaaagtgcttccctgccttctatagatgatgaaagttaattaatagatcaaggcaaaggactggccattactcccattcttgccccttgctctcattgtccacacagcatagagagagataattttgttgaattttactagttcgctacctacatcctttcatggcttcccattgtacttcaatatatattctttagtttggtgcctagcactccaaccacagatggtgtcctcaccaactttgttcaagtttacatggtttctttcagttcttctaaatgctaagctctttcccacctcaggcctttgcatttgctgttttctgtgcctagaatgtgctttcttctgcttttcacgactatgtttttctcatccttcagatcttgaccaaaatgttacttcctcagcagagccagtccaatattatcgtactatttaaagtttgtttccctttttactttctgtctttgcaccctgtgtccttcattgcatttgctataatttgtgattattttatttkttcatttggttatttgttacgtaggttctttacaaagctacaaattctatgagtacagggctggtgtctgtcttattccttttctttttttttttcagagcttggcagtcagtgttttgtatcagctgtggtaatataatggtctttctagtccagccatggtgaatttgacatttttacttgctttttgtttttaggccctttaaatgcagaacaaagatttaaatttaaatacagaaagaattgttcattttattggaaagtcatatgggcccttatacagtgcaaagggtatattatctgttatgagttaatattcattttggttgaaaatttatatattatcctctataacatcagtgagggaagctacacatgaagtaactcagttttagacagattgactgtcaaatragtaatgattattccacaagacagatatcaatggccataatatgctatattaatgaaatacrtttactgagcatctactttatgcctagccaccttttagtttttacggttatagagaaacataaacaatctttcttcatggaattcatagtctaatgaggggagaattattaattagaaatcacttttcattgcaaattgctttacattcatgtccgtgctaacagtgatacaaatgcacatattatatatccattctgtgtgtgtgtgtgtgtgtgtgtggtgttgtgtgagtgtgtgtttaggttctgatattgtttatgctcatataggtctggtagccctttcagaagtttgaattgacataaattgaagactagttggcaggaagagtgggcaacctcagtagtattctttgaatcccaaatgagatgccttaaaaagctattctcctttaaatttactcctaaggcaattcaggcccatacctaaaatgaattagatggatatagcttattgtaaaaagtgtttagtttcttaaattgtgtaaattgtgcataatttgggcagtttaaattcagatatatcttgtcttaaaaagtcttattttgaagtagtctctcaaataatatcttycatgtgttaataatttacatctttaaaaagatacctatctgattcactcactagtagtgtgtatatatatatgattgaaatacttgtaaagagtgcctgtttgcaatatttattgatgtattactctattgaaatatcttcacatttcttctaattgtattagccctgtcctttaataattttagaataatattcagactcttattagtttgtagttagaaaatgaaccagcagagaatgttttttgggcaaaaaagctgtgattaagtaaaaggtaattatatgatgctaatatttatttttgtacgtcttttactttgagcctgtaagtttctcactgcattaactgcgaactgccttaactcatgttaaaatggttggagtctcttttagttttattaatttgccaagcaattggttccactttgtgataaaaaaataaaaattgatggatactttaattaacctaaagcatttaataaaaatgacccgatttacaagaaaaaaaaaacattaaaaagtggggaaaggacatgaacagacacttttctaaagaagacatacatgtagccaacaagcatatgaaaaaaagctcaatatcactgatcattagagaaatgcaaatcaaaaccacaatgtggtaccatctcacaccagtcagaatggctattaactaaaaagtcaaaagatgacagatgctggtgaagttgtggagaaaagggaacccttatacattgttggtgggagtgtaaattatttcagctattgtgaaaagcagtgaggcagttcctcaaagaggactactgtttgacccagcaatcctattactgtatatacccaaaggaatagatattattctactgtaaagatatatgcacacatatatgttcattgtatcactactgagaacaggaaagacatggaatcaacctaaatgcttatcagtggcagattggataaagaaaatgtacatatacgccatggaatactgtgcagccataaaaaggaatgagatcatgacctttgcaggaacatggattgtgctgcagcccattatctttagcaaactgaagtgggaacagaaaaccaaatactgcattttcttacttgtaactgggagctaaataatgaaaacacatggacacaaagagggtagcagcagacagatggtgagaggagggagaagatcagaaaaaaatatctattgggtatgacgcctcctacctgagtgatgaaacagtattaacaaaccctagtttgtgtagtatgtcaaaccttcgtgacatgagtttacctatatcacaaacctgcacatgtacccctgcacctaaaataaaagttaaaaaaaaaaagacctgtaaattcctagattaggactaaacgttttcatttgaattaaatatttaatcatgttgttttatttttatttcattttatctttttttgtgactttcagtatcacacatagaggccagttaccttgataatagaaagtgaaaagtaaacattataggctgaattccttatagaagtgaattatcaaaaccattttaaggtttatttacattttcctttaaaaatgcgaacaaaataaacattatcctgaactgctacaagaaaccaaattgttaaatgcatttattctctctttaaaatgttaatgacttagtttcactgttgtgtaaagagtaattgaagatctaagtttcagcttgctatgtcaaagagcgagcagttggttccatttgccctggacttttgtggatttagcactaaaagccctgcatccagggaaactttctccttagtcccaggtaaagtgtaaagtaggatggttggccactctaatgtcaagctgaaaattcttcttactagtacactcttccaatcatgtgtctrgacagctattctttgtatctgtacattttcaaattctttctaatatgaagttttcagaaattaatttgttttatactttaggtgtagtgtcttatagttttcctatgagttaggtggcttttcctttgaaaatggttacagattaaaaaagtaaagcaaaatctcatttgtatagttcatatttagataattaatttgggtagatagcagcctaatatgtagaaatgaagaagttattttaataaatactagtaaatctgtatggtgtttttcatttattactgataatttctttttctgttgttagaataccagaatatagaccattaaaaatggaaaaacatcagttttaaaaattgacattttcagaataaaagaacaaaaaataataatagtatgtttttatttaaggtcatgaaactaatttaaaactcaagagtgttaggaaggaggttttatatagaaatggaaatgcaaagagatattccttttttctacaaagctgatctgtggtatgaccataagctaattgaaaagaaagcatgtaaaattaaactcataagtgtttggtttccatgtggtcagtcataaggtattgagaccaaaacctgactcatgtatgaaggaactaaaggtggtcaggttcaaggccttccaactagagataaagcatttatttctattgcatatactcttgctgattttattttgtctcttagcattgtcactttgtgtgaagtagctacaatttttttttgaagaaaataattccaactttgcccagtggccaaaaattatactttaactcctgacagactatataaaaaaatgtgtgcctctggtcccaggaggaaccaaatggctcagtcagcacaattcatcattactactggcaaaaataactcagcatgcctgcgctgcttggtggtgagtcagtggcatcatattcatatactgacagcaatttttttctttttaggaattaccctctgtatcctgagccaaaacacagagcagtaagattaaattaggtatcagtgttttaaagagcaaaggctgatgttattttaaattattaattcattttaaaaggtcaagtagggtttaggtgctgaggtgatgacagaggtcaatttgatgatggtcttgatcttggggagcttatatcttatagaaaatatgagatgtacttaggtaatattttcagcacagaatgctgagttactggtaatattcagtgggagttcacagggaggaatgagaatgaatacttatgattgggagggtttgttttatttattcagcagtttgaatactactgtgttttaataggaatttttaacaaggagatttaattgtagctctgactgatccaatagtccagcagaaatttactgaacaatcagaataagtgagatatttaaatgaataagaaatcactaacatacattttgtttcataagttagtcatgatcycatggagggacacagacaaatatcaagtatttgcagcaagatatgtgttataatgcatttgtaaaggatacaatttctttcttatggtatatatttgccttaagcatttatatgtatttttttcatcaaagccttctatagtcactttcgttcaaattggaaaatgcccaccacattctctcattacaaaagctagtcttcatttgtcaaatcaataagtcaaatgagacttaacttgagtaagaaaaagtatgacttcctttttcagtttaaataaactaactatacctccttccctagcatctcatttctgattcctaattctaagataaatggactcattgataaatagtctgacttacagataaaatcatggagtctgttctctagttagcggcctgataaactaaaaactgctgccttccccatttcttgctttgctcttacagaattctccccctagaggaaagctctcagttgtctccagttgcttggtgctcaggagtttttaagccctggccagtgcatcattgtaagatttgtaacctggagaagatcatttgtgaaagagcaagtggaggtgggaaagaagagtggtcaaaaagagcattctgaaggaggtagttgtaggaaagaggagaattgaaaatcgtggatctggaaattgattcctgtgaaatcatccatacccatgtgtaccctggaatgactttgcattttgaaagtgattcatgaaagacagattatgaggtatgagtaaaattttcctagatgaggagggaaaaggagacagttaaatagttcagagaatacacagaaagtcttgaaacgattgtgatgtattcaggaaaagtagaaatcctcattgtgtcttcaggatagaggtatgatgtaggagtggcagaaggtgagactagaaagcagattgggttctgtttgtgaaaatctttgcgtgctattctagtaatatgtaatttagactttacctatgcaggcagaaggaagacacagtgaccttttagctcggaggtgctattacaggcaggtaatttatatggcagagtaaaggatggagtgggtaagttgggagatgagacaggaagcagacacacagttgggaggctttattcattttttattttatttatttatttagtttgtttgtttatttatgtatttatttatttgaaacgggtctctctctctgtcacccaggctgaagagcggtggtgttatcatggctcgctgcagctgtagattcatacatttaaaaatgaacaatattttcctccacctctgaaattgagatgcaattgatgataagttataaggttattggtgatttttttttattttaaagatacaaaaattaatgatataaagtctgtgaaaaatgtaattcaagtagaggtgatgttggcccaaaaattaggaattgcaggtggggatggatagaattttagagatatttgtaaagaagaaaaatctggttgacatattaaaaatttctagacgtatgactaaatgcttctaaatattagaacttaaggtttatgaattattgaggcatttatgattctgctgcaaaatagattaaaaaataatccagatctcatggaatcacactgttgtgagttctgagaccttaaacaaaaaacattttttaataaagaaggaactgtatttatctagccacctctctttatgtatctcaatactggtgataaatggttccaaatatagttttttcttctttttaatatctctctctctttttccaatctcttgggcattttcttctatcctttcmcaatttttttcgttactatctcacttttctttttgccctatttgccttaaaaacaactgctactcacaaagcactgtctaccttttgatttcctccttttctacctctccccattcctactgcccttttcaccctctccattgtggatgaaactgggaatatgtacagtacagaagggaacagttaactcaacatttggcccaagggttatagtggagactgactcctaagagctcaatttatactaatgctgccttttgattcattttttttttcacccaataccatactgccaaactccctagttgtttcttcaagtcagggtttacttttgcaaagaataaatagatcaaaataggaagcaaatacagttcttgaaaagtacaagaacttttagagagaagaggctatcataaaattatacacttttgctagaatgtttatctgattcttatatacttggtaattaaattctgaagaatattcactttctttgtacagaggaatcagcagcatccagaaccttgtatagatagctggcttcttagacccagcctggagactcaagctgtcttagctttggggctggacagttgaaattccattcaaaaccacaaggcatttttcttttaatgtagtttggtgtgtgtgtgtgwgtgtgtgtaaaataatgaataaaagttgtattacacttgtcrtgttcaakttgtcacttaggttgtattgaattctttttcgattggtccctaaaaaatgttttgtgttcttgtaccacctgcagcacctattgaagagatataatttacttattaaactgctgatcattttattttacactgcagttatttgcaaacccatataataatactgtagaaacagcttattgttttagtgctaagtagagtgacaggagtttgcatgctggttgtccaatcaaaaatgaattctcaaaacagtccctcacattttattaattggaaaatcaaaaccagtatctactgggacagcaccaactaaactttctggtggaggttatctttgtagagtttgtatttacttccagatcttttctawtgaaatggctctttcacagtcatttatttgccattgactgttgttccctggcaattaattaagaagagggggatagagttcacttctattaggttccctgtccctaccccattccaaagttaaaatctttgatagttggctgtttgtgaattgcagtacatgcctctaatccacaaaaattatttttttggcaggaaagaaaagccccttttttatgaaagattttttttccctaaatatgcatggagatattttgttgtgatttctcaagaactgaatgagagtcccaaattaaaataatttgaaaaaagaaaatgtaaaattccattttgcatggtgcctttaatcaagactctaatgtcatttgtttggttattaagtttccatgtctaagattgaaatggtttatatttaaattaaattatataaaaatttatatgctatggatgctaygtgttcataattttgaattgtgatttaattctcataaaacttcacatattagcacctcaataatttttgctcagaaatgcagaattattatagttaaatagcagagtctctgaaagtatactctgaaagagcagtctcatggtgatttcaaagagagttctgtttagatgacaatagagaatttatatcatgaaacattcgttgaaacataagtgttttcaatatttgttgtctacttagaaaaatgattttgcatttatttaaattatttgtcatattagattttatgtgccatagaacttaactttattccatcwtgggtagcttgaatcattgaagagagaatcccctttaaaaggcctgttcatagcaaagacatgaagtcaacctagatccccatcactggtagactgaataaagaaaatgtgataaataaacaccatggaatactatgcagccaggaaaaaagaatgagacatgagctttgtagcaacatgggtacatggatggagctggagaacattatcctaaatgaattaatgcaggaacagaaaaccaaatactgcatgttctcataagtgggagctaaacattgagtacacatggacacatagaagggagcaatggacaccagggcctacttgaaggtggtggggaggagggtgaggattgaaaaactacctattgggtactgtgcttattacctggatgayracataatctgtacaccaaccccctgcaacatgaatttatctgtataacaaacctacacatgtacccctaaaacaaaaataaaagttttttaaaaaaagaaaaggcctgttggatgatgagagaagttctgttcactctcctctaagcaccactagtgtgattgaaacatgaggaagagaagttaaaattaaattgaatggccttctatgtgccaggtacatttccttttcaactcctgtagtatagaataagaaaaagagagttgatcaacaattgtactcctatatgtgataatactacataatttagtatataaaacaagaggggagacgtagcagattatgaagaaaaagcagtggtcaaacagaaaagaaagatttagttgaactttaaattataatccagtgaattccttaggaaattgatgaggattcattttcctaatcgaaatttaattgtgttgtgttttctgtttctccatacatgtgttgtctttattaaatgtcatttatgtgtatgtatgtatgtatgtatgtgtgtatgtacacacctacctaccattacgctatagacatctgtgttttcaacattgaacctatcaatagagccacatttgttttatttttggaatgcttatttaaagtagatcatgtttaattgcaaaagaactataaacatttgtacctgcagtactgcgtcgtgtccatcatataaaaaaataattatsctgaaccatggacatgtttgtggttgtaaatctgttctcttttctctgcttgaagtgatagtgtttcatgatatcagtattcttcaagcatttatattagaagacaccatgaatgcagaggtgaatgaatcatgttcttacatgagagatttaactctgagaggccattgtaaataggatgtctgtacattttgaagtcttaggcttcatatgaaaaaaaaagaaattcctgtaagatctttgagtaaaaatgttacttgtaaaggatgtgccaggtttcaaggacttcccagtagccatagtatgaatacaagaaacacagttgtgcatttggaacttcaattcagttataccrtgaactgaattgatgaatttactgagttagaacttttttcgtttttttgacagctgttgaaaggatctttatagagactccttcasgtagcaaaacttttttatgtatcagtagtctgcagcctctgacttagaccatttgtgttacaaatatgcactacgtattgcacagaagcctgggttattgaaacatgtaaccatttcaatatcaggaggttctgcatttttcctgttttgtcacttttaggaaattttgccaggtgctggatatgacaacaactagggtggagaaaggaaggagacaggtgtgcgcaagtacctrtatgtgtgcatgtctgtaactggaaactagggaagattgcaagaagcctggagtcctgaatagttcacagatatcacagatttaggtcttggcagaggtgtttcagcacagatctgttcactagtgttaaagaccttcctactagggcctatatctataaggtttttstcatgtagaaagaagaataatattactttaatattagattcaaattttcagggatgtcarcattactatcatgaccatattgtgtaacagtttattttccataactattttctattaaaaggaaatacaggttttgtcaygctcatcatgtttcttactccccacactgaaacacaaatgttcatctttattgagaaactgataacttgattgcctctgtttcacatattgatatttgctttttaaagtacattgacacaaagtagccagtattaaatctacctgtatcccagatgttttagagaagaaaaaggaaagtcgttcttttcctattagtagtcatcatatcatttcttaagtatattttatgtatacaatacacaaagacacctttactttttctattttaaatttctcttaactgccagaaaatctctgtttaccattgcttttagaactatccttaaacataaaatcctaatttgctgtgcccgtaactgataccagcattctggaaccaataaattatttaaaatccaaataactgtgtatttcaaagatacctaaagggacatttgcaaaatggtcatttgaactatgaattttaaatcatctcttggtaaccaaggcttgtaaagaactatttattactgttgttccagatcacgagactttttttaggctttattcatttaatggttacatttcttagattattagcttattcatttattcaacaaatatttgttgagccctttttaaagtgtcmgtcatttttctagtcactggtgatacaaaagtgagcatatttaataaaaatatcttcatgctcatgaagcttccattctagtgacagaaaaaagataaattataaatcaratagtgattgtatggggaaaagtaaagctagaaaggaaaaggagttgtgctgggagatgttccatttaaaacagggtggttagggaaagtctcagaacagtaacttttgtaggaagacctaaagggggtgagggagcagctgagtacttccatggggttaagtgttctaaccacatcaaatcccaaatctcygaggcaggggtgtgtctgctgggaatttcggagaggagagttgggttgactggtgcagagtgaaataggtgggaaagcagaagagggcaaaagaggcattgtgtgtggggagtgaggaagatcatagaataccttgtgagggctttggcttttctctgaaggaggtgagaaaccactggacagctttgagcattaagagttactgaagatgtctttggaaaccctaaccatgctttgtgtaatgaaacttatttatagtattggccagttcttctgcaccatcccccctgccccgatttccttatttattcagaatattgaatttcagaagactttatatttgtaacacacatacctcaaattagctacggcaggtttttcaaagtccagcttcaggtgatttcaaatatacaacagtgtgttagtgtaggtttaggcagaaaccagcctgctgctgctgtctttctccytggagckctagcaatgacattttgaaatggaaatacagatgtcataaagctattgtagaagtaatagcttttaaaggagattttcagactaataaaaatttctcacctcaattaatagaaatgataagaaatgcagagaagaaggagtaaagggccttgactgatattttcctggattggaaaggaggagtaggggtacaacagaatgaaagaaaaaataattttgacctaaaaagccaaaagcatctcaaaaccaagatgcttaggaatcctttaaaaaatccagctggtaaagacatataattagagtggccatatgtcctgttttattcccaggacagtaacgatttatgcctgctgtcccagtgtaattattaatagcacccctttcattcctcatagtgtcctggttttaatgataaatttgtggtcacccaacatgagtctgtaactgtgcttcacaccttttatgttattagaagtcatttcaatttttggtgttttcataattttagtttaatttagagtattagtgctaattagccccaaattttgttttccctttaatttttttcccctcttggaatggttttataggtttgtatttaaaaaagattggagactgttgacttttctggtacttcagaagaatatacatttcttattttaagagatgtttatattgaagtttattttctctattttttgcctgttgaatgagagattattttagatttaaaaattatatgtggtttccagagcgttgctgttataatgatattaagtaattatacactgaagttatgaagttttcagttttcatttacgtattttataaaagcattagtttggtttatggaaggagattggcgagaaaaatgtttctttttaaagggaaggttggaatgaatgctttcatatgtgtgtccagatttgctttgcaaatacartatcccacattgaaataccactgtactataaatattgctataacagtcttatggagatgtaattgtggaatcaggggaagagaactaaattaagagtcaggaaaccttaattctcattttgttttcttggtaagtggaatgatgattttgccaatatcacttaccctgtctgtgccttagaggtctctgacctaaactaagtcactgggctgtttggcagagccaaggagtttaatatgtttgaaacaattttataagttatgatttctatctaaatctgagattgcattaggtctgagggaacaaggaaagcccttttaagtgagatagttacatttctttcctaaggaagttctgaatcagtaagttaattacctctctcacctagggaatcaattagctaattataaagagagccaaggtcaaatttaagccagtctttccattagtctaggaaactacttagttcatttcttcatgggggaagtgcaggagttaatgtgaatagtttgacaggtttgacagcttgggcaaatagacctaagtagacctttcacaatgacttctgtaatttattgaaagtaatgtgcattaatagactgtcagagatacccaaatgtctatctttcacatacaaatgatttttggattaagtgcaccactgacctgcatgattggcatggataattaaattttaacttgtgtctttgcagctaatctagctcttgataactgtgtttcagtgtaggacatagctttcatcagatatactggagcaaaaatgaatatgtttacataggctaaagcatattcctttttaatgaaagttcgttcatatttgtatttattgattaagagtagatcctcatactatccttgtacgattggcctatctttgatgtaaatgatatttttatgaaacacattttcatcagtgcaatgaatcatccattcctggatacctgccaatagatagttatgaccttggaataaaataacaattgggaaaaataatcagatttccatatgtaatgttgggcaatttaaaaaatataaggtgtacccttcctctagtacacttaaacacacagaattgaaagaaaaatgaagttaatcttttgtgtattattgtatctatggactggaaaaaaacaatggctaaaaagaacaattatggcataccattgttattgaatgtatttttaatgtgtatttgaggtggagttgagggtggaaagttttacaaactgagatatctgattctgtggggaaatgaattgcgtccacttatattatcatgtggttctcacatatatatttgaaattaaatgactttctctcctaactaaaggaaaagaacaatgtgtttgtcataagggcaaaactgttaacttcataaaattcctaaaataatatatatgaacaaagcagtgatttttccagtggtcttaaaaagcttgataaatgattgcaatgatttaaagtatttttagaatgcatttataatctgggtttcaaatttaaatacaagttattttatatttatgagaagtaataagaaaaattcaatagatckytaaagaaaacaaaaacaagttaaatatttgttagatatctcttactgatttgatatctcctatttttaagtgtgtttgggtaatattaagaatgcaatctataagaaagaacacgtgtgaactttcagttatctcagctaccagatagcgaataagccatacatttcttttagagggaagagtattttgtttcttgaaacagaaaagttactaaaygatgctgttatatattatttttgtacaataagtatgttttggagttgtaaatatgattatatatatgcagtcatccttaagattgacattcacgaaccatgaatatgccttacatttctgtgtgcccattgctggtgttggacttgaattttttatgtggtttttcaataaagtagtctgtttagaataatttcttcttatatattcttttttattttgttttgttttgttttttagcgaagtgaatggaattctcagaattccagttgggaattgtggttgtttttaaattcttgcatctgtgaagggaagccaactagaatgctgtttacttctcaaatatgcgttttattttaaacaaacttttaagtgatatgacctagaatatgtcagatctgacagagttagaaacatttgaaatagatgtaaaatatcattttactaagcaattcatagggatagacttacttatttctgtacatagcactacagaggcaactatatatttcatataattccatgtgagtcccttggaagaggcactatagcgtggctgcttttttatggccgtctgttactctttctatcacaaaatttaacactttacacaatgtacacttggaattagttcttcctaccacttggtaactaatgaaaagtatatgtgaaacttagaatctrtggaagcaagtcatttcataggaggaatttggaagtctttctcttaccaaattataatatgaatgatttttgcttaraattgttcaactctactttgacataatttttgayaataaaaattctattcactggaatttctgttaaaatactcatgtaaagtggctagaaacagaatagttggactttctcatgatttaattcaaataggacaatctgtttcaataaaactacaagaggaatttaaggcaaaggtgctcatttgggcttagcttaaatttttataatgcaaacttggaggcaaaactgtgactggcacacctgccataatttaatgtgaatgaataaacctttgtgtgtgactgtgtgtgtatgtcagttattgatagagaatgtgtaagagagctgtttgataacagacactgtcctcaggtgaatcaggaaattggggaagtaaaataaccaattgtttcatttgcatgtaacagataggaagaataattaagaaaaacaaacaaacaaaaaacacctgtttgcctagtgtcagttgcacccagataagtttatttttctttcagcatcagaaaagctagatctttttattaaaatccatttatctctagctgagatgcatcagtgattctgttaaataaaatttagtgttaatactgttatttgagagacattttagtttgattataaagagatagattcaaatagaactaaaaatggttttggtaaaaaaggaacaggttaattttttcccttctcatttgaccattattttagctattaagtaaagtaaacaaataaaaaaaaaaaaacgtgctgtcaagtaattctgaaaaagaaagctttgggtatccatagaattattttaagaaagtgttccctgaccttgtctcaaaggatttgaaaaatgtgaacatcttttataaaaaktaggccactaaatctgatttcctttatatgaaaatattcgtatgtattgtaacaactatataagtggcagttaaatatgttttcttcctaagtgtgatcatctgttttacacttaattgaagcaaagttcttccagttttctgattataatgatgacatggcgtgcaagaaaccagagcgtgttaatcaaaccttatgattaagtacttaacttcatggaaaatgatcattatggacgttcagtaacatttatttggccaaattacatgtaaagttagttccattcttaatactataaagctatgcatttgtgtatctcattattgaaggaaatttagaaatcttttgagtttgaattccctcatttcattttgcaatttaaacaatacttttagaaaatcagtctgcattgttacatggaatataatttgtcaaccagcctctcccaagatgacagtactgaagactgtaatgtgtttcaaaatattcattttattctaggtgttgactacttttaggattgccttaattaaaaaaaatagagcttctaggaataaaagttttattgttcaccatggatggttgagaataatataatttaatacctcatttgaaataaattacaagtgacattttcttgtaggcttttctactgaaagctaggtgaaacagaatatgtacttagtttaatggtgagattttatcaaaatctagttatttttaaagagattaattctcttctgtctttgcctccatgctagtttttaatattattcacaagatgtgattcagaagctgtctcatgaaaataatatactagagctttacttttaattgtacttctgtgtatctgcaatgttcattatactctagaatacttcgtgaagggagaatagattttattaaattgtgaagcatgcaatctgttaactattaagtagaagaataatctggattatacatagtatactttccagatgcagtgatgaaataggaaactttgaagcacaagaccataaaattgtagcatatcagactttgacaataaagccccagtcacacccttccattttcccccattktatgccctgctgcaaagtaagattttaactttgatttcataacacctagctcagtgtcttgacacataataggcactttaacaaaagctttttagtgaatgaacaaactcaaatctttagcaggtgttttcaaagggacaatgcgtttatttgtgctgggaagaagtatgtggatagccagtaaaaactatggagtacaaatagtggtagagaatattcttgtatttttcacttgtgtctgctttaagacttttgaaaatgtgtatttctgtacatttcagcacttaaaacttgccactttttcttgcatacccatttacttcattttaggtctctattcttttttttctcagagagtagtttgctttacagtttatcccaccactgaaatattatttgagttcctatcttatcgggatgttggatgaactatattttccgttattatacataatttttttcctttgttttttctaaatgaattgtttctggaaaggaatttaaactgtgagtaattattattcagctttcctagtgtttgtgaaaacagaagttgacctcatatggtgagagctatgggaaaacttgggtgtaacaacaacaaaaattaagcaaagggaaaaaaaatcmacagtaagggcaggagagtatgtttcaatcctttaacattttaactctgaaaaccagttatttaatgctaaaattcagtttttaacgggtttttaatgggagtttttaatattagctgaatagtatttgatagtaaagaccaattatcttttgatttaactcaggatttgctgaggttaaatcttattatttgggaaaggggcattattccctcttccattattattgaggaggaaaactagtgtattcttcatagctccatttaataactctctcttcctctcttttatctttcagctttcccttcacactcattctttgacagtttctcctcttttctctgtttattcttccatcaagtttattaagaccctgttccttgctgggctcttccaagacaggtagttcatcctcaagttccaaaaaatgaagatgagtaataagactatttcatttctttccttttccaaccttgacaaacaagtcttttattatgatatgtgtcccttgagcgtcactcggggcctctgtctrgcctgtgtctaccccatgcaggaatgtagaaaaggtccacagtttgactcatttttggggataaggatttcaggccctcagtttctgcctcatccagacacttgtgcagtagtcacactgtacaaccgactgcactggaccttgtcttaggctgattcrtgatttaaatatgttcccctaaacctgtagatttsgggatgtatctgggatttgtgcaacagaagaaatggctatatatgagagataaatatgtgaagcccctgaatagcttttgaaaacgcaaagcgatttgaagattactgkcactgttggctcattttagcaataaggaaactgagctattgagaagtgaagtgaaatgcccacacctatgtagtcggtgagtggcagatccttgactgattctctctgctaacttgagggccagtaaacactacactgtagtgtttcaactcactcaacatgtaaacagaattagatttcatagtctaaatattgaatatgtttctgaaagttattttagaatactagttttgtttaatagattaggtagtttagaagagaatagtgtgaacagttgaaaccaaatatacctgagtgtgcatccaaactctgctacttaatagtagagtgaacctgaacaggttatttaacctctttttcttaatctgtcaaacaggaacaataaacacttattttacatggttgtggtggagtcaggccccaaatccacatattcagaactattgataccagagtaaagtgctccagggataaatgaaatccacagacaatgtccagcctcagtttatctgctactgtggctcatttcttcaacaaattttagaagtttctaagagctagcaccattgagttgattgatgctcctaaagagcatcttttacttacgtaattttttgaacatttttattttcaccratcattgaattgtgatattcatatttgaacgtgactttaggaaggaaatktttttagtagcttctttgtcaaaatggtttctgatatgatttgccataaatatatgtggtgattttatttaactgtaagaagtaggttatggggctggccaggtatggtggctcacgcctgtaatctgagtattttgggaggcccaggtggactgattgcgagagcccaggagtttaagatcagcctgggcaacattgtgaagcctcatctctactaaaataaataaatgaataaataaaaaataaatggatctggtggtgtgcacctatagtcccagctactcaggaggctgaggtgggaggatcacctgcactggggaggtcaaggctgcagtgaaatgagattgcgctgctgaattcagcctgggcaacagagygacaccctgtcttaagaaaagaaaaaaaaataaaggaaagttttataatctacaggccatttttgtagcaattgagcagttctacaaagtggttttgaaggactcacatgtttttggaatatagcaccaaaatctcgtgatctgctggtgaaatataattcataacaccatgattgggaacagtaaagaaaatacaggattcaaaagtgtataattatggtcatttgttatcaccactagttccttaatctgagacagtgtcatttattatgcaaatgagaaggaaattatgtaatttaagtttatttgaggaccatgttactattttcccttacagggtacaacgtttaaataatatttttcaatgagaaatcatttataatgctgcgtaatttattgattatgaaatatctttcctttgcattcatatgtaggtcagccaaaaaaattcatctcaaaaagcaccrtaatttttagattcttctattagatattaaatcttggaataaacatttaagatttagggactttctcttttaattaagcgagatagttgtttaatacaagatgttccaaatttggtaatgatgcagtctgtcatctactgaatatgtcttctcttcactccttagtgcttttgttgagctttggtgatacaactttaattttaaactgatcacattgtttctaaatctttgctagatggcgttcatctttatactatatggaaaaatatgtcacattgaaaatagattagtagtgttttaaaataaatttacaattatatcagcaatatatttgttctggagccatttgcattagctttattaaattagaaattttttaaatgcttacatgatgaaaacaactgaaggttagttttatttagttagaagggacattaggattagaatggtcaccaagtccttgtctctggtacacataattgaactttctttccccttcatttagtttttttctgtaccaaaggaaggaaaatgctttcactgtaacaaattaagagtaaattatattttgcttacttggtaactggattgttaatagataattaagttgaagagaaaaaaatagaaaactttcgcttgattccttttctaatattagaaatgaggaattgggaagaaatcgataataatgcatgtaattaaagcattctgtgttttggtaaaaacctgatttagttacatccaaatattagagaagtctatttatattctctgatattttgcttaatgcctttggctagctgaatagtttttgttttaatttcatggcaatttgcatttatttttaaaactttgaaaacagatttctctttttggcttcaacgcacatactacatttggtaaatgtaatatataacactgtgaattattatttatattaattataaatattattgtaaatattgcatttggtagaaatgaatttccctcaaggtacactcaattcagagaatatataccagacaaaatctcaggaaaggacatgagagttttcttaacaaagaggtacattgttatgctgttacaycttaaggatgaaaatgtttgattattgctattagagtgaatagtgtttccctaacattcttctcttacattttggctaaagaattatattaatttaaatgaaaatgaggtaaatgtctaggaggaaaattgacctcgctaattataggcatgtgcttaatcagtgtcagtgattgtggatttctatgtagtcagagcttatcaaaataagactttcataacaaaatttggccstttgcctttgatcactgattatttcagtgagatctcccaggtgattttggtggctagttacatcattaaatctatatgaatgactccttagaacacattggcttgaaaaggggagcttttacagattatcctgctgtgggaggagttagtttcattattgagttttgagtttcatctaataggtagaaattgaacttgctccctggagacaatgatcagtgcagaaagccagcacgtcttactgtatggaggtcattgttgaatggtggcctatcattagtcttgatcttttttctggtaactcacaactcagggagttgctatatgtttctgattttgctctcactttatgaagtctcataatgataatgataaatgtttattgaccacttagtacatgtcaggcattgttttaagtttttatattattattattattattaatcctcacaaccactttgtgctgtcattatgcccattttacagatgaggacactcaggcatagtaggattaaataaattacccaactgtccagtcctggtaggtattaggaaaaggatttgaatacatgtaatyggagtcttagagccttggggcaagcccaactttgtaacccaagcttcttcaatgttagccccccaaaataaggactaaatctcttatttgagagtaaaagtccattgtaattaacttgagtaaacatttaaatgacwgataatcttggttatctctggctggcatatgagtacagattgrgaatgtcttaacgctaggtttgaaagtggggggaagatgggagcgcctacatctgtggcaaccctgtcacttgtcaaaaaccaaagattttattttctttgcttggaattcttcaatttccttcttctctaggtagattttttagagaaataacaactacttttgataatctacaatttacaggcattttcagattaatatagcgagctttagtggagagggcatgggatttggagtcaagactctcggattatgtcgtggctctgcccacaagctgtgttatttttaccatttaatgtgaactcgttttcttcactctcttaatctataaaacgaacactgtgatacctattacatagggttattctgaagactgaatgaaatcatacatatgaaaatgtgttaaaaaatgtaaagcatatgtggatagtgtcttatggttgttgggtttttttaagttgaaaacctcatattcataaaagagctctttgttccaaatgataacttttcttatgccctgtagagcagccaaattaagaccgctagatcagttttatactgaaattaaatattgggaatttacttatccatcattggtttgaagatacctaataccatttagtaatcttcaaatcatatttgacttaaaccagtattatacgactacagtcacatactattaagaaaacactgtgtgcattataggttaaaggatattaacttttattgcatggtcatacactgtttcatagtatggtgcacatatgacttaatagaaatcaggaataagaaactttttaactgttttcaaactgatgaacaagtatagtatgtcctttccttaaaaaaactatcatatttatgactttgattaaaatttctggctagttttactgatggtatctattatagaacattcatgtttgcatgaactaactcaatttgtcaaaatgattagctatttgtttatagtgtactttctgaagacatactttaagatgtgtcaggaggactgagttttataggaaaaatgttgggaaatgaggcatgattgatcatcctctgagataccaaccagacatatagattattcagatcgctaagaaaacttgccataaataaataaatttaaccgtttataacatagatgttttggagctcctgcccacccagattttttttttaataaaacatctattaaaccagaattatagttgggaaatactgccgtatacataaatgttcttggaaaagcccagtagtttaattgctgctttgagccttccactaaagacacattatactcataataaaattctcctatttgcccatgataatgaataaaattcttgtttagacaaccacctttaggccgtcttttttgttctttttttcccccttcaacttttaaatttaggggtacatgtgcaggatgcataggtttgttacgtaggtaaacgtgtgccatggtggtttgctgcacagatcatcccatcacctaggtattaagcccagggtccattagctattctacctgatgctctccctcccctaacaccctccttgacaagccccgatgtgtgttgttcccgcacatttaaccatgtgttctcatcattcagttcctactttataaatgagaacatggcctatttggttttctgttcctgtgttagtttgctgaggataatggcttccaactcaaaccatgttcctgcaaaggacatggtctcactgttgaggctatctttgtcagttgccagataagttccatcctgttagaccaattagatggtataagcatttacttaatacttagggcttttgtgatatatatgccaaatgagagttttcaagtataccccaaaatgcaggcatgtcgaataaaagaaatcctgtgggaattcactgaaatagaataatgacaaataattaagaatatataagttaaacaaatttgaattcatacttcacaccagtattgcacaaagcacttttgcaagtgtggtctcagttaatcctttcagtagcttctttartaggtattacttactgtctccattctacaggtgatgaaactggtttcttaaaaattttctcaaggacacacagctattaaggctattatgtgaagataggcaattagataaatcaaaactaataaccatgacagtttgttgcatgtagagctcagtttctgctctgtgttgctggaaattctcagcagcaggttaactaacatgctttttaaagagtaaaggcagaggaggcacattttaaacaaaatcacaggccagtctgagagggaacagctagctttgatggaagtatttattttgtgtagaacccaagctcagtgttcatacgtggaaataactttgagggactcatttatctctggatcaactcatcaaaaattaaattaaaacaaaaaatatgtaccttttacaagctgaatactgaaccagttgttccttgtaacattttggtctcttttaaggctgggagcaattaaattaagcaggcagaagagccagataagatattcaaggagcaaactgtgcwtgcagaataaacattattgcatttagaaaattatgtggtgagatgtgaatcatataccagtaaatcactagacaaatgtttttttaaggctttctatgyccatcactctgggtagggaatagtgaactcaaaagtaaagagcatgattcagggaaatctggagaactggatgtgtactttgggttcttcccttaattacctttggatcattggatgagtcacttatctacagggaggggatagcaagggttaaaagcacagccccaaagcaggggcctgatgtgagccctggcttcccctgcttatttgctgtgcgatcttggcaaagtcatttcatttctytgtgcctgggttttggaatataaaaagtagaataatagtacccaaatcacaagactgttgtgaaaattcagtgaagtaaatctgcgtaagaattgactacatctcagatactgttctaaacaatttatatgtatatatttacttaacattttatcatttcattgttattataattactactcttactctctttgagcctgtttcttcaactagaaaattagaacatgaaattggatgatatttaagaacataactacagatgtgtaaactttttttgaactttgcagagaacttgtctaatgatttgtaggccgccttgtaagagtaaaaattaatactggcagcgaatgttttatattttaaagacaaagaaataaacacaaaccaactaaagaatgctgtattttggtaatcaaaatatatttttatgaagtatttagtaccaaggttgtggtggatttggatggagagcargctttgtgtgttttgagaagttgtgctatttgaatagggatgattaggatgtgtggccaaggaggtaaaacaaggtagttgttaatcataaggaatacttatgaaatttgtgttgtgccagtaatgggccaagcaccttacaaatattagtttgtttaatcttcaatggtccaagcactttacaaatattagtttgtttaatcttcagctatagcatagaacaattaaataatgtgctcaagatggtacggtttacctaggcagtctggcttctgagttcatacttttaactccttcaccttactgtctctgaaaagcttgaagaaatgtttgaaattccctggaatacttggggtactgagtaattgattatagccggaccatagagtttgaggatcaggtggattaaggtgagataatcctgggaacttggagaaatagtctggtcattatcataataatccagacggggtaactgaggaaccagactagatggttactmtggtaatggtgaggaaagcttggtggagtggaccttagcctctttgggtcacagactcttttgagaatctattaaattatggcctttcttctcagaaatttgtgcaacacataaaattgcgatgaaatttcaacaatctcctaaaccctttattcgatgctttactcagctttgcttttccttttttgtaataactagttttctgaagttctgtaatttttctttactttgtatttgttttgtgttctatgtgttytcttttaataatatttaaaaatatttcactttctttagatacctgttcatcagtcactaacaaaatctaattttggtgggctcttgatgacttacttaacatatccctaattattgcagtgacattttctatatttttcttcttttgtttcttgagtacaaaagtgatggtagaccttgtggccagtacataggctatctttacagtgatccacatcattctatgtctwttcatatacacttcttatttgtatagcagcatctggaataggaaaattatgtgcataaataaaatacatcaatcttacattcaaaattgtactttaaatggcttcttgtcgtgattctgatccaaaattttgtctttgcttctaggacatacttttttctttcttgagcatggcgatccccagggtaattacagtctagyggtaagggagttcagaagaggttgggtgactgattattgtttgttttgtttatcatttggtgtgacagtaataattgggtcccccttggctatgtagggaataagtattgccaatacctttgggaaattgctctagtaaaactcacatgctatttaggattttgctttaaaaaaatgcaatgtaacttggcagtttggttagttgaactcaaatttatattcctcaaatcataaaaaattgtttattttctccttatttctttgattattcttgaacttttattgcattttggactgttaaaatctctattatggaagtataaattatttctttctaataattacaaatataaatattctcaaaaatcatgagctattgaacagtttgtkttgaagaatatcagaaaagcaattgtagaagtttctatattttctgcctttgtctttataaaggaaagttgcttttacatagtttccatttatgtaatgagtagaatgtgagatttttcttcctccgatatgtaatgaatgcatgtaccctacatatcatttaagaaaataaacccgatataaagagtattagcaaatcaaagaatattttgtttcattatgaattactgaattcactcttttgggaatgagaaccttctactgatttgaattatattccaaaaaagaactgacagtgtatataaaccttcaattatatgccataaacaagaaatgatatatttcactgaaatcacataagacatgtatcttttaaaattatttaaaattctgtttaaagagagtatattgaaattgtattacacctttctctttctttgtaacagagagtattgtctagtaatctgtaataaaagatatttgtgaaatgtggaatgtataccatcacggatatcccctgatgttccttaggactatcgtgaaatatagaactgaatatatgcacactgaaatatgccatgccagcatccctttgtatttagtgtgctaagaatggctccattcctctcctgtggaataaaggacatggattttgtggtgaggtttctcaccattgctctaggtgtggaactgcrctgtggttgttgagaacaatgggaaccaaagctctgaataaatggagtattatcatgtatcaagggacttcaaaacaaaatacaactccattgttcgagtagcacacacttatatcatctgattgtgtgtgtgtgtgtgtgattacttttcacttaacatatcctatatcttacatttatattaacctgttagtagttctacatttaatcctgattatttcttgagttaawttttaagccagtgagtgattttaaattatgtgataataaaatatagtgtatttctagtctgctagttgtgacctccatatatgaaacttgaatgaaggcacttgcagtgctgcctaaatgactgcccatcatgcctaaatgagtgtgtttaatctggatagtgaaaaacttatggaactgaagctttttggatgctttggggaaccaaagtcatatatcatgggaattaacattattctgcttgccattatatatgtgcttaggctgagttagatactctagttattagctactcttttttttttttcttttttgtttagacggagtctcgctctgtcaccagcctggattgcagtggtgtgatctcagctcactgcaacctctgcctcccaggttcaagtgattctcctgcctcagcctcccaagtagctgggattacaggcgcctgccagcatgcctggctgcttttgtatttttggtagagacggggtttcaccatgttggccaggctggtcttgaactcctgacctcaagtgatctgcccacctcggcctcccagtgctgggattacaggtattcgacactgtgcccagcctagtttttagctactcttaacagctgtatttctcaatamatttttcatttgtgtctactggtaagatttggattcactttgactggtagcctgtcatgcagacactaaaaagaagggaaaaggaggcctttgtccccctgaactacttctgactcttgagttgctgagaaagtgttagtctattaagtcttggatattgcaagtttagcaattaaaaatgtctttttaattgaatcatacttcaataaatgtatattaatagcattcttataaactaggaaaatgttcctttaaasgaaatatttgaactgctttctgaaatcccatgtgatagtgttttaggatgttagcagtggggcactgttgtactgatgtaacattatttttattgttacagggataattttgcatcataaataacaacagatttatttgtgaccctgcattcacatatgcgatgaaaatcatttagtttttcaaaatgtttgcaatttttttttcttgtcccttttcagttttctatctgttgctcacttttgatcacatctgtctgtctactctttgatatgggccgccagcttcccccacaccatgtggcatccatggtacctttattctaatggctacttaaaagacatttacatttactaactgaaggtttcagtgttctgttgttttggctattgactatcatttttataattatatacttttagatctgaacaaggcatttttattttctattctgtcttcttagactgcttctagtaccacagaagtattaaataaattgtgagtgagatggggaaaagacaatcctttcttacattgactcaaaaacacatatcaaatgccagagtactggactagacactcaatgggacttgattgttaatccttgtacttaattattctgttttttgagtagtgatcattgattgactcattggttggagtgagatttgatgttacctgtaaatttgcaactggcattataattccagcaatctctttccttaattacttgaaagtttcttttatgcacaaaatttaccttacgtatggatgcaaattatctcccaagagtggttcttttttgaggaaaggaatgcagtttgttgtagctttattataaaattgttcaytttccatttgctggattaaaaaatgcatgtttgatttttaaaccaaaattgacaagttcactttaaagataaatgaaacaattgaaaatgaaatttgagagaatattattgtaggtggtagtcattaagacattccaatttttaaatagatgtgtgaagattatgatttggggagtgaacattagaggtgcagagaattggaacttcctgcatgattctgtgttattcagatgagtaagtggttcttagaaatggtgaaccgcagactgtggatgagaacagatctggtcatcagaaggaagcaaacagtgtaagcattactgaaacgtggaaagacccagagggcctgatgttttgctgcagcctgctctagagcctacccgagtagggcatattgagccagagcaggtgggaattatatgcaaacctgggaatttagctcctgcccttggctctctggagggtgactgtcaggcaaaatatttcaatctttgcttcactgtggtcacagatacaagatgctgtatgctggatttattattttttaatggatcaccttttacatgcaaaaatggttaacattcttaaattgtcacttaagacttacattatttggtatcatttgggacatatgtttgccattttattaagaccctttgaaagaagagaaagtcaattcattaaataaaatgattttgatgcctataggtgttttaaccacagaggatggggatggtaggtgggcatgtgggcatggaaaatgtgttggcccatagagttgaatgaagaaggtaaaaggaacaagttatgtgtgggaatagattttttttttcctatcaacttaccagtttaggattgaggactaagaaggcaagtactatgttttgtaaggtttattaatacaaaggtttctaaaatttatagtgattaaagaacttctgtcgagtagttcaactcaatagctaaagtccttccttatatttcatgtcttacttaggctgttgagttgaggatttctgagtggtaaaatgtacctggattcatgtaccccagagcttaattataaataaataaataaatttttaaaaatgtacctggattaaataaagtttcagaatccctgggtactcctcatttctaaggaataattatcatgtttaaagggactggctcacttgagaaataaattcgtctagtcttaaagtatctattcttgtttgtttcttgattttcttattctcctatggcatttttctctggagaagagagtaaatgttcaaggccaaaaaataaatgtataaataaaaagcctctctctttaaattcatcccagtgaggaggatttcatgcatttctttagtttgctattctggggattagtgtaaatatcatttgctgaaaatattgttgtaataatttcatctagtatggagatccaagatagttggggtacctcatggtgtacctgaatatatatatatttttgaagaaatttaaaaaacattgtagagtagacttgtataaaacaacaattcttcaattatatatttaaattttttaagtatttgacttaaacatataaattaagacatttaatatttataattctaagtttaatctaaacattcagtagcatatatttcaaaatcagtaaatataattttgcttttatcatgcccatgtatgcaataatttgtgattggcattgtccatgtgtcaatcactggacttgtgtgtataacttttttttttttttttgagatggagtcctgctctgtcgcccaagctggagtgcagtagtgccatctgggctcactacatgctccgcttcccaggtttgcgccattctcctgcctcagcctccagagtagctgggactacaggcgcctgccaccacgcccggctaattttttgtatttttagtagagatggggtttcaccgtgttagccaggatggtcttgatctcctgacctcgtgatccgcccgcttgggcctcccaaagtgctgggattacaggtgcaaaactacagaaccaggtcaaagatgatgaaaaaaaaatatataagtagcaagaaaaaattgtgtctctctatcctaagggtatgtctgaattcttggaaactctttgatccagttgcagatttctcttatttaaagcatattataaatatttaattttttagatgactccaggagatgaagttgtttttaacttatgaaaagaagaatatgtctattgtaaaacatatgccagctgaagtataaaaagtagctccaccaccaaaatacgtgaattctgatnnnnnnnnnnnnnnnnnnnnattctcctatggcatttttctctggagaagagagtaaatgttcaaggccaaaaaataaatgtataaataaaaagcctctctctttaaattcatcccagtgaggaggatttcatgcatttctttagtttgctattctggggattagtgtaaatatcatttgctgaaaatattgttgtaataatttcatctagtatggagatccaagatagttggggtacctcatggtgtacctgaatatatatatatttttgaagaaatttaaaaaacattgtagagtagacttgtataaaacaacaattcttcaattatatatttaaattttttaagtatttgacttaaacatataaattaagacatttaatatttataattctaagtttaatctaaacattcagtagcatatatttcaaaatcagtaaatataattttgcttttatcatgcccatgtatgcaataatttgtgattggcattgtccatgtgtcaatcactggacttgtgtgtataacttttttttttttttttttttttttgagatggagtcctgctctgtcgcccaagctggagtgcagtagtgccatctgggctcactacatgctccgcttcccaggtttgcgccattctcctgcctcagcctccagagtagctgggactacaggcgcctgccaccacgccctgctaattttttgtatttttagtagagatggggtttcaccgtgttagccaggatggtcttgatctcctgacctcgtgatccgcccgcttgggcctcccaaagtgctgggattacaggcgtgagccactgagcccggcctacttgtgtgtataacttttaaattttgaacaacattaaaaaaatcagggccaggtgtggtggctcatgccaataatcccagcactttgggaggctaaggcaggaggattgcttgagcctaggagtttaagacaagcctaggtaacataatgagaccttatctctacaaaaaattaaaaaaattagtcaggtgtggtggcatgcacctgtggtcccagctactcaggagactgaggtgggaggattggttgagctcaggaggttgactgaggtgggaggattgcttgagctcaggaggttgaggctgcagtgagctgtgtttgcaccactgccctccagcatgggcaatagagggagaccctgtctaaaaaattaataataaatttttaaaaatcagcttttatttaaacttatcaataatgctgaaatattttgaaaccattaaaataacttttttcaaataatcttcagtgttgaatcattattacataattcattatataagccatttgcaattgtaatgaagtaaccaaaatatcaaaaattaaagtagtgttgtgatagaacttctcaagactgcatgcagaggaagttgtggactgtcactcatttctgtgtccytgaatccttagactcaagaatatgtggtggaaggagcatgagaaaatctgtacatgggaaggataaagaatagatatacataaataagtatatttaaatatatatacataaacatttaaaaactattttgaaattcagataataaaagaggctctgtcctgctcaggtacttattttctctaattaattattaataccttatagttgaagaataattttgtttgtttgtttgtttttttgagatggagtcttgctctgtcgcccaggctggagtgctgtggtgtgaactcggctcactgcagcctccgcctcccgggttcaggtggttctcctgccttagcctcctgagtagctgggactgcaggcatgtgccaccacacccagctaatttttgtattttcagtagagacagggttttaccatattggccaggatggtctcratctcttgacctcgtgatccgcccacctcggcctcgcaaagtgttgggattaccagcgtgagccaccgcacccggctgaggaataattcatttaattagtctgatctttattaaataattgcttgtagcacatttcagatttaatctcaaaaagtcctgggtataatatatattctgtaagcctgagaaaaaagaagaatgcttatttcaataagtgctttgagtaccataatgccctttaacacattggtatgttatgtaagatactattttgctatatttttatgtgaacattcagtgagcattcaaatgaggtattcaatctgctagcaaaatgatcaagacacatactgtatctaacaactgaatacatatgaaggctcaggactggtatagtagtatttagaggaggtgagtaaggaggtttctgacaaggatagaagaagtcatcatagcagcaggaaaaaaacccagtaaattactaagttgtgtttttatttatagatctttgaaaaaatcatttttaaaaattttaattgtaactggatatttctgtttacaagtctaatatttaaccatacttgagatggccatatgtatttttatttgaagggaattaatatctatwataaaagtgaaagactttcaaacacgcaagtgatgagtgtctgaaggagtagcgtaagtagaaccctagtaaatatgttcttacagttcttaggggctagctgtggttaatttttagctctctctcccagacagcatgttttgtgtatctttgcatccagaatatccattctgtgcataaataaacacatatcccccatastgatatacttttttttaatctargagaatataagttaaacctaattgctcaatattagaacccaaataaaattcagtgaaaactccttagtacttacatatctctttactctttgttcagaagtagaatcagaattcacgtattttggtggtggagctactttttatacttcaactggcatatgttttacaatagacatattctacttttcataagttaaaaacaacttcatctcctggagtcatctaaaaaattaaatatttataatatactttaaataagagaaatctgcaactggatcaaagagtttccaagaattcagacataaccttaggatagagagacacaattttttcttactacttatatatttttttctcatcatctttaaacttgttctttagttttgcagtttaacactttgccaactatctcaagcaaaaactaataattataccacctggtaagctcttcagagcttgggttggcttatgtttgttatctgtggcccatttcttcctgctcctctcactgcctagcatgggatacagtgcatagttggtgcctaataggtgctgctggttgattgattaattgatatagtttgattagcatggtggactgtgacatacacaaatgtccacaagggaatagatggtgttccaatctaaggaggtcaggccagaaagtgttttaagctgtgtctgacatgtgatatgcttaagctgttctcttaacatgtgctgacataagtatctttgacagtccttgttcacacagtagccacatgaaatatgggacaagagctgttcctgtacatgtcctgattccagagagggatgaaataaatgtgtctggacttgcraagacattgcatctgttgtggttgattgactggtgtggagcttgttaagagggaaaattaaagtgcccagcattttgtatgcgtttacttatggtatggatcagtggatctcaatctgraattcatatttgtgtaacctgggattaggtaaaaataggccaatgccctggccctaccctaaaccagttaaatcagaatctctagacatagggcatgggcatcatcttttaaaaaagcaattctcagtgtgcaaccagttttgaaataggttgaggttttgtagaaattaaaccaaagttgggaaagaagaaaggctaagaaatttaatttccactcaccttgttctcatttacttagaaggatgcagggtctagaataccactgtccagtaaaagaaagctagataagcaattttaaatgttctagtagacatattttttaaaagtaaaaagaaatagttggaattaattttagtaacaaattttatttagcccaatatgttctaaatattattatttcaacataaaatcaatattaaaatatgaatgttatatttaactttttaaaatactgtatcaagtcttctaaatacagtgctaactgtggatttgcagcatatctcagtttggagtagctattttttgagtagtcaaaagccatatgtgactagtcagtacaatattttgtaaatatagagggtaaagtgctggaatcgaaatcaggagaccttagtgttagtttggctagctagtgactaatcctttgacgttggatgattcactcatcctctctctggacttcacttccttttatttagtatgagasggtcagtcttgattgggagttttctagttttgctccagaaagcaccaggattgtgtaagcactccttagcagccatcatcgaggagaaaggaggcacactgctttaatccctttctccttcggatatacttatgtttcctggcataattttgtttgaggggggaaaaaaaggaggaaaatataggctcaaaagatcactaggctaaatattctcttgaatcttttttgtcagcatttataggactactccaggaagaggtgaggcagtaggtagcctgtttctgatacttaaaaatatgcattggcatatttttatacatcccaggttacatgaatgtgaagtccagattgagatctactgattgataccatataagtaaaggcacagaaaatgccattttaattctttccctcaaacagtctccacaccagtgattcaatcatgacagatgcaatgtctttgcaaattgactggatttagaaggcttgatacagtattttaaaaagttacatatcccactagtattttcacngaccatcttccagtcaaggtgtcaccatggcaatgaccctcagatgtttcctnttaaatagtggaatcccttcagtagtggcttaagtgactcagatttgagaagcagaaatcctagatacctggaactatcccagagtgatagtggatcacttatgctactgaacacatgtttgtggtctaaaattaacctaccctcaaactcagaaagtgatccctggatctttctgagatgtagttcccatagtcagccagaatgagggctaggattactctggctgcagggtttttgtgacttgaaatgtgtttctctctggtaaatgtataactgacaacagctttaataatagttatatagatgccaatatgggaagcatatgagtttggttcataggtagactagtaacctttctccgtatcagatagataaactctctgctggaaacagcagatagaaaaagaaacaatttcatgtcattgacccttgaaaatcagtctctgccggatttccacagtcaatgacatgagaacataatcctagctcaatatgttgtttgcctttaaagccttctgtgatgttttctgttaggagtcagtcaaggacttacatgtcccagattttatctactttgctgttttattaatttgaggaaaaaagtggcattgagtgggaattgtgaagtagagaaagctgagaaggtttctatctatttttaggatgcttctaagaagtcttagcactatattctgtgcttacaggcagttacaaaaaaaattgttttggaaagagccagcccaaatatcaacagctatttctgaatttttactaatgtgcacaaacgtaatttctctagtcctggcctgctcatgtatcaatgaaagcaacttnttgtaagactcaaagcaaaggaaggaaggggaaatccaattttgttgtattaagygtagcaactttcacaatgaattaattaaataaatgttttccaagctgattggattctttggtctaaatagtttttgctcagtatttggcacaggtcttcatgcaggattctaggtgaatagagaaagcaaataaatgtgacctttgtaaggctggtatgctttntatgaagccaaaaggtgcacaratacacaaatattagcccagtcttattttttgtcctagaaaacttttcactggctggcggcatctctgtgttcagtctttggcatcattactgctcatcttggttccctgcaggctttgccatctgtttaactggtaaagggccccgtctcatcaggatcccttccatccaattggaaatagagccctctgattggcctttttcctttcctttgtcccccctgtttatttggaaccagcgccaatatctcagagcaggtgtctttaccttagccagttaccttaggattagcaattactggaagrtaaaagatctgcagtggagggtggagcatctgttattgcagtgatcttggccttggatggagtctagggacttggagaaagactaattcatgaaggtgaggcactccctggggtgctctcctgttgcctctcaccttcgtaaatgctttggcactttcagatttaattctgtgatctatcttaagtttaatcaggccagcaagtgcatgtgtggcagagacccactgcttttatctgcctgacaatatattagcctccttcccttctgtgctyctgtgattcttgcctgacagttatgcagagccacttaaaccttcactgttgcctaaaacaccttggaaaatcattttttaaaaattcagctcttgcccttaccacaagcatccttttgaagtttacccctttctagcccccagcccatatcttgactcatggtctgcagcctggggaatttgggggagttgccaggtaagatattttctaatctcaaaacatacataaagacctgcataaagaaatgtggctgttgaaaaacatctacatgttttcctaacaagcatactctatcagtcaagcgaggaaaagcagggagagcagaggaaaaaaaatagaataacccccaaatgcctcaaatttaatgacctaatttcctctttttctcccctccttgtttaatcttcagatttcttttattacttactattctttggcattatacattttgtcttttgtttttgtattatgtatctattgtactataagctactcaaaataacttttggaaaataaaaggagtatttgtgagaaataaatatctctcagtattagaatttcaattctaagaagtgatttattaatcatttttacttactaagccctatcgagtactttctgggaagyaatgtagtttatttgttacaggtattctggcatcagactgctggggtttaaactcaccaagttatacacataaatcactagataattatcttgggcaaggtgcttaatatttttgagcctcaggtttctcctgtacngtaatgttatgggggctaaataagtttatatataaacacatgtatgtatgccttactcatcttacagttttatcgttgtttctgattttattacytaaacgatgcctggcataaaataaatactctataaatattagctactactgttactatttactctagttagtataacaatcctcagatagatgtaatcctcacttcacaggtgaggtaactggagccgaagaaggttatttaacctgctcaaggtcataagctggtgagtgtgcagagtgcaaggttygcacccaggtttgtctgaccacaaaagcctcctgctcagccaccaaatctgccaagactgcttcaatatgacagcatagtgaaatagatgtggctggattgtccagaaaatcatgcttgcatccatctgtacaggttcatttcccagtttttcttttctgttagttataatttaactcgggattacaaatctatgccattagattaacacaattttttggcataggtctcctgtaagtcttgcttctttgagagacacttttaggaagggagagggccaagtttattccgttaacatcaagtgcttctcctgagagaggagtcatccagtggagwtgctgtatgtctgtttcataatgcacacggcacatgaaagatacatgggatgatgtttatgctgcttgccagatacttctagttgtccagtgaatgaaccatcatgtgaaacagagaaataatgagtttttaaatagcttattggccatttattgcaaatttaacctttgtggtaccatctctgaccatagacctttggatgcagggcaagctagaggagtttagtgaatgtcctctggcggaatgagtgaatgaatgtactcacaaatgtagaggaaggcattagctacaagagagcttcttgctgttaagaagatgygggtgagtggaagagagaatgattgcytccaagcctgagcaataattggactttgtcactgtgtcatttttaaaaatacctgtatctcgtccctgacatcctgatctttcacttttaaggaggtcccttcagtgagagcatacacactcacctgcaaatcctgatttccttatcagtagtcagtgcacttttgcctttttgctttcagattcctgctgttttcttatacagtgagtagattagttatctcagatgtgactttagttagagcagcaaatctggttgggtagaccttttcccactcctctaatcccagtagaggagcctgttttctagtggagacccatctttgcacaagttggttatggttggatgtataggaactattttctttcacagagttgattattgttgaactgaaaactgcttttcattccttttctttttaacttaatcaggatattatagatgcaagagatagtactggatgaacaagaactatcaattttgtttaagcaatcacattatatctagaatcaaaggaaggatgcagttcttaatttttgatagatagcccttgatcatattttaattcagccactctaaaaatattatattagttggtttgtgatgaggatggatatttggtggttattattgcattgyttgttgttgagttttggctaatgtaataattagacctttcttctttcagctgttccatttcctccaagtcaccggcttacagcaaaagaagtgtttgataatgatggaaaacctcgtgtggatatcttaaaggcgcatcttatgaaggagggaaggctggaagagagtgttgcattgagaataataacagagggtgcatcaattcttcgacaggaaaaaaatttgctggatattgatgcrccagtcactggtaagtcctgaggagggaggttgcccacttgtatacacattttgttgtttatagcatgaaatcaaaagtcctagttacyagtgagtcttcaaataccttacccatcataatcttttactgttgaatctatacattagagtagtaagtatattatacatatatacacatattttcatgtgttaaatatctgtaagattgcaatgctctaaaaagtggaaygcaacttagagatggtgatgatttctgaagtgatactttaagaagtgatattgtttttaagtagaaatactaagtggcacacaggatattcattgggaaagattagacaaagtatcccgagacttccacaatggttgagtaagggtataagttaaaacagtggttttcaaagtgtgatccccagactgatagtatcatcatcatcaccatttgaaacttgttaaaatatgcattcttaggccccactccagcctactgaatcacagtacctggggtgagacccaacaatctgtgtcttatccagccctctgtgtgattctgatgcacattaaagtttgagaagcactgaactttcggaagaaggacacatttttttctcttttgcccgtagcattttgtccctacaaaatatctttttttttttttttgagatgaagtttcactcttgtcaccaggctggagtgcaatggtgcaatctcggctcactgcatcctccacctcctgggttcaagcaattctcctgcctccacctcccgagtagctgggattataggtgccatcatgcctggctaatttttctatttttgtagagatggtgtttcaccacgttggccaggctgctcttgaactcctgacctcaggtgatctgcccgcctcagcctcccaaagtgctgggattacaggcataagccaccactccgggcctttttattttttattttatttttcgtgttttagttttgttatttcttatggtcagatacatattttgtgtaagtatgcttctcttaggccataaaaattaaatattgtcaaaaaattttgtatgggctggacgcggtggctaactcttataatcccagcactttgggaggccgaggtgggtggattacttgagatcaggagtttgagaccagcctggccaacatagtaaaattccatctctactaaaaatacaaaaattagctgggtgtgctggtgggcacctataatcccagctacttcgatggctgaggcaggagaatctcttgaacccaggaggtagagggtgcagtgagctgagactgtgccactgcactccagcctgggtgacagagtgagactccatctcaaaaaaagaaaaaaaaattgtatagtatacagcttctaataccagagactttggatctactctttatggagtttgcttaatttacaggttttcatttttgaagaagctaaaaatattttcctcttaaatattattctgatttagacatagaatagtgttctttttgatataaagggggcatctaaaagtatttcatatrtattagtgattgctaatttcttttaaaattattggtcttcaaatgaatatttgaatttgactgttaagaaagagataagctcttttgagtatcagactacacctttctttatcaaaatatcttgaatgattcccattctagagagattgacattatttacattttatttttgtctggcaatgctattttttcttatttgtaattcagaagtattaactatgtttagggtcaggtagaggaggaattggctcgaggaacattaacccaatattggaccagtggtgagtaagtcaagccagagacttactctgtaagttactgaccgataacttcttttgtggaattcagaawtaagcrtagtagatatgtaaactctcaaaagaagtgatcaatattttataattaaaaagccactaccatattttcctctagtccttccctcctactttttattaataaaaatgtttcagtctcagatgtttagagaagagttgtactaacatttgccatggtttgcccccatttaagaaaaactgaggaattaatgtcctagttattggaaatctagatattccttcattcttttagcattttttaaagttaaaatgaacaaagactttctcttcaagtgttcataagacaatgaaaggtttgggttcatttaggatttttttcccctaaaaattcattatgttttattttggagaagtcagaaggaccaggaagcygcctagtcccctgactccctgcatctgtccgtctggagagggagtaaaggagtgtggacttgccctcacaaagcggatttagcgtgtggatttagataggtgagcaaaccatcttcataggagtagagatgaagtttatccagacaagggggccatgaggccagttctgtttttttttttctttcagctaacatggctgactagactggtagctgtttcagatttttaatttgaagactatttctgtgttgcagacattttgtaaagaaaagtatttttcctctttgacatttttttcccaaaaaatgtagttgaacttatctttgtattcttgcaaacacacaaatggaacgttgaaaaactgtggccccaaatcagtgaggcaacacattttggtgatccaatttaatgaaatgtttattatacatttacctggtacaggtggtatatatcacatacatgtgartaagacctggtctttgccctccaagggctcakaatataacaggaaaaaatggaaacagatatctaaccaagcataagtacattaaattgttgactaaattaaaggatataacctaggtgtattcaagcaaattaggaagtatccaagtggatatagctaatttaaaaccaaaatgtgttcctatcttctaaatgagtatttccttgacagtgctccttgattattacatttcatctttgagtaaaagaaactattaaatagctggggtcctacctgttgtgaatatgcattgagaacttattgaaagttatggctatggatgataaaacatatgagacatagaatatccaaggtctaggtaagggagtcagacacataaagagataattactataagttttttaagaactgtaatggaggtacctaaaaactggtgtgagaactcagcaaaaggaatgcagagagccaagaaagtattgacagattacatgatattgaattgtatcatgtatgataagtacaattgtactatgtgaaaaagatggggaaggatgatgtgagcagagataacagcacatggaagccactggtattttttgtaaagtggctagttatgttctttgaggtttgctgtgagaaggcagggtttcagaagggtatgagaggtggggtggagatgggaggatgagactgaggctggaaggttagggttaaatattaatctctataaccagcacttactctgataccattctatagggaatgggggttgaagggatctttgagcaggagagttacataatcatgtttgtggctggaatagtgtcctggatgagatgagtaggaagaggtggggaggaattcttaagagtggggtgattaggaaactttcatacttgttcaaggaagccatggcagggtagggggatttaatcctatttttattacaagaccttttataaaatgagtgttcaagttgattttaaaacatctgattagtttgtatttaaaacgttaatatctcttaaagtcttcttgaaaacagtaagatgatttgtgcagggatccaatttacatttctccctgaagttctcatattttcctgttttcctttcacttagcagagaacattccactcatttgtaatgcaaaagcagaccgggagcttaggttttttgaatagaatgatttaraactcatgttctgctctctgggcagaggggataggccagcatcagctgggcaaactgctaatctctctggtttgyctgtttcctgcagtgggggatttgtccctgggkcagcagaggattccctcagtgcckgggcctgccatttagcatgtcaggcagttgccaggagaaccctctggctttgttcctggatgtgagagtggactggtggccaagtttaaggtcatggcagtccttcccttacagcagctgacgtcaattaggagaattccccttgcctgcactctgaggagagttaagcagggataggaatctggtgtcttctgggacctaaaagatcagtgtttattctcctcatagtgtcatttgtcactatgaagcaatgtggccttagtttatatggagataaaatattttgtctggggcattttgcccacttgtgattttagtggccaaatctttagggcctgtcctgcagccagagacctattttggtacccagcccactgctggcaagtcagcacatttcagtcccagcctgtggcagccacacatcattttgatgtccatatactccttaatttcagcccttggttaaaaaagtgattatattataaaaggtgactgcatgagagccaaagtcctttgatctgttcacctctggtcttgcaaggttgttcttggaaacgctttttacaaatgtgaaaagggagacaggtggagtcagtgtttccaaacttgaccatagatcagaatcacctgtagggcttcacaaaatacagattgctgagttctgcctccagagtttctgatttagtaggtctggagtagggcctgagaatttgagtatctgagttcccagataatgatgatgctctggatctgggaccacactgtgggattcattggtttaagaacctaaactgaagtctcatagcgggtaagctgaagaccttgccttaaacaggcatttatctacatatcctatgcttagctattatactacactattctacttctgcattgtagggttaaagtcttgggcttttgttcccgtgactacaatgttttcctgctcattactgaagaaaacatacaaagaatactgatgcgaagggtcctcaagaagtagaagaaataaattattttgactgttgattataatttattatattttaaataaaaagtgtgtttctataatacaagcaggcaggatgaaacagaatgcttggcatatttgggacatagagtttatgtgtgtagtttttcccagaaaaaaacattcgtagttcttttctttacaagctcttggggagtttactatagaaagttgctactggaacagtgtatcaaacaaaaaatgtaagccaggggctcaaaatcaggtatcagtgagctgagtggtaatgaatacagtattctattaagaatagctgaaccatagtaattcagtatttgtgtgtacgaatcagtaatactctattaacatcaataaacatgtagcgctatctatgggaaacatttgacagtcattacaattacgtcatggttacatgaataactgttttactttaagacacagtatacatatcccttttaacatcccttttatgttctcatgaattggtacttttcacaaataatgacatatttaagcacctttggtaaagcaatgcctgttgttttcacaggaaggtaaacatccccagaattattattcttaaaatttgaaaacaatcactggcagtaataatgctctaattcttttggagaaggctaaaatatattaaaatcaatactatcgtggctttaagagaagtggtgtttcaggtaatactgaaatgcctccagataaggaaggaatattttcttaggtactttaaggaaaaaactgtagatgttttccttggtctacccaggtaatactcatattttcaatctcatctatgctatattcatttttatactcatgtttccaatcttatcsatattccatcttctcactgaagtgttcctaataatttcagacttcattgattttattctctttctgagtcagtaacatgtatggactataatgaacagtctgaaataccagtcactgactggttccgatccatgacaaaattttcactgatccagagtgaaaatttcattttcattttagcgaacatgctttctttttgtgtatgacactatggtgacagtagatcataattttttatagttttttgggggataaactgagttgtttttgttttaaagctaacacttgttaggttcttttggttttktttttttttttttttttgccgttcactatcataaacactgtactttttaactcttagtgttcacataaccctgtgaaaaaagtactgttatcagttccattctacaaatgaggaaactaaagctcagtgaaattgtctatcttactatggttacccagctacgaagtgccagaattgggattaaatcccaagcagttcaactatgtctatttctgttttatttgggggtggaggttaatgttacaggtttatgaagtcattaaatctggaagtaaccatatgtaacatgacattaactgtattgtcctgaataatatttttgtttcatactgttatcctactaaatgttgaacatctgaggacataaacatgcattatggttttgtggatattattctatttaaaaataattttagtataactgcacggctgatttgtacatagtaaattatgataataatataatggaaatatacgaaaacctctagagtatgtgtttatatatgtgtgtgtttctttgtgttagtgtaaccatttacatagcagttatctttttagtctgttctgttttcctgagtttgttgattttattgatttctgtcttcttagtggagcgttttggacacagacacatgagatagttgacgaacacccaagtctgtttggaagttgtttcttacagaagaatctgtggtttagtggatttataaaataaaaagaatataaatttttcatgcagctagtttactattttgtaaagttactgtcttggtatataaagtgtaatattattaaaaatataaactaaatgcttttaggtccacaccttgctaatggaaaatatattacctgagagaaggccttcaggcagttcagtcctggctttgtgtttgacctggaggtcagatagctattcttctcctgtattttgtctgccttgccagcagcatcactgagcattgccttatgaagtaacatgaaagtctgtggaatggtttgatacctaagtcagtctgttgaggaggtagggaaaagccttcaaaagagcccaatgttcttttcctcatattaaaccctaaaaggtctatgtagcaaactatatacatatatgtaaatccatatctaaaagagataacaaagtcttaagaagttacatttttagatcgcgttcatcatatgaaaataatatttatagcaaaatgtattttgaaaaagtaggattatactgattatacaatgacagaaaaaaaatcttatccatgagataatcaagtgtttttcagaaatttttatgaaacaacattgtattttaatatgaagagtagtaggaagaaaaattttagatagaaataagggaagcctcaaatgattaaccaagttttcttttgccttgtgcctctatttttaatgacttatttatcttcatataaatagatgtcaagatcaccattttatttcactgcttttcttttcagattcatatatttttgtcatattcaagatagtattattgttagttttctctggattttatgatttgtgtcagatattttaatacgaaaagatatacttggaattcatgaacctgattcccagaaatgcagttattaactctcacgatctctgaatgtgctatctaatttaagatgccatctggtggtatgcatttgatacacctagttcttttaattgctctcagaatcatacatcctatattgcttatgaagaatatttttgaaatgacatgcagacatttgttttcatttcaaacaaaggatcgtttgtgtttccctttccrttttctcgaagtaatatgcatgtttgctttggtctttgttaataagcataatctgattctttcttacaaagcattataatcaggctgcaagtttcagaactcagctttgctcacagacatttgtagaaattcattatcctctttaaaatyctagttacatatttttcatttaattttaaaaggtaaagtttgagtggatatttggataccatttggcgaataagagattctcagataatcaagcatgaaacacattattcatttgaaattctmtttyttatgttttaaacattaaaggccaactccttcaaaggtggaccttagcttaatctcaaccactgctttgccttcttcatgagataagctggtartatttattaaatatatatcaaaggtaggtgaaagctagacattaaattgcctgtattattgatataaaatatccattccacttgagactctgaattgaggaaatgttaaaaatacatgagaagattttagctccttagaaaataatttgtggctggttagcttagtttattaaggacgtggtggcaatgagccatcttacagacttttttcctcctctgtagcctgtttagaattctcagtttattttcaaacttctggttcagtcagtttatcttaaaaaaaaaatgacagaaataagaagaggtgataataggaagtgtgatttaatctctgctgtgcaggtcacctgaggtgtatcacctaatgacagtgcagcagtaactttattttctccctatccagcatggtgtccacattaaaattgtgaatctctaaattagcattttgtgtctgccactttctacctttgtaccactcagcaggatattcacctctttaaatctcagctttctatctattcagtggtgttagtgtcatgcctgtcactcagaaagagtgaaacgctgcaaccacagcacagatatgcccaatgagtagtaaatttttgttgttattgctgtawctgttactattgtgaccggtattgttgttatgtatctgttacatcaactgttgattctagtgtatggtttttggtgattagaagtatagacaccttataaaaactccattaatttggataatatagcttgcagttccccttttgtggatgtaagtaaagactgagagggctgtgctgtgacagagtgtgcagatagttcctcctaaccacagcygtcccctacttaccttttctaaattccaaatgagttttaattcgaaagaaaataaattttgttttcatgaacatattttgcgctatcagtatatcaattagaaagaagaaaatgaaaaataaaaaatgggaaatatgagctattatatattagaaaactagaagtaaatagccaaatatatgcaagggtgggctttgctaaagagtcccatgtcaaagtaataatttctttatatttgatgattgagaatcatttggatgtaaatacattttcatttcatgtttgggtaattgactttttaacagttcatggaactaccaacaaagtgtacattatttggattttacatttcccaaataatatgcaactttagattgctttctgacatttaaatcagaaaaatgttgcagggattttcagtgagtttttctccctctcattggcaaccctaaactatttgggggtatttcgttctatacctctttgtcaaagctttctagggtttctagaaagctcaggctgtctttataacaatttcttagtatgtttcaacatgctaataagaaaacactaggcaaatatcatttcagttggggaaatgaagaaattgtaagttaaaggatcatgcgtcaaaacaatataatattgattggcctcaaatacgcctttattcttttgtacactataaagaaacttaaaccatttttagataggagctaatatttcagcttctgttttaagcaatgaatgaactcagcagtaactctgggagataggtgttctttggatatccatgtaatagatgagaagattgagacatagaaaggcttacagagcttgcccagggtcatagacttaggctgtccacagcctggagttcttggttctaaggccatgacccttccattaaaatattactcaaggccaggcagtctggttccagagcccagtgtcttatgaggcagggaaggtggccataaaccattgattaaaatactcttgaataggaatttctcctaatattctccactaatgctttgaaacaggtttctaattgacacccatgtttataagcatcaaattattccctcaacatcatgcaacctgtaaagaaggcatgctacaggtagtgaagttagtgaggtgaagtaaaaattagaatgtttgaagagctagttaatatttttaaagtgaatacatagtttttattttcttttgtcttcccccacatgaccatgtttcaaaagtttagctttagaagttgctttcaagtactgtgttagagatattggaatcattttaaaacaatcttgaaatccttctaatgcccctcaatgaaattcagataatttacataagacctcagttcctgttggtcctccagtgaaggatgaaccccagaattattttcttcttcttccttccacctctttcttcaaaattctcatcaaatagtatttattgtataacacataaaaataacaaaatattattacctcrcaaatcttgtctgaaattttactttttttttttcctagttagaagaattttggcatgcaagtgctgaattattttatatatttgggctatctaaggagacaatttaaacaactgactttagcataggaccaagtaaaatttcatgatggcatttgactaccatttaaaaagacattttggacctcccttttggcttaactaaggcatatagcttgcaattttttgcctcctgctccttcttgcatttctgtgggactgccgcagctcccccagtgactgattcctgcttgatgcggcagtgtgcagccataagcccttgcctcaccctggaataaagcacctagtttagcccttcccttctaactccaagtgctaaagaatggtaattagcattctttggacctttactacatgcctaacaatatactaaaggttttatatgctctgttgagcaatcttgtgaggtgtaggtactgttgctattcccaaagttagagaaggaaatctgtctagtagatacatagtgtgagctacatgtataattttaaattttctaagagacacttacaaattttaaaagaaacaggtgaaattatttttaataatgtatttcataacttcagctttscaaaatattttcatttcaacatgtaatcaatataaaattgttaataacatattttgccctcttttttttactaagtcttttacttctgatgtttattttatacttaagacacatttcagtctgactatatttcatgtgctcaattgccacttgtggctagtagctaccatattagcacagttatagataaagaagctgaagcttggcaataagagccttagtaaatgcagccgcaggaatcaagtgcagggaactgattctgggcctcaagctctcaatcagcacagtataccatctcaggacctggatagtttcttccttcaacttacaagcatcaccttgttagattcttctgtggctttaactgcctgtatcacaactaacgagcatagtcaggttccattctctacctatttctttctctttcagttgatcctgtggtgttagctctgtgtctttgatccatttccctgttgagtcaaaggacataaaattacagaccagtggaagtctatgggagtcacttctcttttttctgacctagctacttttgtcttcccataattgtgagcttgggcctgtagaatgtatgcactatttgctacttacagttagaaagcctctgtaactagccattcctcatagtagtgattctcaaagcagtgtggcacaaggttcatagggtaagtgtatcataatttatgatgaatcaggtagggttgagcgatgagttattgaagcaagaatgtggaaaagcaaagcagtgcaatagccttgatagagaaagtcaacagcttccagtctgtctttcacacaacatcaaataaaaaaacttggatcaagaaaagggatgagatgcattgttcataatggtgacacagtgcccattttatagcatgtaactttgagaatcaaaatttttttctaaaattgctttcatatatttttaatcacaaatatttttgattttgagatatcaaatagagttaaacagggcaaaggattttgatagttttcattagaggacattgtaacacactattctgtaggattgagttgatcatacactattttatctcaaccttcattcgtctagtttctattctttctaagtggtacacatggccactcagctgaagactaaatttcttagtttcctctatcactatatatggctgagtcactaagtttttgtcagtgcggtatgaggaaaagtagcatgtgttactttcagatcatgcaactaaaaattttaatgtcttccttgcttccctttccccttcttgccaatactcttaggatggcaggagctgaagatgccattctaaccatgggacagaggtcatatgtcaggtatggcagagcaacaagacagaagggccactgggtcccaacattgtgtacaagccatgttacctcaaattgcttatatctaaagaaataagcttttatcacatttaagctattgttatagctgggtctttttaataaattttttcacctgcattctaatactgtattagtttgttttcatgctgctaataaagacataccagagactgggcaatttacaaaagaaagaggtttaatggacttacagttccacatggatgggaaggcctcacaatcgtggtggaaagcaaggaggagcaagtcacattttacatggatggcagcaggcaaagagagagcttgtgcaggaaatctcccatttttaaaaccatcagatctcgtgagacttaactcattatcatgagaccagcatgagaaagccctactgccatgattcaattatctcccacctggtccctcccacaacacgtcggaattcactatgagatttggatgggcatacagctaaaccatgtcaaacacaaaatctagatttgttaatgcctttcctgcagattgttacctatgtatcctaccatagctaccatcagtccctgccgcaaaccctgttcttttccagagagaagccaatatattgttcttttaatgaaccttgattgtctttgtttctctaacttgagatacatccgagtaatttgatctatctgaggtatgccttctgttttgttgttgtggttttgttttgtttttccccaccatcgtgaactctgtacaatgctcaagagcaggctcaggtcctacgtcttctggaaagattttcttgactcctcagatagcaaggtctttctcttcccctagttcccagtgcattttaatacttaagcctgttttatttaatgtttattaggtagtatcttctctctcccagctatcctgaaaattccttgagggaaataactgtatctaaaacttcttgaaagcaatcttaacatctgtcccaatgcctgtctgtattaggtacttaatgattgtttcattcaatttgattttgtttaataccaataaaatgttaattgaatctcagtctatcaccttaaaagttgataggtcttagagatacttttatgcaattatttttttaaagaaaaattaaggctgctttccaatttttcctggttttattgtcctagaaatagagaaaagcacagtatagcccagtatgacaacttaagagtaaataatcacatatgaaattgttcaaaatcttacctttttattccatacaaatcactttacaatcaaattattgtcaactcttattttgattttgataggcttcctagtgctcatggttataatttataacatccctaattgtgctgtttagcctgtctcaccctatatgtaagtctcctcataatttcttatctaaagatgtgacaactcatttgtgtgcctctcatggcaaattcatattgctaaacattcatataatcatagaattgtaagatactttattttgtataatcctttcattgtaatgtgtttcttttttatgtcaaatgtgatttttgagtggtctggctgcaaagtatagtgggcttttctgtgtatttttatcaaatcctgcttttagattccagattatacttatttgaggaaagttaaaaattgacaaaactattcgcataacagaggaacctccactttatttttactaaaataarttttaaaacacttttgttttccctttatattctaagttatgtaaatttcatttctttgaaatatattattttatttgagctttgttatgttacctttgtagaccttgttttaaaaaggatcctcaggtttttagagtattgagtatttgatatcttttctgatgttaaattccttctacttagtagccatcaacatatttataaatgcccataatatacccagtaaaagtctgtgaaagtcgagatacttagtatgttatttttttaattttaatatggtgatcataaacttgtgatggtctaccaatttgaaaaaattctcatgaaaagctagtaaaggggaaaaaagtacttaccaatattattttaacattcttaaatatttttaaaaaattatcaaagcaacacttattctattttattttattttattatttttagagacagggtcttgctttgtcactcacctggaatgtagtggtgcaatcatagctcacggtaaccctgaactcctgggctaaagcgaccctcccatatcaacttcctaagtagctgggactattatgtagtaatatagtgtgctaatgaggtgcacaccaccatgccctgctaaattttatttttttgtagagactcactatgttgcctaggatggtcttgaactcctggccacaagtgttcctccctccttggccccccaaagtgctgggattacaggtgtgagccactgcgcctggccaaagcagtatttattaccctaacatcatcatgacccgtaaacctaatttaccattagtttaggttatgggtagctctcaaattcccagtatgagaatattgttggtgaattctctattaccagggttactgtagtaagatataatgctaattattgattcaaaataagaaatttcagtaattatcagggaaggtcaacttccagaataaatttaaggcatacaattataaataataggaaatacaacttaactgtcagatgtccacaggcagtaggttaaatgtggattcacatgcaggccttttaaaaatggcctgcaaggagagtggttttattttcacagtctgtccttttttgtctcagttatgatttttgctagctccctagtgacccatagctatgttttagctttttaccaattcttagatcatgagtagaacccacttgttaattatgggtgccaaattggatgatactacaatttatccttcaaactggtacacttttgaaagtaaacagggaagctgttactaattatactaccacagcacatttaatccaggactgttccagataaacagggatattaggttttcctagtactatgcctcgaaggtccccagtttccacctctgctcatctctgctagatgtgaccacatgttcttaatgttggccaacttgcacatataactttgggtgcattaatcatggtcctatcatttttgggtgactacagaatgatgtactacaagtgyagattataactatctgcactaacagtatggaggtgacttcatataaataatattttacatgtaggttttgagtatgtttgtatttgaatgtagacctgagtgattcttcagaaattaatacagtaaaacattagaaatttaggacagtgatggtggagtgggtcagttagatgtgaaaaattgtaagaaaacatttcttctagacatggaagaataggcattaagattgacaaattatcttgattcaaatattttaaaatatttttagaatttgtatttattaagtatttaccctgaaataagtactgcacgaagcatattcattcagtattgtccagttgctcttagcatgaagtcactggtgtcaccttgatggcagtgatgagacaaattacttgtttcacctctttaaacatcagatagattgctggggacaaagagacagcatggcttccaaccattacacaagtcccccttctgcagccaggatcatgtctaggatgatgcagttatggaagacagcatgctgagtttctattaatttgatgaatcaccaaattgagaccagtggtggtggtgtccagggacaaagtgaattgcttcagcagtgggtagataacccactgtttttcagttaactttttcagcaaggtaataatttccttgggatggtatccaaagggtggcaaacctctccctaaaagtagtgtagatgaaatctaggctcagttctgtagctattttctttaactagcactctaggaaccactctaggaaccartattacacttacatgaggacttgtgatgacctggacacctcttttgttttctacgatgagagtgagatgaaatggagggggagtgggtgatcgttcgagagatagttcaagaaagagaagaaaattgtggggagtcaaatatgatgaagggatttgtaagattggtgataacaagaaacagttgatttgaccaatagacttaggttccacagacaaaataagaatcattgagagttagccaggggtcatagaaataattatctgctgactaagagtgaccagggaatgctagttttgaagatgaggaaaggatttgtcagaggtggtttatgtgtgrttggattgaatctgaggaattaggacaagaggggcaatagtaacacttccattaatatgagggctgtgtgaagaacacttaccaacttgagggttttatgttagatttagtgatgtctaggtgtcatgacaaatgyaaatgcttatttctagaaagggaccagtggtaaaattatgatgggaatagacatggcctttttgaggatagacctttagaggtttcggagttgacttactctggataattatgcaatttagaatggtaaaggcaaagagaggaagggttttagcaaaatatgtatcctgattggtcaaaggactctgggagcacagtaccaaaagtctgtccagtagaggtcaatgggagacagtgtgactatatttgttagatagaatacattattttcaggggcagwatgaccatgattttaaataaaaatttcagaygtaaaggtaagtcttttttggagcagattttgattttttgcttaattaatcaaggcctaatgctaaaactgttaagtattcatcatgctactgacaaataaaatctgaatatttgcatataaagtaaaactgaaacatggattcatgcttgtgttctagattctttcacataacaactgcattttatgtgtaatgggcatgttttaagggtaatgctttgccacctagtgagaagatcattggctttagaataaaacagacataggctctaatcctgcccacaagttacctaacatgctcctcatttaaacttctgtgcaagtgattgaaataatttctactttacagtgctgtgagacttgagataatgttgaaaagctcctcacgtaataactgatatgtagtaggaactcagtgaccaaaaaatatcacttattaccactaaaattgatctatgtacatatattcactgaaaccttctgtaaatggatggatatatatgtttatatttagtaaacagaaaaaataatatttcttggtatatagtagtgtactctggataatgatagtcattgttataggaattgtgttttttttttgtgcttaattcaacagtcattcctggtaagatatatcaaagatttgctgatgtattcagtacttacttcatatttgcccttctgatgtaaatcagaaacaattaaaataatttataatagaaaattcaaaaattcaattcatagaatttatataaaccttttcttactttgtttgatgtactttcttagcacctgaattccacttttcatttgactcatatgagttgtttgacatttgttttggttccaagtaaaagtatagttgttttgtttaggatcttcttgacattactgaactacaataatccctttttttcccaagcttaacaggaaaaggagggtgaaaataatagtattagtgaaaactattgtctaaaagtgatgagagtacaggactactatgaatcaggaatccygagagattgtgccagttctgacaatgtcttcctgtaattcatgaagaggttattctaggtgatctcaaagcccttgttggttttcattctatgaatgcatttcttactccaactatatgttacatgacttcaaagggaatatcttgattagtctaatcagggtttcctcctgctaccctttaaaaacacctctgtgtcaaagtaagagataacctcaacttttgttattgtgtgatttaacttcccaccatatgatgaattcctgaacattttaaaaccactagttttatttttgtgagtacttcaatatccagaatgatttctgtcgttaacgtaatgaaacttccactcctacatgtgtttcttttgtctttaaaatatagcaggcctgtttcacaaaaacattttcttatttaaatatgcatgcttttatattcttctcatatgaataatatgtgaattgactactttttaatttgaataatgttgtggctatagaaaaaagcatggtgaaaagggaatggatttaggaattttaagtaaaatatcctagtatatcgtatatctattgatattttattggtcacattttattggtgtttgtcacatttcactgtggttttttgggggggcttcacagtagttgtattttagtcacagtaattaaaatttaataaacagttctctgtgattttctctatcttgattgttctcaagggttagtcatttgccccatatgtctgataattggtcatacaaatctctgttgctaaattcttgactttgaagaatgtttgattttcttctgtgctattttctgctctaaatagtcatrtaattttacttttggaagagaattagagactactccagctactggccttacagattaggaggcttggagcagtcaggcactgccactcacagctggaaagtgctgaactaggcccagaactctggtcttctagatgctcttgtggattctctgcaccaggtcccccgacccttctttgtttgtcatctatttccttccgaataacaatggagaaggtgatgactttacttctgcagcacgttattgttgcttttgcaatttaatttctgttggctgtattaaaatttaatgtttgtatacactaatacatttaacagttattcttcagcaatagrcatgagtttttctactcacaaaaaccctgtagatcacataataactgaccttttcctactgacctttaaataaagcaatcccttaatgtactgctcattttgtccttgacccagagctcacttctgctttcttacatcatgtttggcagcgggacagaggtaataacctgagaggcgtgatgtttgtgccttccatgactacccctgtttaactgctgggaaagtttccctcatcttctcccgtaattatttttaaatgtcttcagacttgagggagtaaggttttgtggagaccatataatgctgatgggagtgtactagagatatccattctgtatttcctgtggaaaatggaataaaatagaatgttttcagtttcttaaacttaactcctctgtgtggtagaatcaaaatcattgtatttatgcctaaagagcaaactactccactcctatactgaggtttcttactggcaattcctctccatttgaaaatagaagatgtttcatacaccaaagagcactactttctacctgcttctttctcatcaacaatataggacagactcaggcatacacatcttttaatatggtatacagctgcagaattacaaagaattaatatgcatgtatcgtagatagctttaagtccctttggactccttagatgctccttttttcaccaacattctaatagagttataatacagcattgcagctggaagaaacattaaggctaaaaccaaatcaggtagtatgttgaaaggaatggtggacctgccactgaccagctggaataatcttggagcaaatcacttcaactccctatgcctccatttgctcattgataaaatgcatcagctaacaaggtacaagaattacctggtgatcccttttctctgatttcattcaattatagttggctattactctttcccagaagtctaccacaggtcagcccctaagttctaattcaagctgtcaactttagtcttccctttaatttctcagaagtaaaacgttttttcttttacaggccccttccagtttctatagcttcagaaacaaagatgatgtcattccagcttcttcttccaaaaattctttgtttcttttctttagtctttgttttaggatttgttttcaaggcatttacaccttttctttctagcattatagattatcttagatctttgttatgtctccaaatatttttcgggactttaagtcttaccttagtcctctgacttccccctgaacatggatttcacaaagtacacccctttatagccatagtgcctggattcaacccagctctgtcacctcccagctctgtgactgttcaagttacgtatactgtgtttcagtgtctacctagagttgtggggattaagtgagttagtacctgtcaagctcttatagctgtctggcatatagtaagtggtatttgtgtgagtgccaggctttacaatcttaccgcaggctttgttccctttccctatctcactattcttggccaactgagcatctcaccttccccagacttacacttcatgtccttagactttawattcttttagattaagaaggatacctccattgtcacccacaggctccccttaaatactttacaatatgtataattttgtgtttaggtttgcacacatattctttatattgttgtcatcctaaaagttattctcataatacttaaagctttcatacattgttaggaagaaatgttgtacttaattcaagaagatgttttagaaaatatttaagccagattataagaatacataaatacaaaacgatgtattatttcttttaaaaataagtgtacctaaagtcattgcactttagtgaagaattccctaaccccaattaattttgtgatatcttaatgraaaaattaacaaatggtgtggttgtttcacttccttgaaaatacatcgtttaggttcatgtttcaaaagagccaattttaagcratactgaaggagacaatcttattgataaaaacataaatatttaatagagccatagtatattaaaagattttgaaaatataaagttgattgatttcagtaacttccaaactatttgttaacaacgtggttttttttgttagttwgtttttctggcggggtggggggggcgtagtttttgtgtttgtttgtttgtttatttgttttaagaaagggtctcattctgttgcccgggctggagttcagtggtgtagtcatagctcacagcagcctcgaatgcctgggctcaagtgatcctaatgcctcagcctcccaggtagctgggactacaggcacccaccaccattcccagctaatttttaaatttttttgttgagacaaggtcttgctctgctgcctagactggtttcaaagtcgtggcctcaagtgatcctcctaccttggcctaccaaaatgtgaagattacaagcatgatccaccatgctcttttttttcttaatgaaatatttaaatgcaaaattccaaatataaaacagagaggttattattatattaatttagctaaatcaggaatttttttgattgaaaaattaaaattatttggatggaagacatctttgctaaactgttatttaaaacttatgtatgcttrcagagggacctcatctctgtgtccattttcatgtctctagctatataaatcctgacatcactgtctttctagtggataagaataagtgtgtagtgtaaatatgatactgttacattttagcaattaataaaaatgtcaattgctagggctggatataattgcagaaacgacctagtgtttcactttgctgtttgaaaaaaaaagccctctaaagtttggatctttttttttccttagcactcaaattgtgaaccactaggtttgcaaacttttgtacatccaagcacagcctctctcttaccacaggccaaataaacaccctgcctaccacacatccatctattcctcattgaaatgtacctgagcttataggacatttcacttacacccctcaccccctcatcccccaataaaggcaaaagccctgttccattaatccctaaaagccactgtcagtgcccagaatctgtctttagaatctgggctgtgttattattacactggcccaatggctctacttttacactaagaggaagaagttgtagagaggagtctgaggagggaagttggcttgtggagctccgtgtacatgtgggttatcataaatctgggaatgctggatttaaatgtccagttaattgttcttcagtgcaaacaaatctaatgtgtgccttgtagttaattgattttattagtctgaattgtgaaaataaagtagcattgcaagttttgaagcctttttttacaggatcattaaaaaatatatttaagtgaggacgtgggttttagaaagaatgagaacttagagagttatgtttaatatgtcttgtgggaataagaaagcaaatgaattcccattgtaagttagaatttgtcctgatttaaaaactagattcagcttccctctgcattagaaaactaggtgatttcatggaaatagggctaaacctcctaagrctcattagagaagggaccacatgtgcttagaaaggagtctgaaatgaggaagggggacaaagactcgttttaagattttaaaagaaaggaaagtgaggaaaacattttggggacatttagtcacaagggaactgtgactaactctgttagtcacagtgctgaatacttttttacatgttttcataattaaggtcctaaataacctcacaatttggtaattaatgtagcaccaactatattctaggtattcttgtaagtttttggaatatatcagtgaattagaagcaagatgggtacataattctctctgtagatgaaatagctgaagccagtaatgttaagagcttgtctaaggccgcagatagaagtgtcaraaatgggatttggaccaatctctctggttctatgctcaggttgtgggaatatagcatgaatttctagacatactcatgttgaggattttttcccttacaataggataataatacctccactgcctgtcatgggcttattgagagagtcaagcggtactctggatatgatggcattttgtttcttcctttctcccactgctctccatcagtactttgatagagcactaatgctctggattaagtcatttacaagtatgactcgtttaataagaaatacacagctgtagtctacagactatcattcattcattgaatcagtcagtctacaaatatttattgaatgctgtcatgcattaggcattgtgctatatatggcagtgacatagtaaatgagagacatgctcattttctcataatccttatatcctagcagaaatyggtattaaacagattacacaattgcatatatttgtggtaagtattacagaggaaaactagagacatatttatgtmtcttayacctatgcctgttttttaccaagtaaattaattagtaaattaatgaatggtgagaataaattcttctacaaagtcatgactgagcatgggcactctagagttatgccagggttcataatccagccttatgcctactgggctttgggactttacatgagttacttaacctttccatgttccagtttcctgcagaatggggataataatagttttagaagggctgaaagaaggaacattgggaaacagtttagaacagtgcaagatatacagtgagtgcacaataagatttagctattattatttttattactattgtcatgtagcggaacttcacaggcaagttctcttttaaccatagtatttacctaagctgtcaaccttctttgaagggtttttttttttttttgaaagaattgttcataaacgagtatgcatcagaaccaactatggagctttaaagaatatacatgtttagctcctattgtgggagattgttattcagtaagtctgaattgagctctgcttttcagaagctccacagatgaccccgattcacacaccaaggtaaaaacggatggctttcaaatgacacagaaaggagatttcacacatggcagggaaggaatgtaaactactgacaaccacccaaaggacttttctctgtgtaccttgggtgagtattgatagctacttggaaaaatgtgatagtaagtaaaacagtaaatatttaagtattcctgtagatgctagttaattcctttttaaatgggattgaattttagtactttaaaaaataccaaaatgattatttgcccaaataagtttgactagactagaatgcgagctccttgaaggcagggatttgtgtcagtttcacagatatattggtaaatgtatcagtaaataagagtgctcaataaataagagtttaaataaattgaatgaattttgaaagcttaagatatttggggarcagataagaatgattaattataggctgggcaagaatttttgagtgaaggtagatgaaacgtgattattctgttacttttcttagtaaaatccaagtataggtatatctaagaaaagtgcagacatgtagagaagagatgctaggtgtgaggttgacccaagcatggtgaacattttttggcaaatatgaaggcagtctcctgttgttatttttttttttcacctctcaccctacttccatgatattctttcccagcccttaactcctttccagttagttaaattccatttatttatttgtagtaacatgcaaaatgtttattgcttttgctttttaaattctgactgatgctctctgttatgtagttaactgtggctttagaattaccaggaaaaattatagccttgagggtccaggagattaaagcctaacatctcaggtactttgcagtatattctgccattggatctctatgggagattttcaacaagagtcaggaggagtttttttttcttttctatgtagttttatataattgtgggaaaaaatgtcttgatgctctaaattacagacttttgtgttacttgttctaaggccacttttgttatttcaattggtaagccaagaatcttaaattattatctgggagtaatttaagtcacttttgtatcttgtgttacagctgttaattggaccacgtttaagatcagcaaatgctagcaaataaatactgtattttatatggaaaactatagaaataggggaaatttccataattgttagcagagccaaaaaacttgggccttgcctgataattagctgcctaaattcaaaatatactgcatgacacttactgtaaaatgaacagtcttttcagaatcaaaactgactccccaaatttaagaggataaaaatcaccaacatgtcttaaaagcatggtttgtaaattatttctgagtcagcattttttgaagcctcttcttacagatttctctaaggttgcaaagtcatcacataagagtcagcagtaaaaaaaaaaggcatttacttcttctggtatataacatttgcatgctctacttgccttttagcagcttataatcagatgctgaaaacatattcacctatagaactgggtaaaaatcaaacccataggtaggcatttaataactgtctctttctttaggcctgtttcagtttatgttgatctcaaaggatatttagcatatmtgtgccattaccgtgattgcttttcagctttaggataaaagtcagagtctgactgatgctccccagggttgccacaggtggttgggcatgtctgcactacacgtctcatgacatggtagcctggtaaatagcgccctctggagtactgtaggacatagccagagtggtcatttgtagtagccttgggcatgcacaccattcattcttgtctttgctgctgactgagcatcttctctacgcactgtgctaaatccatgtagaaggtaaaagtgatgaatttcacttacgagctttattagaatttaggtaatatattcactttcctaaattgcctatacatgattaccatactaggcactcagtttgatcttcagtgaacaggcaaggctggttgttgacctttgtatgtaggtataattgcttaactgcttatctgtagttcctgtttgcaattaattgcccttgtgcaaaagtgagcgtctcaatttcctgtttgcatttgtgactgaagtctatgaagtagctttattattgtttcattcagtacatattattgatcatccagcaaataggtataaaggggaagatagaattataaagaattataattcttatatcattgctttagaaggctaagatggtggatttagcacatgtatcatcatatgtgtaagcagatacaaaagactggtgtaaatttctgatataataagaggtcttacttgctagacatgtgratagtatggcatagctcctaaaaactaatttttaaggagacgtatatatggtcttaatagatattattcagttcagtacctgaacctttttgccatcagccaatttttagtctttctttcattggacctcctgagaagttgacactccctctttctttcaatactttcttcccttggttatcaggataccaygctcacctgctttttccttagtttgtggtcctttttacttagtctccttggaggttcttctccctcttagagtgtcccacaatttagtccttagacttccctcctctatctacattcactgcctttggatattttccctattgtcttgttctaaaaattgtcttttgtgagatgattcctaaatattctcatctttagcccggtcctttcctctgtccagtctcatatttctagttatctacttttctccatttgcctgtgtgagacacacctcaaatttaaacatttccaaagccacacttctgaccttccttcataaatctgttcttcctactttgccttccatcttattacacacaactatattcttgacatctcctttctattttttctccatcctgtacacagtctgtctgaaagttcttttagctctgtctttaaactatgcctggaatttgatcacttctccattccctgtctgcactagcccttccactaccttggctggattattgcagtggcctctatctaaagtgttctctggcttccctctgcccccattctcaacccagtggtcagtgtgatgctggtaaaacagaagtaccaccatacagcccttctgctcacatccctctaggagcttcctttcccactagagaggtcaagaggataagtgctttacctcaactccaaggcctttctgatcctttgcctgttatgcctttatgtctttctgatttcaactcctactcctgctacccttgttcattcacctcagcccctctggcttcccttctctttctcacacatgttctgtagtttgtgtcctttccagccagccagcctgtcacccacataattataccagccctgaccttctgtgtctgtgtttagaagtcacctcctaagggagaccgtctctgaccaccctgtgtgatagctgtgtcccccaaccctcaccacttcccaggtgcttgttatcacccctagattataatctccattgcacttatcattcattgatacactttgtagctcagttttttttatttattagttatctttctgcctctttagagtgtacrctgaaggaggggagagatgtttaactctttttttcattgccctattyccagtgtctaaaacaatacatcacatatattaagctcttggtaaatacttgtacacatattcggtaacgatttaaatgttgactaagctcctctttgatgcttttttactaaagctgtctaggtgaagaaaactgtctggtaaccatgtggctgggatttactcaaaaaacaaacacaaaagtcaccatgcatctcagtatgcatccagaagcaatttgttcttaaggtgccttaaccaagagcctctatagtgatgtcaggaatcatcatccctattgctgtctaaagattatctcccctaataatgggcatttacagagcctagagagttatttctcttacagaaatgtaattttgtatttgtctcaccacttccttctattaatgatgccaacatgtttagttaagagaatggaatttggagtttaacttgaggcaaatcatttctcacctgtctttcttctgaattcagatcaaaatgctaaattgcasgtataattaaaggrgggacaagaaagactaagaaaatggctgtgtgctgttgtttcagttttgaatattgtctcattgctttctaataatttagctcttgttaatatcaacaaagtaaataaatcataatgttttggcttgaacccaaagtagctttcaaatgtrttaatataccctaaggaaatatacaatgtaagtggtaaccaacaaatgggtcttcatattgttgttgctttggaatccttagaggtaaaaagtattttatccgtcttttaaatgatgaactaaatacttttcaaatattggcttcatagagtgtaataaccatatgaaaatccaaattaacataatatgttctctccagaaataaactgtacaatgtggacttaacgtggcagggtgggccacttgcaaacatgacctaagcaatgagaaattgaattcaggaaatttagttttcttttctttttctcttttctctctgcctttttgggacaactttccattgagggagataaaatattcaggaaaaaatactctaaggagtcaaaagaaatttgtttaaatgagtaaacattaaatctttgtgttgagactgaattttgcatgataaaaatctgctttttgggttggaggaacggtgcgttgcactgctctcatgggacaattgtgtaatattttggcacgaaaatgggttatcagacaccaaagaattgtgtacctcagaaaagccaaagtaacaattggtttgaggtgaaaggaaaatctaagtgatgaaattcagagtctggaagagaatatgttggtgtttgattgggtgtagtgggaagaatttctttgcctaggagtacttcattatctaaatggttgttgtatatgtttcatcctaaaatacttttaagttggaatgtgcatgcaaattcaagtttatcttcttgaaatctgctaaatgaatatatgttccatattttatctggttgtatgtattctaattgatcccttatgacttaaatttttacttaactgatttagcaagtctaccatcttctacctttgatcattccattgctgtatcatccatctactttccttttaactaaccaggtaagactaatcttatttaacatgcaaaccacttytgttgttatatagaaaattttatgtagtatctatggcctggatgtcactaccaacaaagccaatgscagtttgagtatatctcagtaatgttatctgataaattccttttattttcatgtaaattacctattgtttcataaaaggctgctttgtgcttgtatatggccaattctcttgaaaggttagtacattttattgaygtacacatgtaagtattataatatttgaacaactacttagacatcaaagcagtttcagatgttcaagggtttttcttttattcttgggtaaagcaacaagggaaaagggtttaatataaaaattgtataagttgagaatgaggtctgattggttaaaaggttaggggactgtatgaagcacattaaaggttaatgttcagtttaagtttgtgtctgtctgaatctgtbttaaagattgtacaggtaaaaaaatagacatagcaaatgttttactgtttgtacaaagaataattagtctatatttaaaaatggcattatttcatttttcaatgtttgggaaaaagactgcctttatggaaggagaaatgtggaatgtctgtcttcgtttgattattcttatttttaaaccatgtgcagtatcccttacatsaaaaagagatacaaagaaatgttttctattataagagtcatccaacatgaaataaactgcttttgctgagtttgttgctgttgttgttattgctgcagcagctgctgccgttttgtttaatygcagattccatagagcataaccttctttcaggaatcatttttttagggattcctgtactggatagactactgaacaaaatcatcaaaatctctcctcccctacccagagtcagtgctaatcactagattatagtaaaatgatgaaagaaatttaaaaattatatatgtatatatgcctatatacatgtgcaacattggcagccctttatctctggtagaaccattttttcttctaagttttttggtggattaggtatatgaacctaatcctattttaattatgatagatgctattggtttaatttaatgcctttgcagagcaaaagaacatactgacattatattttcatctgatcctcactgccctctctctgctgtgggggatattttactggtccatgaaatccaagtctgggaaccactgaagtaagtgatctcaatggttatttcataatcattctatgtaaatctacccaattaacagattttgcaacggcttttaattgtatagagccagraccctaaaaaaaaaaaaaaaacttaaatcccattatttttagaaatagcaagttatacagaactgataggaccttataggggacaagagggagaggagaaatcaaaacaattgattcatttaggaacttcttattgacacatattcaacaagtatttgaggtattattatatgccaagtactgttttaggcacttgggatatgacagtaaagtttctacaaagttccttactgtcttaacagtagaagacaaaacataataaatccaataaagtataaataagtaaattataaaagatgttagaaggtgataagttccatacaaatagaaaattgtatggggtgggataagggagtggcagggtgagggtgggtggaattgttaagtagagtggtcagaataggcctcattgagaaggagaggagatttgagcagacttgaaataggtgaagaggtagctaaggagacacccagaggaagggctcttcacagtgtgaacagctggagcttggctcccagaaagaaatattacaacatcaaggaggcaagtgtgactcagagtgagcaggctgaaggcagtataccttattgtggtttctttcatagtattgctaagagtctgtcatcctataaaccttgggttacttcatttgtaattaatgggtttgttttggtaaaatttaaacttgagtatttattaacgctgaattagattaaattatataacatactgcttatgctgctcatgaaaggaacaacrtttttaccaatattttcttccaattgtgttccagtggacgtttataggtggagagaatgaaggcctggatgtgaaattacagatactagaactctgtcatgtggccaggcacagtagctcacacttgtaatcccagcactttgagaggctagggcaggcagatcgcttgaagctaggagtttgagaccagcctgggcaacaaagtaagaccctgtctctacaaaaaaattagccaggctctgtggtgaatgtctgtaatcccagctggtcaggaggctgaggtgcgaggatcagttgatggcacaggaattcaaagatgcagtaagttatgattacaccactgcactccagcctgggtgacagagcaagacctcgtctctaaaaacaaataataagtaaataaaaaataaaataaaaataaaactgtgtcttataccaacttccacctgagatcatgatagaaatctatttattcatgataaatagctactggctaagcctttggccctaaacctcagtatagtgcctgaggagctagaccaaaccaaatgtaggactctgttctgattcccttaagtgacttaaaaataatgtaaaattggctttacttatttctacccctaaatcaaccagaaactttaaaccatggtgtacctatcatatatgccagagcaaaatatgtatcctaacacctactgctgtgcttccataacccagcccagggcttacgcaagtgtgaagagtagaaagagaagagagggaagcagaataaaaataagratgaacacaccttgtccagatggttatttaagcctggaagaaagggtgggaataagaaaggatgagagaatattctcttgtcctcattaaagcctacatcaagcaattacagagaccacactgtctatgctacatgcttytgtgatctctttaaaaataccacwactttgacttgtgggccaatgcatatcctgaattgatagattcagatcattagtttttcttgagagaagggacctcagggcgaacaacaacaaaagccccagatatttcacactgaaaagagttttaaaacaatgaattaagtatcttcaaaatttttagaaaaagcagaggaatatatcagttcaggtttcttgttgctgttgttccctctactgcaaactgtgaactggagtccaggaaactgccatgcacaaatgcrggaaatgcctgccaaagctgtaactactccatagcccctaaactggtgactagaattggaatatggaattgccagttattaaaaagtttttaccaaaacctgtagtcagtagccatgtcaagtgctggggatggatgacttttaccttcctttgctttcagctaatcacatgatgtgagtacatctccttggctgaacctaagccttatccagaaccctaatggcaagggagtctgggaaacatagtgcttcagcttccagctcctatagctcagagagagtatagaagagtgtggtaataaatgctgactgacaattaaggtttctcaaaggcatggccattttctaaatgaagaagtgaaattaaatcaaaattctcatagggaaaggatgagtcaaatttgctggtgaaaacttttaaacccagggcaagatactktaaactgtatgtaattagcgtgcatgcatatgtgtttggggactccatttctttgagtggatcaactaagaaattcattgtcaaatgttgcacagggggtcacgtttatattccacaaagtgtcaaagatgcagaaatcagttcwatacctgatacatttcctttatttatttatttatttatttatttatttatttatttatttattttgatggagtcttgctctgtcgcccaggctgaagtgcagtggcgtgatcacggctcactgcaacatctgcttcccaggttcaagcaattctctgcctcagcctcctgaatagctgggattaccagcacccgccaccacacccagctaatttttgtatttttagtagagatggggtttcaccatcttggccaggctggtcttgagctcctgacctcgtgatccacccgcctcagcctcccaaagtgctgggattacaggtgtgagccaccattcctggcctttttttgttttggccagagtcttgctctgtctcccaggctggagtgcagtggcgccatcttggctcaccacaacctccccctcctaggttcaagtggttctcctccctcagcctccccagtatctgggattacaggcacatgccaccatgcccggctaatttttgtatttttagtagagatgggatttcgccatgttggccaggcyggtttcgaactcctgacctcaggtgatccgccagcctcggcctcacagagttctgggattacaggtgtgagtcaccgcgcccggcctatttcactttttttaacctcgatgtggactatcaaggtaaaatttttctatagaatgtatatatagccaagtcaaatgtctgcctgtgacaaaatgatcactttgcctgcttttaggcaactcctattatggtatgctagtgtagacactggccttccctgttcttttggaaacaaatgacttttctcttacacatcaactccatctgttctttttcctgtattcttctgaaatttgcaactttacttgaatttgttcagaattgtttaccaagtattgtaaagctctcacctgtatgtgttaaaaagagattttagaattgtgtaaaatcctaattgccaaccgagcatttttttatgtctgtatttaaatgattcttaggactgccagtcttctagagctaatgaatcctttcccatttggcagcagacagcttactgccaacttcctcccatctgataaatgttcccataacaacactaaggcagtctgcttagtttcattaaataccaaaattatagcctgagaaaaatgtataatgtattataccatattacagcaccttatgaaataattcatgagtgattgaattcattgtgatagggagaggcttgttcaaatactcaataaaaatgttatagtcacactttgcttaacaacagggaaacatcctgagaaatgcgtcatttgccgattttgttgtgggaacatcatagggtgtatttacacaaacctagatgatatagctgatacagggtctatttatataaacctagagaatgtgatgtagcctattgcttctcggctacaaacctgtaccacgttactgtactgaatattgtaggtaattrtaacacaaaggtaagtatttgtgtatataacatatctaaacatagaaaagacacagtaaaaatatgatgttataatcttatgggcctaccatcatgtaggcagcatgtccttggccamaaccttgttatgcagtacgtgactgtatttctttgtagaaggaagaaaaagaaacccttgaaatctgagtcattattttgaacttcaacaaggattcagattttgtcttgayattagcagatctaatatcccaagtccattttctctacattcctaaaacctagccccttattaccaatttggataccttcactcacatacatattctaaagaacatcttcatttgtctgattaaaaaaatatttttaaagaatagttatactcttgatatataaaaagaagaaatagctattgattcatgaaaatcactatcttttagagtagtgtaagggtgtttgctacttgagagggtggatatgcttattctaagcaactccagtaacaccttgacttcatagaaatgaaagaaaggattattaataattttgcaagacttgttttgcttctcgagtattcacatagctatcccatagagcacactctgtgcatttaccatgatcggactcccacacattttattaatgcataaatttgaaattattgtttttgaccaagttgatgaatattaaagtttgaggaaactaaagaaatcacgttggtcattttcctgcttcttcagatgaaaaaatgggggcaaaaaggatragttatttccctaaagtgagccaaactgtgttggtaaggactagaatgacttatatcagtggtcgttgtcaatggattttccatggggaagtaaatgtacgtacttgagaattttgttagcgacttcatcattgcagtcactrtaaaggtttgtacttagcacacttctaaattgtatggcacatgcagttcaagatagaagtgtggaatgtagcaggcgtgcaccaaccatacttttatattttactttctatttcacatttttcttctctactttcccaaggtagttgtcaccttatcctagcttgattattataatgatgcatacatgaatattttttctattgggctattttcagtaagaatcagacagaatattttatagatagttcacgtttttgtaactttaagaataatactgaatactgcttccagcaatggccccatttctgtgtacagatggttttgatgtatgtatttcaggtatctgaagcaagcagaaaaaggcagcgctggttgatacctattttagaatcagccctacatccataaatgtatatttttgaaagatttatttctggtattttgcaatcctgttataagactatattctgtgaatttttaaagtagtgacaatatagcacataggatgggaataattttaagactaggggcattatgaggatttctgaatcagttttacttaataaaaatacagctgttcatttagatcattattaaccattaataaagctgtctttctkttgacaccagaaagaaggccagtctagttcactcaagtgacaaaacttctggtaaaaaatctgtcacagtctaaacctgtttcttttgggtggaagtgttgggttactgtaaaatccctggtctcttccccttagataatgtaaacccagattaaatcagaggctggcactgttcttatcctggggtagggaatgaggggctggggaggtgggtcagtgggcaggtatggggtaaggagataagagatagagggaaaaaactggtgagtacctagttagagcagcgtggcctgcaggaatagcactggcctctgaatcactgtttttttagaatctacttcttttccagttccaactttctaccacctaacgagctcttcttgggccctgcggccagactgccaggattggttcacatcttggctgactgtataacttgctaccttaagaattttggccacttacctaaaactcgctgagcctcagtttcctcgtctgcataatggaggtaataatagtacctttcttagggaactgtgaggattaaattagccaaacccccagaggaagctaagtcaactactattatcttggtttaagtttcttaataatttttgagccttagttatcttcattcataaaatggagtatcgtcactactgtgaagattaaataaaatggatgatattggttaaaagtacttaataaatgttactgagatatgaattaacttttagctgattaaaatgctttaactattatttgccattgcatcaaatatttgaataacaaagcttttactatgtttggtaaactgcaacttattcataggattcactaatttgggtattgaataaccagataccaaacaacaattgactgactcattcagatattatttatgggcaccagtgataggcaatcacagtagaggccacagttgaggtcactgaggccccaaaaacctagacctgccgtgtggcacctagttttaactackctcatgatttctcatctgacatttaattataatatgataccgaggcccaaagtcctaaaygtggaaactgaaaggagagcccccttaactcatcttcatttgaacctcaacaacaaaaaattaaaaaggaaaaacagttgctcccttcttaagtactgccttttaaaatgttcttgttgcacactgcttcaacttttctctgcccaccaggcttccatttgtgatctgtctgaaataactatttttgcataacacattctttcttcgctgctgatcttccctggagctgctgctgcttcccgtggggaatacagatgaggctggtgatgcaccaggagcaggccaggggactctgagatgatgactctttgtcattgtgaataattctctctgaattctcgggtttctggtgggtttttcttctttcttttcatcttcttggtataaatctagttttaattatttcacagaatatttgtctttctgaaagcttctcgtgcaaaacaaagacaaaacattaacatagtaaagttattttatcagtagcctttctctgtgttaattaggatgtatatcaatatgacatcattattttcattatttaaatgtactaaagtttaaatacttgtagcttttagacatgaattaaaaatagaactattttgaaactggtcatgaagactgagaggkttttttttttttttttttttttgcctcctaaggaaccgtttaggatgattcataaagcattttctgaaataaaaggcagaaccgtacaattytgattttaaaaaatcagggaattagagtacctcagtcttgcagctttaaaagagcagaagaaaaaaagcattgaacaaactttacattctcttgatgggtttcaaagaacatcaaaattatctaagtcaattctcttctgccagacaggagttcacttgcatcatcagcctttaagaactttgattcagcgcacacagacaccagtctcattttccttgtactaggttacctctaggatttctttagcctactcaaggcactgccatcctccctgtctcccaggcttgaaactttagagactgtcttcatttcttcttttcctcgtcccctttctctagtcagccactaagtcctacttttcatttcaatgtcttttgtgtcagctttctctttttcctatttctattgtcttcttcttgacacaaatgcctggaaggtgaaagtataaaatatcttgatattaccaaggaattaatgtgtggaactttcacaattaaatcactactgtcattactatccaataattcattgtttatttctacacctgcagttgcagtttacctggaggtactttgcatacagaaacatttttcatcacttactaagtgagaataggaccctggcctagggggaaaaacaaccacagacaaaccatacttccctgagaagcaggagcatagtgctggctagtgaattgctttcacaaaccgacctcataactctgtgccttagaaaaattagaaatgggaacatttggagatcacttgggaaaacttgaaattatgaatgttaatctgtgattgctaagggaacgtggtatttcctgcctattttgtctgtagtttgtctctttctcttctaattcatttttaaaactctgctagattaattttgctaaaataacgttttgcactcctcatttcctgtttaaaaacatgtagtgactcaccatcagttttagaaatcgatttaaaggacttcatgaaactggtttcaggccacccacagtttggcccatacctatctcctgttctccttcataaacctttcaaatctagccaaattgctttgttctttgtccctggagtatggctttctctttctttctttctttcttttttttttgagacacagtttcgctcttgttgcccaggctggagtgcaatggcacgatcacaacctccacctcctgggttcaagcgattctcctgcctcagtctcccgagtagctgggattacaagcatgtgtcaccacacccagctaattttgtatttttagtagagacggggtttctccatgttggtcaggctggtctcgaactcccgacttcaggtgatctgccggcctcagcctcccaaagtgctgggattacaggcgggagccactttgcctggcctggaatatgcctttttctattgctgtgctttattctgatttttgttttagaatagctttcaaatcttattctgtttctttaatctctcttgtgtctctctttatgccttctgggcttcacatggggactggtgtggttgtaaaggccccctgagttgagatgtggaagcaccctctgttacagagtgagggattgactcactgaaaagaactattcaagtcattcctgaattgcttacctttggtacttcttgatttagtaaagtagatttcctgttttcatatgaaaagcataattgaatcatagagcaggtactaggaatcagactgtctgggtgtgaaaccccactctgacttttactagctcttgaccataggcatagtttccgtatctctaaatgcatgtaagggtccctgtctaccttgtagggtggttgtgaggataaaaacaatacacagcacatgataagagctcaatgaatattagctgctgcctttgttattcgtattcatattattgtagatattttctgatgaatttgatactcgttcaccatttacttcaacacatttcragttaaaagatatttcctgctttgagaataaaattatttcaagttaaaataaaaattaatctaatatacccttaagtagtaatgaggcatgtagttagtgcactgaagtagttatgtgcttcccaaagtgggaacttaaaacaaaaaggaatcttttaagcttaacaattccttatgttagtcatataattatcccttttctcagaagcctggggccaaatggatctgttcctaggagaaaggaactgtctctcctggcttaacaaagattcagtttaaaggctagctaccctctgagtcatactgctttctgatcttggagtgcttgcctctgtcccatgagaaagaaaggtggatgaacagcacttgcaggaaggaactttcatctttcttgaagccaatccaaggcctcagatgcagaaagaatgcctaccttacctcttcaggggaaaaggggtttgataaaggtgctctacataatgcgaatctgttttcattaattcatgcattcatctactcttttattatgcattcaattcctcaaccatttattgagtatatacctggtgtcaagcactgtgctagctactggacacgtcaaaaggaaagaatgagattttgtcctctgccttgagattaaggtagtttttttgtttgtttgtatgttttaacataccaagtccagtgaaatcttaaaatattttttatatggctgggcgcgttggctcacgcccgtaatcccagcactttgggaggccgaggcgggcagatcatgaggtcaagaaattgagaacatcctggccaacatggtgaaaccccgtctctactaaaaatacaaaaattagctgggtgtggtggcaggcacctgtagtcccagctactctgaaggctgaggtaggagaatcgcttgaacccaggaggtggaggttgcagtgagccgagattgcaccactgcactccagcttgggtgacagagtgagactccatcacaaaaaaaaaaaaaaaaaaaaaaaaaattctgggagtgaatgtgttctgaagcagatttacatttgctaaattccatgccaggcagaacaaatgtaattcagtgcatatttgaaattcataaaatggaagtacttgagtagttggagaacctgttattgaggtgaagaaactcaatcataattagagtcataatgattacactgggtagagtctaagcagcaatttctaaaatccagtgactctytattatctctgtgacaaaatgttggaatttaaatattacttctggaaggccaggtaatttttagatgtgttggaacacttttattgccccatagcatagctttagatttttttctttatcccaccctttccaccaatctgggaaaagaaccatttccaaattcttgtacagagtaaatcacgtgctctttaattgttggaactaattttaaattttgatactgtttataaatttactagtcagaattctgttacttgatatgttactttgggtttgaaaatgtttctcttttttattcactggtagaatacctgacttttgggagaacagcaaatatttcatggtggtaaacttgttttaattagctaacaggaccattcacagtttttgaagcattctggccaagaagtaatttagagtggaggatagaactattttcttcttgaaaacaagaaggcaggcaagcagtgttcataaggatgacatatacaagcaaatgtggtacttcataaaaaactgagttggttctattgttaagtagcatatttactccttttgacttggaaatttttttcttttaaaagtggccatgggctttatttaataacttttaccagagagcagcagagaaggccatgcatatgtccaaatgtattgtgcttttttttttctgtagaatccacatcctgtacaaccaaatgtattgtattaaaaatgaactgtgatagtaacttggtaacattgcaggaagtatgcctgagcacacagtggttctcttaatgtggttctgagattttcatgctgcttgtctttgttgacttaatcccactaggaagaggtcttcataaaattcctttttgctaggtagataacctgtgggagctgtttgttttttcctaagcaaggagaatacctacttgagtgctaataggattcttagtttggttttctaattggaagccctaattaagctctgacaagatctctttttgttgatattttgacaccctctttgttgacgtgattctttgttcaaagatcttttagcagctaaacaaacaaatgtgaggtgatgacaataattttatattccatgtaccaagtgtttatacaattctactttgccagtagtatatagtatcttcagaaatcttgaactatatgtgtactgttgaaatgaatgttattaagaaagatgaaataaacatagtaatttattttttgctgatagttgaacttagcaagttctattgttaagggatgtttatttggtataatgtcatgctttctttaggttccatgttgagaaaagcctgaattcttttctttaaaataatgcctgcctcattcagacccacacacagagtttctgcacatacaagtcagtccactgtccctacacaaaaccctttaatagcatctctttgccctttggatagaatccaaacactttaccgtcctaccacttcaccccgaatgctcagaggactgctttctgctttctgctttcttctccagccttctcttggtcctttccccttaatctccagactctagatttactagatacctaacatttaatggaatttgttaagctcccctttgacccagatraaccttactcaccctttgggtctcaaattaaatgtcactcctatgggaaatctttatcgacagaagtataccatctaatgctttcgcgttttttttccttttcttttttttagtgagactagtacacttagatttacttttaatcacacattcagtggcctatgttatctgtgatctttctagaatatatgtttatttcttgcaaggactgtttctctgcctctttcttcattgtgtcatactgtgcttgccccatggtaggttatcttaaatatttgcagattgactggttgattggtygataaggagaaagagttgtacaaggacttaatggcatgatagagaaatctgtttctagtaaaatttactcaagttatgttattgcattttatattattttctgtccaaaatctggtcttacaactgccaattttcttactttgttagtagcctatgacattacatgatcttacaaagtaaaatgtctttattcagcacctactacattagaatgtgatcatttggacagggtgtactgacagcttttagaggtaactcataaaaagaaaaatctttttcaaatatccaaaagcattatagatgtattattttacttacaaacrcttctgctagttattctcaattactcttacctatttcttatcaagtttcataaggatttatgttaatacatctcaacctagatcaaagtactatatgattttccaaatattaaaagtgcatttttatgtctatctaatcattaatctatccagtcagtgctttttaactggaagaataaattaaaaacatctttaatactaaattgtggatatttagaaagaaatttagaatactacctctgctttcttcaaatattcggaaaaaattcttaagtttcaaatttgtagcaactcaaatctgcaccatacttctagttatgttgaaataatgaggtttttctattttgtatttccagaataataaaatatttgcatatgtatagaaaaataggaaacttggctgggtgcagtggctcacgcctgtaatcccagcactttgggaggccaaggcaggcaaatcatgaggtcaggagatcaagatcatcctggctaacatggtgaaaccccgtctctactaaaaatacaaaaaattagcagggtgtggtggcatgctcctgtagtcccagctactcgggaggctgaggcagtagaattgcttgaacccggaaggcggaggttgcagtgagctgagattgcgccactgcactccagcctgggcaacagagcaacactctatctcaaaaaaaaaaaaaaaaaaaaaaaggaaaccttggcttagctaaattttgggaatattctttatcttttcctttgttgaaaaatgaaatgagagtaaacatttcttttttttttttttgatacagagtcttgctttgtgacccatgttggagtgcagtggtgcaatctcagctcactgcaacctccacctcccgggttcaagcgattctctgcctcaaccttcagagtagctgggactacaggagtccgccaccacgctcagctaatttttgtatttttagtagagacggtgtttcaccatcttggccaggctggttttgaactcctgacctcgtgatccacccacggcctcccaaagtgctgggattacaggcatgagccaccgtgcccggcctgagagtaaacatttctatatggaaatgaatctgttgaacctcattcagataaacaaatgaatatttggccagaacawtgattattcaaccattatattcaaatcttgactgaaggtccatggtcacggtctgtgtgccattgatgaagtagcactttataaaaagctgtcaatgttaaaagtaatgtttaatggctaatgttaaaaatgaagttatatgattctaaagtcttcttatgaacttaattttgagatattataattaattttaaattttgattatacctttttcttttcaatagacctttgtggattacatgtaatttatagcatggtagagtgggcctagaagagacacacatgaaaaagtatggttatgtcccctaaggactgggactttaggagactgaactaatgtttccccaaataatatgtcgtatgctgtgatagagtccaaaaattagatgaaaataaagtattatgtgagtgccaaggaggaagcgattaatattaatttgtagaatcagaggatgctctgtagagcatttagactttattttgcttctatacagctttattaactattctatactgtgtatcatacataatgctttatttagcaatgttttcatttcagttaaaaaatactttggtcccagtaggttaatgaaaataaaaaaagattacaactgtcataccagtctatatcattatattctaatagtgataccaatcattacataaagtggcttattctcaaagcagtttratacatgttctctcactagcaaagtgaggcaaataggatgttagcttcatttaatgaatgagaaacgtgaaacttagaagtgttgttagtaaagagcaagatctgttttacctatgtcttctattgccacacagagctctcttcacactgcacaatactgcctagaattctcaaaatttcaaagcacaaagaaagcttaagaactgttagcggtacaagaacagaatttggaagaatcatcagacaatcagacctaaagacctaggaagaataaactactaagtatagtattttgacatttggatttttaataatgatgggcctattctgaatctttcagtttcctctaacgttctgattattttattccttctatttcagtctttatatagtggggtgggtgaaagtatgtatattatcattctactcaaaatattagtgtgggtagtgtaggccagaagtcaaaaacacagactatggagttagatggcttgatttcaaatcctggctccactttgaatagccctgtgactttgggaccactgtactctctctcctagccttagtttactcatctttaaaatggaataacagctgtatgtgggcagtaggattattgtgaagttttaaataaggtgatctacataaagaccttactatgtggttttgctcattgcagactgtcaataacctagccattgttaggataatgatctaatgagatagctgaaatcttgagagtgctattgatactacctttgtctgccacttaaggtctaaattataatttaacaactgtacctaataatttgtgagtgtttgataaatgtttgaggaattaaaatattaggcttgagtttgcactgctcagttctcaactgttggttagagaaaatcattaagttgagagacttaatgttggatttttagtacctaatacttcagcagtgtgtacaacacaaagacaaaacaaacattgccattgttttggttctgatatcaaacttattctagcaaaattttttaacttagattaatgtttgactttcaccttttcctggggttgaactaatacaggatttgaaatgttaatcttttggttatataagctagagaatgaaaccaatttcttttgttattttctgattaatacatacattggtttgttaacctggataatttgtctaaaagtgatgttttctaacacttaggagaattatgtgataaagcatgtgaaggcaaagccaatttgtttaacttgtagcttcttttagttactaatgttgcaatgcatgtgaagaaagatggtgctttatgcattccaaattcaattttatctattttttatcataagcaacttctttagagtttaacagtttatgttacatgtgattatagcttcaaatacataattgcagcattttcaatagcattttcaaaaatactgattcctgaaaataaactttttgttactttttaaaatataggaaacttcaacaagacacaaattttaaaaaattatctttattcattaatatggcatgctagtaaagaatgtaagaacaatttctgtgatagactgctttagaaatcagaatatattatgctttaacaatttttttcctcatttggaatctgataataggatattctgagagatttgccagctttactctttttaacaaacatacaaaaggtgtcatggtaacatgtttgagagaacctttgactcttatctttcactaaagcyttacactccttgtcctttcctgggtctgatggtacatttaccatctgagataaaagacatgctcaggcaccaggtctcttgggatcttaaagcactatcggaatccaaagaggtggcaatccagcttctttcttgttactttaaaatatatatgctaattcgatcgggaattcagctcacaaaagtaaattaattattctgccttaagaaaagtatatcaagagattaatatctctaagaaattcactatttgtaagtataaaaaataaattatggtaatgtttcttttcatggcatctaaaattcctgtttagaaagataaattagctttcatgatcaagacattaaataaataaacagcctaactacggcaactgagttaagtgttttaaataattctacgttaaaaagtgatattgagaaactagaaaatgtcacaaattttaatgggaatacttaaattgatataattattttaaatcatatatgtaatttaatattcagataattctttaaaatccatattcacccttcttggctttactttatatctagctcaaaggaaacattttttttccaagtacattttaattcagtaagaccagatttttcaaaatatcatgacaagacttagcttttagtgtatttcagcaataatgataatttcagtgtatcctaagggaaaaactgttatcttatattttggttgaaagagttgaaataaacattttgagagggaattgttattgtctacaatatgtcctagaccagtgaaattacctgattgtgtctattttggacagagacgtggatcttagccacagttacctaactgaccagattttggagttactcaatttccctcataataactagacacttgtgacagctagaaaaaataatgcagttaactttaattttatagtttctaatttgataaatattagctattttacagtataggctgttgytagccacagaggaaaatatagtatatggatatgtggtttgaatctacaaatctgtgtgtgggtatgggtgtgtgtgtgtgtgtttatatagagtgagaatgaactatggatgaacaaggaaaaaattagcaattgtagcaaatgaattgaatgcattacagttttaaaagaatagctcttggagagaatccagattggttcaatttcaagtagcaaaggtaataatatctgtgaattacctgtatgccaacattcttgtataatatttcaatgggctcagctttttctcttcactgtaataggaactctgtgtctttttttagttagtaccctttgatattctcagataaaaggcatccttttcaattctttgatcatacatgacagcaagccagcaaactctcattcatgacatttttgaaaaatactgagtcttctaatttattttaaataattgaacaacatggcaaccttttacagtaaaaagtataaaggaaattaagmcagaatttaatggcatgctctaaagaacaagtgggaaattattggccataaaagaaaaactttgaactctaaatccatcattttatcaatttttgacaattcactgtattgcctttaacaacagagtctaatgggaatagcctagacttcgggacaaatctgggttcaagccccagctctgctacttattagctatgtgatctgtagcaaattttaacctttatctgcttttctcttctaatttgaaaaatgaggataaaaacagtacctatctcagaggaatgttatacaaattaaatgagatacagtttaagcatccctaatccagagcttgaaatgctacagaatttgaaactttttgagcactgacatgatgctcaaaggaaatgcttagggctgctgaaccaataagtataatgcagatattccaaatctgaaatctaaaaaacttctggtcccaagcattttggataagggatattcaatctgtactgtatgtcaagaacagtgcctggtagatagtaaatatacaataaaatgtggttcttggccaggcgtggtggctcacacctgtaatcccagcactttggaaagccgaggtgggcagatcacgaggtcaggagttcgaggccagcctgaccaacatggtgaaaccccatctctactaaaagtacaaaaattagcctggcgtggtggtgcgcacctgtagtccaagctacttgggaggctgaggcagaagaattgcttgaacccaggaggcggaggttgcagtgagccgagattgtgccactgcactccagtctgggcgacagagcgagactccatttaaaaaaaaaaaaaagtggttctttctctagtactggttctactactcctaaatgtcctaagtcaagttaattagttcatcctttataaacataggataacactgactttcaggattgttgcaagaattatgaatgacatatgaattatctagcacatccattaccctgttgcctgacacacagaaatacttggtaaatggtggctttactgcaaagctcctacctaatctgtattgttctttgaggtgtttttggataaagcagagaatatggatttcaggcttttagggactttttagagtagcagagactcaattacagaaaacacataagcataggtgagaatattccaacttgcagcatgaatagagaaaaacttcataaacttaaactattctaaatttcgatttctcatacttagatctggaccaggctgaagtttactttgaaaatatctgtgaatcaatggttttttgaactaaataaaatgtgaaacgtagttcaaagggacaagattagcttttaacataatatttttatgattttaagctcataggttatgaacaaaatgcttttgtattcattaaagccagaatctttaatttttagaaatagtttacagccatgtgtcaacttcagtgatgttatttctttttaaatattctatatttttcccactatttacatggattttcttacattttagttaaattctgagtgctttccagtaacatgtaattattgttgggtaagaaataattaattattctttctaattattttttgtaaccattagccattcccactttttccttacccccaactacccttcttagcctctggtaaccatcattctactctctgtcttcatgagtttaaatgttttaatttttagcttccacaaataagtgagaatatgtgatatttgtttttctgtgcctggcttatttcacttaacatcctgccctccatttccatccatgttgttgcaaataacaggatctcattcttttttatggctaaatagcactcccttatgtatatgtaccatgttttctttatccattcatctgttgatggacacttaggtttggctattgtaaacagtgctgcaataaacatgagagtacagatatctcttgtatatactgatttcctttctttttggcatatacccaacaatgggattgttagatcatatggtaactctatttttagttttttggggaacttccaaartgttctccatagtggttgtactaatttacattctcaccaacagcagacaaagtttccttttaagattttttttcctgaaaacattatatatagagcagtgttttccaaaatgtgtacatcacagtccatgagaaatgaaagcaggttattgtgtcaatctagtatttttttatttaatgccaagaactagactaggaaagaaaatacgagtttactataccaatcaaagggaagtatttctaatttttgtatttgtattcatatatgtttataatggcttatgatgtaaaatatatttctaagcttgattagtgatcaaataatttacaaaagcactgcctaaagcacaaaaccttgcataaaatttgcattgttcagagattgtggcataggaaataaaatatgaaataggttttctttaccatgaacctcagggaatatctaacagtagattgaagtggactaaatagaatatcattcttctatttagctcagaaatgtttgttgatcatttatatttataggatctagagtcacagggttaataaatgtaatatctgcccttagtggtatcatagtctcctaggggagacagactgaaatcagtctattataaaaattatgatgcatgtgtaaagcaagaacaatttgcagggaataacagacttcaaagtgaataactttgtgggtacagatcaaaaggcagtaacttctgataaagattttgaaggacaaatagcagcttaccragaccaaaaggggctagggaaagagcattctaggcattcaaatgtgtcctaaggagcagagggatgttttagcttgatatatttgcaatactattttccagctgagggaatgtgccaggagagagattggagagtttgtcaaggaaagtcccctatgctaaggataagtactttaagcttttagtatatacgtatattccaaagggtatttagtaaggaaaagacttgatcctatgtggtatatgttactattatgttttattcacttggacatgaatctgaagttagtgctggagggagcaaggctgaaggcagaaattccatctaaacttcatgtaatggtccagacagcgcttgaaccaagacagacatagtggcaacagcagtggtggtaaagatgataggattttaataaatatttaagatttggggtctaaagaaggagggtgatgagtggaaagagaaatctagaatgattttcagttccctggtttatgtgactggtttatgtgacttgatagatggtgatgccatcatccaagacaggatgtgtatgtaggcacaagtttgggcaagaaggcaatggattcattttaaatcggctgaatatgagcattttatgtgacacctaaatgaaaccacccagttgtaacagctgtttgtaatttctctggagttcatttgggagatctggtttagagacaccactctggagctatcattgtgtagacagtggtaaaatcatgcaagtggatgagattacaaagccagggataatgcctgcaattaatgaaaaatcaaaggaagtggggccacagagattgagaaagaacaatagtctagtggaacctgaggagaggtggactcaagaatacctgctgggtttgacagttaggaagtaactggtgcaatatgtccatagaaatggaatagaatggcctgggacaaggccattatgattatagtgaatcaagagtgattagggagagtgaggaaaaggaagatactcagggtggactagtctttcaggtagcttgactgaggagctatatgacagtagcaacagagaatgagagagacaagggaaaactttatgaccatggaagacattcaagtgtttataggcaaagggaaagaaaccatttgaaaagaagttagaaatagaagaaagggagtaaataattgatgatggagtgtgatccttgagaaaatagtcatgagaatactagcagactgattagctttaggtaggaataaagaccttctgagaccataaggaaagaaaaagtatgaagatagaaagggtgacgtgacataggaagtagagaaccagaaaacaragaatgtggatcccagcccactttctctcttacttgtgtggtagaaattaaactatgtgctgaaagtgaaggctaaggagaaacctggagatggtatagaaacctcctgaaagggtggctgggaaagagaactgaccagagacatggcaaaaagtagagtgagatcarcacagggattaaggtatatagccaaagaggccttgcacagtccagttccagaaaatgccactcctcacttgagtattgttgcctccctgatcattaaatattagcaaaaatactgtaaaatgatggaatccccagctgccttgctgtggaaaaatggattctacaagatgtttaccaagtttgtttccagtgtctattttcttacctgaattaattatgacagttgtttttaaaggtttactttgttttaagaaaagaagggaagccaggctcagtggctcacacctctaggtcccagctactcaggaggctgaggtgggaggatcgcttgagcctgaaagtttgaatccagcctggacaacatagtaaaaccctgtgtctacaaaaaagctggggcgggtgggtggagtaggttgtgagggttaaaggaggttatgcatgtagggtgcattgtatagtgttggtcccataattgacactcagtgattgatagatattatcattattgttgttgctattcattctgaaagtctataatgtagctttgggctgtatttagctttcctctttctcactgtctccactactctgccgatatcacgattttcttatcttttctgattcactaagcagctcttccttgtatgtcaaagtcaggtatagacaaatagttatcctatttcctcaagctcctggggatgagatttacaggaagtccaatttagtatttataaaatgcttacttctgtacagataattaaaatgctattcaggaaggcaaagtctaccgtttctagtatactttgcttccatgctaatttttggttggtgtctttaattgtattatgtattatttttatccaaacagataatttgtggtagaccacaataacttcttctttttwttttttttttaccttgtttcctcctctaaatggtgtgaaatgcttgacgattggagtgccttttcctatcatcctccattgacatgctaatgttaagttttattgtaccgcaactaagtggaatctgagattatatttaccactttgtgttataagtgtaagttcagcctttgtatcacccatcctatacattcattcgttcactcaattaagaaactttttgaggcagtcactgattaataagtcaggatgcaggagtgaacagtctccgttcttgggaagctgtgttctagtagggagagacaaagaaactggtaaatttaaagaatacaaaataagtgaggttgtaacaagtgctgtgaaagaatattaaagaagagatagaaagtgtcaggtaggaaatacaagagatggggatcagggaagacctttctgaggaaataactcttcagtagggtactcaataaataaagaggagagcagaggacatgtttaaggggaataattctgtaggtaaaggaagtgcaaaggacgtgaggtaagaattggcctggtatttttaggagagcatgaccactgtggccgaagcaaaattaatgactaggagagagggaagctgtggttagagaaggagtgggggccataacacaattcaaatatgacactgcaggggttttttgtttgtttttttgagatagtgtctctctcttttgcccaagttggcatgcagtggcgtgatctggactcactgcaacctccacctcctgggttcaagcaattctcctgcctcagcgtgtcaagtagctgtgattacaggcatgagccaccacgcccagctaatttttgtatttttagtagaggcggggtttcaccattttggtcaggctgatctcgaactcctgacctcaagtgatccacccacctcggcctcccaaggtactgggagccaccatgtgtggcccactgcagggttttgagcagagaaataaaacattggttttatggtatctttagattttaagtattatttctgtctccattatgttttagcctcttttttgactcatgagcaagtaatcaaaatgattcagtattctatgaaatgtactactagtgaaaagtatctcatagataatttaagctcaaatccccactaatttactttatgtgggtagaatactaaaaacagataatattgtttctgttaaattcaatcatgtgactcaaagaaatgagtgtctgtggatggagagacagaatcataattctgttactgtgtacacatattgggaatgcttttgacacctgcagtcattctgcatgataattctaatatcatttctctttgtccataacacaatgtttataacttggtcacagatacatttgacttttgccaaaaatgacttcaaaaaaaggactttgagtttcttcttcttaagtaaaaatataaacatattagggcccaatttttcatcttattctgartcacataggtaatgcatcttacccagagaagataatactgataaaggaaagaagaggggaaaagaaagtgtcctcaaggcctaatattgcatgactaatcttctaagtgctgctgaggagagctgatcaaatctcccagcacttccctgtcattacagggcccagtgtttgcatagggcatgcactgggctgctgagatctgtgtcttgaaaggccagtatcttgaaaatgataatattattaagtcattagtgctgaattctgcactcagaactcagcatggatatacactaaaatctagtttaatttgaagagtaaattgcaaagagaaatataggatgagttccactttaaaactgacaaatgagtgttttcacaagtaatctcctttaggaaactgagagtgatgtttggacaattatgaattaccttttaaaaattgctatgtaaattattcattaatagtttagagaatttttatgctaatcattcacttctagtcataatactattctagtaaaatatgaaagtgctatgcagaattagttgggaaagcaatgtaaaagagataatttgttaccaacagctaaaattgtatggtaatgcctttttgccacatggcttaaaaatacccggaaaaaaaaaagattttaaagacttcaggtgaatttaactgtattgttctatttactctagcatatcttttcaagtagtaatagttgttgcagtggatttacaccccaagccaatagaaaaaagagttaaggttctcaaagccttttatcttttgtgttatttattgagtagttacaggacaaaagcacacaagcaaacccaacaaacagcaacaacgacaaaaaaaaaaaaaaaaaaaaacacaaaaaaaaccctcaaaagtcactttgggtagaagatccattccactttgtaaatttatcaggactctgttcatgttcactctttcctggcatatacccaaagcactgtttccacatctgtcatattcttttaggggtcgaataaagtatttgtgagctcccacaatgtacagatgcaaggcataatctgggtacttagaggacacagaaaggctgtctttgtcttctgaatgtctgcataaatttgtatgaacattagtaggagttaaaagaatcctgggcttgaccctatcactggtcagccaaaatacctttaatgrgttgtccttttttttttttttttttttgagacggagtctcactctgtcacccaggcttggagtgcagtggtgggatctcagctccctgcaagctccgcctcctgggttcacaccattctcctgcctcagcctccctagtagctgggactacaggtgcctgccaccacacctggctaattttgtttttgtatttttagtagagacggggtttcactgtgttagcaggatggtcttgatctcctgacgttgtgatccacctgcctcagcttcccaaagtgctgggattacaggagtgagccaccatgcccggcctagtttccttaaactgtttacataaattaaaatacttggattgtttactgttttatttgaggattaaggaaaatagtatatgtgaatgttttcttaaaaagtgtttttcacatgttaggttttcataatattttgacattatttatatcacttcaatttcatatatttgtcatattataaaattattaacaatgaaaagttacaaatgtaaccttatrcatatgtagtatcatagtcataagtttacatctgtgaccttgtatgtaaccatatgtaaaatactcatgtattatatcagtatacaatgaatagtagagcaagcctaattagatttcagacaaataagagtgcagagtggaatgcttttgttatacaggggagcatccctaatctgaaaatttgagaattccaaaaggctccaaattctgaaactttttgagtaccaacatgacactccaaggaaatgctcattggaatatttaagattttagatttttggattagggatggataacttttcagtagataaatattctaaaacccaaaaaatccaaaatacaaaacacttctgttcccaagcatttcagataagagataattgacctgtaataatagctaccatttatataaacctactatgtttcagctaatgtgctcggtgattaaatatatcacacaataaaccaatgaatagatgtcttatttctgttttagagatgagaactctgatgttcattggagcttagttacttacccaaaaattatgcacttaaggaaagaaaagccaakattcaaatcagttatgtaaatatcaaagctcaagcccataaccattccaaccatttctccaaagggattgatgagacaaggctgcagacgtgagagagaaccagtttgtattgagaggacagaatatgttatggtagtgccatgatgaggaatttagatttctgtcatttaggcaaaaggcaaccattgcttatttctgcccagatgagtgatatgataaaagcaatacttaaagattagtgagatcttgattttacagatatggaaatacaactgctcgcttgttagtgacctgttttatataatgcagaataataaagacaaagtccttgctggtttgaattttttatttttttgtgcatgtgtgtggaaggttttttttttttttttgtggactgacagctgtgagttataatgagcttcccaaatttatgtgtacctactctcagcccatggagagtagtaaattgctctctttcttatgacacatttagattaggagaaaacgttgagaggagggaagcattgcattggctagttaaaactaatgtaggatgatgatcctgtgaaaagaataaaatcagccacartgaaaagtaaaaatatcccacaggcagacacctagaccagagagagtgggtgctcagctcttccaaaggacatcagcctacccttgctctgggaagccctagcctttggtttggttgggtagggaagggatactggcattgaggtgctccacagagaagctgtggaaatgacatgattcccaatagcacacctgggagagcctggacaggtttatttgcgttctcacaccgagcatgacacctgggaactgcaaaccattcctcagccacagagacagccagctttgttgtctctgtaattccttatttaaagtggtcttttagttgtatttcagggcatgactcagtcagattccctactactccccccatcttgcctttttaattgctttgggatgaaataatcctaggtttggaaagtaatttagcaatcttctactgtagataatatcagaaaatccccactgtaatatgcctggtaacctgtactccattaagcaaatacttgttgagcccytcttttatgtaactacagaggtacatatttaaatagacacctctcttacagtcaaggaaaattatactaatcaaacaacaatatactttacaattctaaggtgcacttttttaatattttagctactatgaaatttgcctggttctcaagtggctgttggtcaaacactagtcatgatrtatttatagttgtcattgcccgctcatgcacgaactcagttatagctgtttatattgtctctttgagttataagcattgttggaaccacgtatgttgagtttaattgctatttaatgtcttcaagtaactaaatgttattgttcaaaaacacacagacaaaaggcagtgaggtgcacattagtaatagaaaagaaaatattcattattgattggatgactgtctgcatttcccaattttcacacaaaacaaaacccaaatgctttgtaggaaggacttgagaaataaagattaccataagctgatgaagcctgttatattttcttgccaacatacaagcagaagagcacatatcatacatcaaacaaggaagtccagcaacaaaatccttgttataatactggagtgctcctttaaaaacattgcttcrtgaacacttttttttttttgaggcggagtctcgttctgtcacccaggctccagtgcactggcgcgatcttggttcactgcaacctctgcctcccgggttcaagccattctcctgcctcagcctgccaagtagctgggactacaggcacatgccaccatgtccagctaatttttgtatttttagtagagacggggtttcattatgttggccaggttggtctctaactcctgacctccagtgatctacccacctcagcctcccaaattgctgggattacacacccggctgatgaacacatttgatagcacagatgatatttggtgtaaaaacatgaatgatactgatgtgaaaaatgactgatgagccaaagtcaatgggaagaagatttgggaatatattaatcaatgtttcacttataaagtatgataaagattctaagtgataggaaaacattttgttgtttaaaaatagataaactaatcatatgtcttataatcagtggtatattgaaatatggtagtgacagccacaatgcaatatactttttaatcctcagacagccctgcaaggtggaatattattatttcagttttacatatgagaacatttaaatgaatagttcaatatatcatagctgattagtgctagtgctgccatttgaaccagagttcaagctgtttacccaaagtaagttgccatgagtggagagaataattaatcagaaagaagaaaatgaaagtaaaaacaggaataggataaaataaaaataacgacttggtgtttcacactttgcttaaatgtttctagtgtgggtgagctcattacatcacagtgccagctattccattctgaatggttttcttgttataaatgaattttctttttcttcagttgaactaagtgggcttccttttaactttcactcatttgcttttattctgccctctgggggagaggagggaaccagagaaaataagtgaaaataagcttggtgcctcatgcatgaaagcctctctgatacttgagcacaggtatcatgctgccattgattctgttttttagaccaggtagcctccgtttttcttataaaacagtgtttcaagacccagaataatgttaatcctgagtgtattctgttttgccagtgtgtgttaaaaatacggagttcagaataaactgttgcactaagggtttcaacacagacatggcagacatggcacacattgcatgtaccaacgactaaaatttccaggacatttttcaggtgatcgttatggacccaggcttctcacatattgatttttttttttttttgagaaggattaaaatttttttattgttattatactttaagttctgtgatacgtgtgcagaaggtgcaggtttgttacataggtatacatgtgccatcgtggtttgctgcacccattagcccatcatgtacattaggtatttctcctcatgctatccctcccctaggcccccacccttccacaggccctggtgtgtgatgttcccctccttgtgcccatattttctcattgttcagttcccacttatgagtgagaacatgcggtgtttggttttctgttcctgtgttattttgctgagaatgatggtttccagcttcatccatgtcccagcaaaggacataaattcatccttttttatggctgcacagtatatatgtgccacattttctttatccagtctaacattgatggacatttggattgkcyccaagtctttgctattgtgaatagtgctgaaataaacatacgtgtgcatgtgtctttatagtagaatgatttattattctttgggtatatacccagtaataagattgctaggtcaaatggtatttccagttctagatccttgaggaattgccacactgtcttccacaatggttgaactaatttacattcccaccaacagtgcaaaatctttcctatttctctacatcctctccagcatctgttgtttcctcatgttttaatgatatggccattctaactggcgtgagatgacattgtggttttgatttacatttctctaatgaccagtgataatgtgctttttttgtttgttggccacataaatgtcttcttttgaaaagtgtctgttcatatccttcacccactttttgatgagcttctttgtttttttcttgtaaatttaagttccttgtacattctggatattagccctttgtcagatggacagattgcaaacattttcttccattctgtaggttgcctgttcattctgatgatagtttcttttgctctgcagaagctctttagtttaattagatcctatttgtcaattttgggttttgttgccattgcttttggtgttttagtcatgaagtctttgccgacgtcctgaatggtattgcctaggttttcttctagggtttttatggttttaggtcttacatttaaatctttaatccatctttagttaatttttgtataaggtgtaaggaagaggtccagtttcagttttctgcatatagctagccagttttcccaacaccattatttaaatagggaatccttccctcattgcttctttttgtcaggtttgtcaaagatcagatagctgtagatgtgtggtgttatttctgatgcccgtgttctgttccattggtctatatatctgttttggtaccagtaccatgctgttttggttactgtagccttgtagtatagtttgaagtcaggtagcttgatgcctccagctttgttctttttgcttaggattgtcttggttatatgggctcttttttggttccatgtgaaatttaaagtagttttttttctattcctgtgaagaaagtcaatggtagcttaatgggaatagcattgaatctataaattactttgagcagtatggccattttcatgatattgatccttcctatccatgagcatggaatgtttttccatttgtttgtgtcctctcatttctttgagcagtggtttgtagttctgcttgaagaggtccttcacatcccatataagttggattcctaggtaattaattctctttgtagcagttgtgaatgggagtttgctcatgatttrtttctctgtctattattggtgtataggaaaacatgtgatttttgcacattgattttgtatcctgagactttgctgaagttgcttatcagcttaaggacttttggggctgagatgatgtgtttttctaaatatacaatcttgtcgtcagccaacagagataatttgacttcttctcttcctatttgaatacctttatttctttctcttgcctgactgccctggccagaacttccagtactatgttgagtaggagtagtgagagaggccatccttgtcttgtgccagttttcaaagggaatgcttccagctttttcccattcagtatgatattggctgtgggtttgccataaacagctcttattactttgagatacgttctrtcaatacctagtttattgagtgtttttagcatgaaggagtgttgaattttatcgaaggccttttttgcatctattgaaataatcatgtggtttttgtccttggttctgtttatgtgatggattatgtttattggtttgcgtatgttgaaccagccttgcatcccagggatgaagctgactttatcgtggtggataagctttttgatgtgctgctgtattcagtttgccagtattttattgaggatttttgaatagatgtccatcagggatattggcctgaaattttcttttttggttgtgtctcttccagcgtttagtgtcaggatgatgctggcctcataagatgagatagggaggagtccctctttttctcttgtttggaatattttcacatgraatggtaccagctcatctttgtacctctggtagaattcggctgtgaatacatctggtcctgggctttttttggttggtaggctattaattactgcctcaatttcagacttgttattggtctattcagggattcaacttcttcctggtttagtcttgggagggtgtatgtgtccaggaatttatccatttcttctagattttctagtttattcatgtagaggtgttaatagtattctctgatggtagtttttatttctgtgggatcagtggtgatcacccctttatcattttttagtgtttctatttgattcatctctcttttattttttattagtctgtctagtggtctattttcttaatcttttcaaaaaaccagctcctggaatcactgattttttkgaaggtttttttgtgtctctatgtcctttggttctgctctgatcttagttatttcttgtcttctgctagcttttgaatttgtttgctcttgcttctctagctctttaattgtgatgttagggtgtagattttagatctttcccactttctcctgtgggcatttagtgctataaatttccgtctgtacacttctttagctgtgtcccagagaatctggtacattgtgtctttgttctcattggtttcaaataacttctttatgtctgccttcatttggttatttacccagtggtcattcaggagcaggttgttcagtttccatgtagttgtgtggttttgagtggctttcttaatcctgagttctaatttgattgcactgtggtctgagagactgttcattatgatttccattcttttacatttgctgagaagtgttttacttcaaattatgtggtcagttttagaataagtgtgatgtggtgctgagaagaatgtatattctgttgatttgggatggagagttctgtagatgtctattaggtctgcttggtccagagctgagttcaagttctgaatatccttgttaattttctgtctcattaatctgtctcatattgacagtggggtgttaaagtctcccactattattgtgtgggagtctaagtctctttgtaggtctcttagaacttggtttatgaatctgggtgctcctgtattggatgcatatatatttaggatagttagctcttcttgttgcattgatccctttaccattatgtaatgcccttctttgtctttttttttatctttgttggtttaaagtctgttttatcagaaactaggattgcaaccactgcttttttttttttttctttctatttgcttggtaaatcttcctccattcctttgatttgaacctatgtgtgtctttgcacatgagatgggtctcctgaatacagcacaccaatgggtcttgactctgtatcccatttgccagtctgtgcctttttattttatttatttatttatttatttatttatttatttatttattttgagayggagtctcacttttgtcacccagcctggagtacaatggcgcgatcttggttcactacaacctccaactcttgggttcaagcagttctcctgcctcagccttccaagagctgggaatataggcccccaccaccatgccccactaatatttgcgttcttagtagagacggggtttcaccaggttggccagcctggccaggctagtttcaaactccctaatctcaggtgatctgcccacctcggcctcccaaagtgctgggattacaggtgtgagccaccacacccagcccagtctatgccttttaattggggcatttagcccatttttatttaaggttaatattgttatgtgtgaatttgatcctgtcattatgatgctagctggatgttttgcccattagttgatggagtttcttcataatatcgatagactttacattttggtttgtttttgcaatggttggtaccagtttttcctttcgatatttagtgcttccttcaggaactcttgtaaggcaggcctggtagtgacagaattcctcagcatttgcttgtctataaaggattttatttctccttcatttatgaggctggatataaaattctgggttgaaaattcttttcttttagaatgctgaatattggcccccactctcttctggcttgtagggtttctgcagagagatcccctgttagtctgatgggcttccatttgtgggtaacccaaccattctctctggctgctctttacattttttccttcatttcaaccttggttaatctgacaattatgtgttttagggttgctcttctcaaggagtatctttgtggtgctctctgtgtttcctgaatttggatgttggcctgtcttactaggttgaggaagttctcctggataatatattgaactgttttttccaacttggttccattctccccatcactttcaggtaccccaatcaaacataggtttggtcttttcacattgtcctgtatttcttggaggctttgtttgttcctttttattcttttttctgtaatcttgtcttcatgctctgtttcattaaggtgatcttctatctctgatatcctttcttccgcttggtcaatttggctgttgcttcttctatgtgcttcattaagttctcgtgctctgtttttcagctccatcaggtcatttatgttcttctytaaactggttattctagttagcaattcctctaaccttgtatcaatgttcttagcttccttacattgggttaaaacatgcttctttagctcaggaggagtttgttattatgcatccctctgaagcctacttctgtcaattggtcaaactcattctccatccagctttgttcccttgctggtgaggagttgtgatcctttggaggagaagaggcattctggtttttggaattttcagcctttttgcactggtttgtcctcatcttcgtgaatttatctacctttggtctttgatgctgttgaccttcagatggagtttctgtgtggacattgtttttgttgatgttgatgctattcctttctgtttgttagttttccttctaacagtsaggcccmtctgctgcaggtctgctggagtttgctggaggtccactccagaccctgtttgcctggttatcactagcagaggctgcagaacaacagattgctgcttgttccttcctctagaagctttgtcccagaggggcacccaccagatgccagccagagctttcctatatgagatgtctgttgacccctgctgggaggtgtctcccagtgatgaggcacggggatcagggacccacttgaggaggcagtctgtcccttagcagaactcaagcactgtgctgggagatctgctgctctcttcagagctggcagacaggaacgtttaagtctactgaagctgtgcccacagctgccctttccccaggtgttctgtcccagggagatgggagttttatctataagcccctgactggggctgctgccattctttcagagatgccctgcccagagaggaggaatctagagaggcattctggctacatcgtcattgctgagctgtggtttgctctgcccagtctgaatttccctgggctttgtttacactgtgaggggaaaactgcctactcaagcctcagtaatggcagatgtccctcaccacaccaagctcaaaagtcccaggtcaacttcagactgctgtcctggcaacaagaatttccagtcagtgtatcatagcttgctgggctccatgggggtgggatctgctgagcaagaccacttggctccctggtttcagccccctttccaggggagtgaatggttccatctcgcttgtcttccagccaccactggggtatgaaaaaaaactcctgcagctagcttggtgcctgcccaaacagccgcccagttttgtgcttgaaacccagggcccttgtggtgtagccacccgagggaatctcttggtttatgggtcgcaaaggccgtggggaaagcgtagtatctgggccggagagcactgtccctcacagcacagttcctcaaggcttcccttggctagaggagggagtttcacaaccccttgcacttcccaggtaaggtgacgccccgccctgcttctgcttgccctctgtgggttatagccactgtgtaaccagtcccagtgaaatgaaccgggtacctcagttggaaatgcagaaatcaccagccttttgcattggtgtcgctgggagctgcagacaggagctgttcctattcggccatcttgcccaggaatcaaaaattaattttaataaaaaattttaattgacaaatgataattgtgtccatattcatggtgtacaacatagtgatgtttcaatacatataatgtatgatggatgatcagaccaaggtaattagcatatccatcatcacaaacatttatcatttctttgtgttgggaacacccaatatccttttcrctatttgaaaatacataaaatattaattctagtcatcctgtagtggtatagaacactataactcattcctcctatctagctgcaattttgagaaggatttttatgttagctctcagggcacatagcctcttattaggatagggaagactggacaagtctgtggcctagatatctctatgtgagggatgcctttccataaagactcaggggcttatgatggcagaaagtcctatatgtacatcagagatgtagtagctgacatcagtaaggatcctgtatagagcacagtccccagagtgagactgccttggtttgaattccagctctgctacttatcagcttggacaattgcttaatctttctcaattctccatctgggaaatgatgataaatacttgtactcacctcctatggttacagaaaggttaattgaactatttcatccaaaatgcttagaaacattgcttgacatattttaagactcaaaatgttgttgttgttattgttgttgtgcatatgtatagcaatagaactcaaataattgagtaatacatttggtgtatttgtttcttagggctggcctcaacaaagtgctaccaaccgagtcacttaaaacaacagaaatttattgtctcacagttctggaggccagaagcctgaaatcaggatgtaggcggggccttcttgcctctgaaacctctagaagtagatccttgcctcttccagcttctggtagctccaggcctttttttggcttgtgacagcaagattccattttctgcctccatctttacatggcctctctgattctgcctgtgttcaagtgtttctttaattataaagacaccagttatattggattaaggcccatcccaatcaagcgtgacctgattacatctgcaaagatcctatttctaagtrtagtcacatttgtggctaccaggggttaggtcatcaacatatttttggtggggggtagagcacagtttaacccataatatctagaacagagacattcaaagtagaggaactggatgtaccagaagcaagcagagggcactaatggagttgggggtgaggtggaagatctaacaaaagctgatattttgacatttaactagtgaataggcctagaggtttctctgaataaatgatacacccaaatcaaacctcagataagggaaaacaagatttctgtcccctgggatgggtgtaaggggcagaatttggacttaaatcctagaggaatcagggtattgaacagattctcaagatgtaagcagtagacttacacttggcacttaccctgttcacttttggaaatgtctttccttaaacatgggataaatggcatcttggcaatttcaaagtgttaatgtactattaacaaccttcataaaaacagcattgtagattgtagttgcctggccattttccaacacaggtagattttacttatgtaaggtgtttttgagatcttctgggaatgagaatgtgtttattttctgtttttgatacttaactaagtttgctttgtgtagccaataggtattgtctcatctcgagagctttactggtggataaatatgagttcgtcaggtttttgaagtgtttaaagatacaatgaataaaaggtgcatcataaaaagaggtctattatcataatctctgtatctgtacgatcagaatttccatagtaatcagtcttgatttcctaaatacaggattatgactgtaagtgagaagcaataatctctgaaatattaaggaaattcatcttttgtatcttagtaaaaaagtattttgtgaataccatattaatgacaactgtggaaagagaaatatggaaattgtacttaacttagaattttctaatccttacaggaatttgaatcaacgaagattagatcatcccctaagtgggtttttatatagttgtttcatttccagttttccatgcctttttaacacttgatctttgtatgaaaactactgccatattcagagacatgagtcatggtacttaaaatgttttcaccatattttagacatcacaggatactacagtaggagaagagtagtctcttggcattcacaatttttacattgtaagatttgacctttcacagtagttcattacatgtgttaatttaactcatgcattattctagcagatttctcagcatatgaatttcattttggcttttcctttaaaaatattgtgtataaatttacctgcacatctctcttcctaccccctaccatgtagtatgagtgtttatttcctatgaaaaaagatatccatgaaaagaaagcaagttccattgaaagtgagaagaaagtgatgaggtgatgacttaatagccagaaagaatggcttcagataaactaaagaataaaatgtcatattgttcagggatttagatctgtaatataaatgaatctattataaattctatgcagaaactaggtggggtgaatataaaatggtttcagtgagttttccaggtcttgccaagattgctgaagtaagaacctgacctctagccaaggcactggaatggctactgcaatgatctttatgataaagagaaatatataagagtttttacttcttaaaaaatgcacaaacccctgcttgtgattgttgcctggaatatttttcccaatcccttttcttttgataataggcttagccttcctcctaccagtaggagggagtgaacacatgacccaaaactggccagtcagtatgcaccattccctggatgcagtgattgactcatgagtgtgcaggagaccttcagagggccagtcacatttatttcatggcatagttttgctggaattggtggatctaacttttaggttatcgagctggctggatgtgatttagaagatacttggagtaggtgcaagtgcagtaggtgaaagtaagatcaaagtgcagagagaagttgatcaagagtgaaagaggcaggcttcctttaagctcagatccatttgcgcctgaaggcggtgtttatattgtactgcattttatgagggaaagatatgtttagtaatgttcgtgaatggcaagatttgcaaagagcttaagagaagatcctgcaagtggcttaagtttctatagtatcttataccccccctgcctatgtgctaacgagcatttagacttcattagctttgaggctttgatgaattgaatctctattttaagatacctcgaaactctttgcttcatttgaagtacattatatttacaaacagtgaaaagaatattttacatctgtagatgaaaagtgaaagcaagatgtaaagtgcatcaattaataattcagtaacctgtgaatatttagctactttaataatgaatatcaatgtgaaagagctctgtaaatgatgggattttaaaagcatggtagtaaaatgtgctcctcaacaccaatacagttttctctttctttctttctttctttctttctttctttctttctttctttctttctttctttctttctttctttctytytctttctttctttctttctttctttctttctttctttctttctttctttctttctttctttctgtctctctctccctctctttctttctttttctttctttctcttttttctttttttgagacagagtcttgctctgttgccccagctggagtgcaatggcacgatcccggctcactgcaacctctgcctcctgggctcaagcaattctgcctcagccttccaagtagctgagattacatgcctggctaatttttgtattgttttagtagagacggagtttcaccatattggccaggctggtctggaactcctaggaacctcagctgatctttccaccttggcctcccaaagttctgggattacaggcatgagccaccacacccagcccaacatagttatttctatgtacttcattaatatgtaatttctattttaaatatttctgcagtttttttttctaatttggtcatattgtgtgaaaagtggtaaataagaaagcagtgtcatcttgcttgcactttacatctacagatgtaaaattgggaccatcagttacccattacctagcattcaattaaagaaggcaagatagaaaataagatatacaaaactctttaaaagcctagcctgatgctagtgatattttaacattgaaatattattgtaaccatttattaaggggatagttctaatcaagtggtgctaaagaaagctgtggtatagtaggaatagggagcttaccttctgccgaagtattaacctgtaccagttattctagctgtcttctgtgagagtactattctgtacaagttastacaactttatcaaattttttatctttacaaccactttgtatgggagatgatattgtccttattcttaagaacttgaggcttagataggtataattacttgccagaagcaagatagagtctttctgttgcccatttttcttccatggctcctctttggatgaaattcaagcttcctagcctggatgacaagaccctgattatctatcccttgttaatcttttggggggtttttttgtatattttgtagagatctggtttcaccacgttgtgcaggctggtctcgaattcataggctcaagcgatctgcccacctccacctcccaaartgctaggattataggcgtgagccactgtgcctggcctgtcccttgttaatctttacagcgtcatatcttttcattccacacctaaacttcaagtttatagatctttcacttcctgtaatatgacatatgttgtttctactgtgagcaacattccctttcatgtcccactgttctgtgactaactcctcttcattcatcaagtttccgcttaagtaccacatcctccaggagacttcatcaagttcaccattgatgagcatgatgaatgagtccaccatgaacaatgcccattgcattgttccttcattcattcagcaaatatttattgaggatcccctatgtgccaggcactatcctaggccctaggaatgcaacaatagacaaagaagaataaaaatctctgcctttgtagcttgtaccctagtattattaattatttaattcagtgtcactcattagatgtttacttctgttaacattcttggggtctaacacaatgggatattaaaagaatgtggtaagcatttaatatttattgaatcaaaggagagatgaatggcttcacttattattttaatttataattgtcttgaagaagtcaaagaatgttctgtttggccccttttatcttttcacactgccaccatcataataccagacctcattgtcttgtgactgtagtaatgcagcaaacctcaaattaaaagcaactttttttttcaatttttcttcaccattggattctgcatagaattaccagatttatcttcctaaacattacaggaattgttctcctcgaaataccttatgctggaatttgagacccttataatataatgtcaccatccttctctgatttatctctagatgtttcacatatactctctgttcaatccagttttttgtttgttttttgcaatccacttattttgattcatttgcacctttctgcctagaggtctttcagcttatgacaaatttcatcaatgctgcaagtcacttctttttggttaagtcttctttgataatgtcagccaaccttcttttccttaatttctgatttcctgtaagaattactgtctatacctatagtattccaaagccttttgtaagcagcagaatctaccctgtrtcacatctgtaacataagtacgtgtgcacatatgcacacatgtacctgtgtacacacacacacatacaaagagctcttacatggaaatccaaggtataaaaaaagttaaaagtatagcttactgtactaatgaccctgacactcctcaagaacccttccactccacagaacatacttgaagccagtgttgtgacctcagtcacactggtctttggttcctctcactattccaaagaaaaagtcagaagtggtcaggatgacttagcattgctgagagaaaaattactttctcatgaaacagaaggaaagagtcatatttgtcatacctgctacagcaaccatttcaagccttgtgttttttgacttcccatcacttcccaggaaacatgtgcagggaacagggagtaaagtcagatttcatccctttctcaggttctgagacacttgaaatgctagagagcctctaaactagattcttctgaaactgttttagcagttcacatttcacatatgtgtggaccacagagaaaagtccatggtcaaacgtcagtgtctccttattgataaaaggccagatcaggagcagttaactagctggaggccccatctgttttctgttcatatgtgtaagtctgtatatcccaagcatactctatgttccttgagaaaatcagttgtatttgtatactgtaactataaagttactcattatttttaaattatttcatataggcttatcttcccaacaagttcaaaaaaataatgactattttttttaattctccattacacctatggcayagcaggtacttaataactacctgttaattaaaatgaaataaaatatcctagtttatgtacttagctattatttagagttttagaacgtttttctgttctgacatattaactttatatamaatataactgtagggaaatcaagcgttatttgtaaaatatatttcagatttgtgacatgactaataagagatttaggatttttaaagacacttatgtcttaaaactatgtattaagaacatctaaaatttttgtttaaatacattaagcaaggaatatagaagatgcgaagaattttggaaatttaatgaagtaatgtttataaggtaatgcagctagaaattgtgtggttttataaggcaaacttttctcaataagaagcagtttaataacttatcaaatacatattatgaatatgtgtttcaattttctgcattttgtcaaaggaagggagaagagttgattgataatcctgactgatctttttagcaattctagtatataaacaacactcatcatttttaattgacaaaaatttaactaaatttgaaattaggattrctaatgaatcacaatttattatgaaccagcagctattttatgttttccaaacacctgtgttaattttctatgatcactcagtttatatgccatatataccatgttaggcaaacatgatttttgcatagtttccttagatatttgtggtatactgaagaaacaagaaacttaagacccgattcatgtttaaattagagacagccacatatgtaaattttcaaaatattcaaagactttatggatgttatgatttaagtcagtttaagatactgtgacacctatttgttttatagaggtaaacaaaaatgattcatctcactgtggcatataaaaaaacttttatatagtgtcttcaattgaacattagtcctgacatgtaaatttaagataatctaatctaagttctcagatttttagatttgtacttcttttggacaaagaaaacaatctcatgccttttcttaatgtaatttgaaatttcaaagtgaaaacatcattataaaagtaaatgtaaggccgggcgcggtggctcacgcctgtaatcccagcactttgggaggctgaggcgggtggatcatgaagtcaggagatcgagaccatcctggctaacaaggtgaaaccccgtctctactaaaaatacaaaaaattagccgggcgcggtggcgggcgcctgtagtcccagctactcgggaggctgaggcaggagaatggcgtgaacccaggaagcggagcttgcagtgagccgagattgcgccactgcagtccgcagtccggcctgggcgacagagcgagactccgtctcaaaaaaaaaaaaaaaaaaaaaaaaaaagtaaatgtaaagtatttataatttaacaattatttttagaaaaattatatatgctactgcctctgttgagtaatgtgatggatggaaatgggcaataaaatgatttgcccatatcagacatcaacgggagacctaaggcctaaacccgtaggagtttccagtacagagagggaaatccactgatgtcaggaagctgatgcttttcagtaccattgtttatatctacatcttctcaagtatgcccttcttgaagccatatttttatttttgttattatcccagtataatgcagcacaagtgaaacgtcaaccagtcttcagtgtttattcatcttttaatacagaatatttagtaaatatttcatgtttcagtgttttattcattgtttggatatttaactgaataaatatttctggaatatctacctagtgaaagatatgtaagggaatgaaagatagatttttaaaatctagtcagaattaataaatgggttcaatgcctttgtcagacttatttttcagataacactttttcttaacagattttcttagattttaaatgaaccttttcaaatatgtctgaacaatattttaataatttatcaattcacaattacatatttaatttccaaatatgctgcacataacaagtaagctcatatatttttactgagggaagtgatagtggataatcagtctaatcattcctttgcttaaggcatttaaatattgccatataagaatagcacttactagctttgttcacttactggaaattagatggagctgaatacttaaaagtcaattttagccaaaacccttctgctgatattcccactgcctataattgccaaattaataatgaatatgtggactttagaattaaatgtcattccttgcttgccttaagattttaaaatattaaaaacaaaataatcctttaaattgtcaaaatgtgaggactatcatgacaaggaagaggagtgattttctttttttccctatgtagaaaattttccttaactgagttttccagaaatctaagaaagttttgtgtttttttgtttttgtttttgtttttgttttttcaaaaaatccatttggtgaaatgtcttacattacttctgtttactccgtcacttccagcttttgaaacattactaccattacatagctgtggaacacagtggtcttgtaaatgagctttgctacaaaagaaaatgagactaactggaaactcgtcacggtgctgccactctgaaagactggtagtatcaccaaagccatttagagatattaccactcttagaaaatggaaattgtggagtatgagacctagtctatttgatttcagccttaatagctttcaatatatgatagcatacatttggataaaatgtggaaaaatatagaacaactttttgtgtagtttactcatggccacattgattacagatgtttaattcatctatctaaatcttgcagaacattcaaaatgtttcttaggtagacagtttctgaaataactgccctgtctgctgtttcacattttgttagtacataccatgtgccaagcttttttcttccttacattgcttgcttcattgtttaaaaaaaaaaaaaaaaaaaaaaatctgtaagttctgagtctccttrtagatgaggcagcagaggccttttacaaatacctctcttgttccagttacacaagtcataatttactgagcacgatggtaaaatcctttaaaaatgtagtaaaaagaacagagtatgcatatgcaaaggaggagattggggaaagcaaattagaagtctatgcattctgtagacagtgaaagctggttcaagcagaatgaataagaaagtaatttaaaaagaaggcatcacttattgactaaggtcaaacaggaggaatacacataaaaaccagaaactaacttcaagcagaatgaataagaaagtaatttaaaaagaaggcatcacttattgactaaggtcaaacaggaggaatacacataaaaaccagaaactaacagcaattatgatgataatattccaaaaaaaatctgagtgaagaagaagaagaagaagagtaatagcaaacccttgtgataataagtgccaggtgtgtagtatgtgctgctattaaagtaaatgatgttcaattatttaatttataattctggtttcatgatagtcctttaaaggaagtgctattttgatgttcatctttacatgtgaagaaacagataaagagagattagctgattctccagggtcactcagctgattgggtggtggaaattggctttggaaccaagcagtctggcatcgtagtcttagttcctaaccattgcactatactgcctctccaaagggtgaaagaacatatccaggaaaaagcaaaatgccagaaatgaaagaatactgagtgagacacagtgttaagaaacactaagattttttaaaagccctaraaacataggcttggaaggcccaaagtggaaacactaagacagccgaacaccccagatctggacagtaatgacagtccatctttcagggtcctagagggagttaatctgaaacctgagatgagtatttctaaagtgaaaattagtaatttattaataataacttattaatatttatatgtagtttatatgtactgatcaaatttgtatacattcggctgaaattatatcaacttataatgttcatccaatactcttgatgggctggtgatgataatcaaggaccttgtaaactacataatgtaaataaattcacatatcaaatagccactggtttccaggactgaccaaacttggacacaagaacagggtgatgaacaaatttaattaaatactgtcataaatgttatacatacttacttgtaattatatattgtaattgtatattgtaattatatattgtaattatatattggcaccacaaccrtgactataatttatataatgctatgatgctattataaacccttaataattaggcatctttattataatattatttggtgctaaaatggaaaaatagtggtatcagatggaaaaaaatgcattccttattcaataaattaaatcttttaaagtattcaatcaatggaggaaaaactgcaaaaaaaagaatctcagtggtgagaacactcatctttaggacaaaaacataaacataggttgcattaatttactttttattgattgcaatagtacactgtggtcataatgatggtattgtatatgcttgggcctttgataaaatagtttttaacatgtagactattctgttttgtttccatctgattacagttacgaactgagaattaggggatgaatgaagtatttagtactggtttattgtaattgttaataactattgtaatctacaatatattttattctttcttttttaatttccctgcactgtttctcattaacattggctaacagtttatttatcttcataaaacagcatcataaatataaagaaatgtttaaaatactgctattaatctgtactggtgctattattgttttgtatttgattttatagctttattgtttcttttaaaatccttgcaatttcatatatatataattttttattaccaaaaaagtgctggtagaaatttctgtatttaccaaattttgatttgatttagagactttttcattattgttctatatcatcaaaccagartgacctggttaataattcacagtttgttttttataaagtgcctaaaacatatttatcctttgaaaaagtaatattccctatgggaaaatattattttgaaatatacctctttagtaaattagaacgatgttattttttcttatttagtttattttatgatacagatttctagatataagcaaatgctgtaataaactgcagtgtcccctttatctgagtaattgtctgattttagaagtttgtgcattctgttaatgaactacacatagctggctagctggtttgtacttgaacttaccatccacttatrgttccataaccctggattatcaacaggaggaagcagatatatacttgtagtatatatctgtggttaacctctaacaaaacctctaaacaaaatctttctctgcaaaattgtagattttggaaaagaagaaagttttggtaaatagaatatccaaaaaccaaatcaataaattcaataaattaatctcctcatgctgagaattagacataaatttagttctttaacattatggattttattgtcttggggaactgtggctattatggaaaaaacactgggttgaagtaaaggaagctgaaagtagtgaggaactccaatggtgaaaattgctaaacgattcagtaacgtcttttctaaaggaaaaattgtgatctgttagtttagtatgaactggaaaaacttgtataagaagtttttctacttcatgcaagtcttccaagatgataaaagccagtattttggagaaactaaaaggtctttatagaaaaataaataatgagtcaagaattaagagcacttgacttctaaatcgtagtattgacacagtcttgctgaacagttttgaaatgctgatacattaaaaatctagttttcatttgcagtttgtaaattkattgtttcacaatttttaacaacatactcctctgtccccagacaacctaattttcgtaaactttaacatgaaattatatgatattataaaatttttgctcattgttaacaagttgacccaatgatgttctttaacggatttccctttcatacaggcaagtaaataggaccaaatgtgtaagtctttgcactaagtgaaagatattgttgagtaattttatgtgaaaatgtatattttatattacattrgttttgtatcttctattcagggtgacagctgtatcagagttcttttcaagctattatttgtatagctcttatagtgaaaccttaccctaaggtgttcagtattatctactttggtttacattctctaatgcaataatttaattgccagtatgaacttagaaacaatataattctttgaaaaaataatcaaattataatatatatttatttgtagatttgctaaatttatttagacttgcatacctaacacttacataaaacaagattggttcttgttttgaacacctatcccttctcattaaagagctaccagcatctctctggatagaagatccaaggcaaatgcttggttctggtcatgtttatctttctgacctgtcctctctcctttgccaagattctattctcaaaggcctctttgtcctcaatatgctggctattatcttctctacttagaagcacactggttttagggattcttagactcgccctgtgactgattcattgttcagtttgtgtattgcaagagcttactcagctaactacaaagagtcccttgtcactgcccttggttcttatttttctctcatcagcactactttgctgtaatctatagtgagtaaagtcctgaacttctgtttaatgactcctggactaccacaccacccattagtctctgaattcctcctttgtggtgggtggctttatacacacacatagacacacacgttaatatttatgttttgtttgtatgtacttgaacccccatgcctgtgatttcaaagctttatagctttccaacagtgatattggggttgggggaagctcttcctttccctaagaaataaagacaaatactttctgcatgttatttttctgttcctatttcaaacctcaaaatgcttcaacttagatcaaaagtctttggcaccactcctttgtgaaaattatttcccataaagttttgcttaaaatgggctaatggagggaaggaagcaatattaaaaggcagttatgcaaaagtaattgtttgcttaggccttaattagtagttgattatttaggcagaagatatgtattttctgatagaaagagataagtgatagtgtataaacatcacaggatattggccactcttgccaccgtttgtttagattagcgatattcagaactgctgagtgacccgacttagggaaattaccaagatagattatattagattaattgcaccaaatagattaaacagctcagtgtatctgatagttcttacttttccagtacaaaacaaatgacaggttatttctcacagggaaaataaccatcaatatttgtgtcatatcaggttgctaacagatatgaatagtaatgctccagaaaaataaacttatgttttatttcaatatatttaatgtgttcattttgttaaatgctataactctctaaatttctgacataagtatatacagttctgttaataacctgctgaagacataataaaatttttggaatattcagccagatgaatggatattttcatagagcgctaggagtgttttaaatacttgtattgtgcatctatgtttttgatgctttttaaacatcataagtatttgggtaccccacccaccagcattctaattaggaataggaagcaaataatgggaagccaggagaatgtgggaagcatttaagtgtgaacttgccttaagggcaaaaaaattgtcagagcctggttgttcaagaagtgctgtcaaggccaagtaaagtagaagaaaaaaggacctagcctcctgaggatttgggggccctgagcaaccaagcagacagcttgtattatcagttggcattggcatattgtgctgctctttggacaccagtatcttgggtaaccaagaagatggaggatggggaccaatagtaagtgaatattatagccaggcaagcctttactctgtgtgatgtcatgggcccagcctccatccttttgggtatctcctggatactttagtatgttgaccactttcttcctgaaatttgatatcaaaatggtgaatgagataataggacttaaggataaatcccttatcttacagctgaaatatccaaggcctgagcaataaatacaatgaaatacccaaagacatgtggtgttatcagccttcttaggttcatccctccttcctagatgccatcaatcacttacgattctttcatataatagtgaagtcctaatctcacagcaacctagaatgagcaatgaaagaggttgcctttccagtgttcatctcctccacacatagcccctgtgagggggaccatactagtacacagaatgaaggctgtgtgtgctatgagaggctcaaaagcataggtgtatttagtaatactgaataggtaaggatagatccaagagcttgttagtgaatctgcatctctggagattctgattcagggcccataaatctgtagtttcaaaacctctccaagtggttctgatgtagagttaggtgggaaaacaaccataagatgtatggaggttccacattctaccccagacttgctgcacactgtattgaaacctgtgacttaaaggcttaaaataagcacaatctcagataagttgaaggcctttggtttccatcaaagcaaactccacaaacttgtcaatctctatcaatcacaagggtatctcaaaatctctggcctcttagttgaggattttcaaattaagcatagcgtaggcccaatagaataatcctagcacagcaggtgtttcttgtgtgcctcctgggcacacaagtgtctaggcactggggatatggcggacaagactgacaagttatccagcttagcagtggttrtatttcagtgggaagaatcagagaagaaacaagcatgcaaataaatcaattagataatgctaattgtggcataattactgtgaaggatgatagtggagggagtttgctcctttgtacaggatggtcaagaaagaccttactgagcatgtgacgtgtatgtgagactttatggatgaaaggaaggtagcctatgaaaattcgaggaagaaaatacctccattttttccattatgttttattttgagttactgttttgttgggctttgaatttttctatgattatatgcacgtcattttcctttactgaacattatgataggtrgtctttctatagcagacctatggctattctaaggtaaagtcagtgacagtgtgatgatatgtgtagctagatttcagggtattttgttttccatgcagagtttacagcaattacttttttctattttatatcatcaagccaaaatccaattattgcagtgatattgtaaatcattgagattatctcttatcacaaagttattatagaccaggaagaagagattaattttgtttttgtaaaactaaattcatgataatgtacttctatacttaagcaaaagaaaaaatatccttataatatttgcattgtctagagacatttttttttcattctggctgccagattatgcttcagttgtatgttagtgtctataactgcttaatgcctaacccgcagtttacaacctaaattaatgtcttggtatttatgtcatttacatatacagaggtaaaaatcaattatccttgaatcttcagacatggccaggaattaaaatggaagagtaaaaaagatacaagaagctagaaggggagagaaaggaagaagatgctttagaatgtctccagaatgccttccactccttattcctcccacctccaagcaccggagttctattctgtctgggaccttgacattttaaatacagccattttgaaatgccattttgatacagcatctgttaaattcttattagactccagaaactcttctaagcttgttacgatattaacacatttaattcttacaatagcccaataatgtaaggtaccagtatcacccccattttatagataaatacatttgaagctcagagaagttgagtaaattgtccaagttcactcagatagtaagtaatacagcaagggttggagcctcggtagtgtggatccagagactaggcctttaaatgataccccacaccgcctctaatgcctttgattaaccattttgtcttggggatgttttaataacagcctaaaatatgactgttaaacttgccatagagattccaaataatgtctgaagcctatgtcttagcccctcacttggcttcctgttgtccctgagcttaacttacaaatgtttgaccctcacctctctgttaggcagcaaggagagggagagagccagtagcaagacatgggctatacaaagtgtcagcgtcacacccattgacatgtgaagggctgcataaaattcgttgcaaggaaatgtcttgcttcataatttgtttccttgaagttccttccttcaacttccaaacctaatggagggcacgtgaaggcatggtttccagccatatattttctgttttgtaatttttggtttgaaacatgtcatatgtatgacagatataaagtttcctacaatttgagagaaagtggtgcttgtgataagtaatccataccaactataatttcaatagatacataggtagaagagtaattatattattacttgttagctaataagctttatccttgcctatttaaaaatttggtaacaaaaatgtgctaattaagtttttaagatggatatttttaaaattattatgctcatatcttawatgtacacacatatataaaatatataaaagttttaagaagtgttttactatttatgttagtttttacagctccaattatagctgtggaagtccccagagcaggtactggcatccatgcctggcaatgcttggaccatcccatccagtgttctctatttattcccccttggtttagatatcacatatgattacaagaaagcacatatgtctctcacaaaccaacttctcaatgcctcagaatatggatttatttgctcagctctaagaataaaaaaattatttataaactatgttttaaaacatattttttcaaaaatggaagaatatgtttckggtgtttctactgtgtatctcatgctcaagagagggaagaagctatatgattggagtctaccaaagggatgcattagtagtaaagatccttgttayttacagccattttgttagtatttaagattaccaagtgcagacattctaaaatggaatccacctgtacctacttcatgcttatagtgctgtgggttcttagtagctaattcttgacagtaaagacaggaatttatagcatgtaacatttttatttcattgttttataattatttcatcattgaacccacttgactctttttttctatgatcttttgtcaagtaaggaaataaaatttaaaacattttaataacttgcttgtaattgcaggatataatgtgttaagatctacttttggcctcctgatttcttattcacgaatgcgttcattctgtgtaactcttagtgttgcagaagcagccacatcatgttcaccattcaagcacaaaatttttaaaatattacacaatatatatacacatacacacatatatattagtataaatacataaaaatatcaaagataccataatgtggtggctgacaggaaaagctttggatcaggtgaatctgaatttaagccctgggtcatttatttttaggagtgaccctaccaagccacataacctctctaagctatattatttcattatctgtataactgagataaaaatattatttttagagttctgaaagtggaaacgaaataagtattaaataagtgagtttttaaaagagacaaaatagctcttccaagaaagttggtttaaaagagaaagtgagaatgttaagaaataccaattcccagtaattttttttgtattatgtgtcacagcttttaataattgtagtttttttcactttaacattttgtaaaaatgctcctttataatttaagtttaattggagtttttttttttttttttgccttagtggtacgtaaactaatgatgtgtcttacaatggataacattctagattcagtgaaatgcaggttttatgatacatatctacatttctttctcttcaggaggcagtaatgtgtagtggccatgtattcagacctcagttgtacatrgattatgccaaattcctgaaccattctttggtgtcgtcttttacctgcaaaatgaaaacatatctcatggcatttttagggttacattaaaaaatgtgtgtaaacatcctggcagcgtctcataaagaatttttaagtgcacaatgatagccattattgttattattctcttctttttttttttttttttttttttagttaatctgtatactagtggactcagacattagagccaagtttgccactaattaaatttggaaacttgagcaaaatacttagcttttctgtcgtacttcttgttctgcaaaagaatgttttggctcagataaacttgaaattaattctggttctaaaattttgtaattttattatttaattcaaagtcctaacataatatgaccataaaatgaattttgtttctttcagtttgtggggacattcatggacaattctttgatttgatgaagctctttgaagtcgggggatctcctgccaacactcgctacctcttcttaggggactatgttgacagagggtacttcagtattgaagtaagtctacatcatgtcttctttgctgttcagttatggattaacagtatctcaaaaaaataaaagcagtaaatgttattgccttatggaaacctctaacaatgaaatttaattcacttaattcataggatattacatattatattttcagttgattcccatgtgttttttgtttgtttgtttttgagacggagtctcactctgtcgcccaggctggagtgcagtggygtgatctctgctagtgagcagaacctctgccttctgggttcaagccattttcctgcctcagcctcctgagtagctgggattacacgcgcccaccaccatgcccagttaatttttgtatttttagtagagatggagtttcaccatgttggccaggctaatctcaaactcctgacctcagatgatccgcccacctcggcctgccaaagtgttgggattacaggcgtgagccaccatgcccggcgtgattcccatattttttaatagagatgccaaaaaatggtaaatagtaagattttgccttttgtacattttatatatttgcaaattttcaaaaattacgttttgctttacaataaataattccattttccattgaaagaamtaatcartgttgatcaaataagcaggaatgtatttgcatgtttatgccttataattgtgagacagtaacttacctttgtaaattgatagcaaactgcatgtgtctctgtctgtggttgtctatgtgtgagtacacttacagctgctgtattttgtcttttttggcacctgtcatctaactagggtaatttgtcaaactcattaattaaaacaaaacagataacctttgaatagaggttcttccacagcctcccatctgcatctgctttaggtaagtaaaactacattcaaaataaaggcagagaccttgttttattcatatctttgttcttcctggtgcctaacacgktgtgttaataaataatttattgaaagaagtggtttgaaattgaataagttttaaagaatcagacctcatgtatagtagctgacrtgggctatcaaaagagatcattaaaaaggaaaatgattattcttaattaaagagagaaatcaacattattgtctcacaccaacatcatatattcataataatcatagaaaaacattctatatttcaaaatttttatttsagtgttttatttgctaaagggatatttaaggttgaaaagcatgtcatccttaaacagcttttgtttatacaattatatcagttttatttttcggttatttaattcacctttagtcactgactacacgcagacacagaaaagtttatgtagacatatatgtatttccgccaacatrataataccgtctgcatttaaagatcacagatttcttaattattcctggtgatgatgagggaagaaggagtggtgatggtatataaatcccaaaagagaagttaaattcttggtatttcctccatttgataaacaagtatggtcaagcatataaaatgtatatgcaccatgaataggactgtgaggaatttaaagaaatgtaacatacattcttgctctctagaaacctaaatctacgttgcaaaacagaaccataaaaatctgtttagaatcagaagcctggaatatgtgattatccagaggtcagtaatttaaatggattattaaaaccttgtgataaaggagatacaaaatagtaagtgtgattggattagagaaaagtgaaagaatattgagagcacacatgttttgggaagactgaatcaaagaacaagtaagttttagctaggaaggaaattaaagtgagcaaaagtacagaggaagaaattagtgaactctgctaaccttgtttttttgttcttggggccagcctgaccagcttaactgatggaaaagcaattgagtactaattttgtaagacctttatatcacattaggactggtgtctgccaggattaacaacaacaaaacaaaacccctacataatggtggtttggacaagatagatatttttctgtgtgtaaaagcccacagacagcaatccaagactgatgtggcacagcgtggtgccagggcctaggctccatctgctttcttgctctgattttcatggcttcattccacagacaaactagtaacccaagatggctacatcagtttcaaccatcatttctccacataatattcaacaaggaggaaagggagaaagagaagggtatatcttcttgtttaaggatgtttcccagaaatggcccaattccttcaacttgtatcccttgagccacagtttgctgatatggccataggtgatttcgtatgtggccaggattaaggaagactgtggtaggcaataaacagcaatgggaggacaaggatttctgctcttctccttgaattagggttatatagaatgttttctttctttttctttctttctttcttttcttttcttttcttttcttttcttttcttttctcttctcttctttctttctttctttctttctttctttctttctttctttctttctttctttctttctttctttctttctttctttctttctttctttctttctttctttctttctttctttctttctttctttctttctttctttctttctttctttcttttctctcttttaaatgagacagggtctccctctgtcacccaggctacaatgcagtagcacagtcatagctcactgtggcttcattctctgcagtggcacagtcatagctcactgcagcttcaatctgcctgtctcaagtgatcctcccgccttagcctcccaagtagctgggactacaggcacacaccaccatgcccagttaatttttatttttagtagacacagggtcttacgaagttgcccaggctggtctccatctctttagctccagcaattctcccaccctgacctcccaaagtgctcagattacaaagtgtgcaaacctgtattctggcctgggttatgtagaatctaagtgaatattttaaaaattattttagtaactcttaaattcatcttattcatttaacatttgtagcactcctaataaagtttttcaggatgaatgaaataggcatcctactttccttgaagcttgcattctaagtgaggaaatcccaagactatcatgttggagtgattatttttgtcagtcaaatgatgttgtgctgcgttggaaatttttttttattataacatttgtgacttttcacaacttcctatctttctaaaggtaatcaaaggtcacaacacttgcttattaattttataataaagtacgatactacatcatgtgtggcttgagtaacagctggcatagttggacttttccttctttgtgccaccaactccatctttggataatattctttaatcttattgttctttatttacctttttttgtttgttttttgttttttttcttgaagagtgcaggcttctgaatctctgtcctcaaaccacctgaaattttctaaactttttctaattagagcattttagaattcttttttttttttaagtaaagatgttgctgggtgtggtggctcaacctgtaatctcagcactttgggagtctgaggcaaacagatcacgaggtcaagagatccagaccatcctggccaacatggtgaaactccatctttactaaaaatacaaaagttagctgggcatggtggcatgcgcctgtagtcccagctactccggaggctgaggcaggagaatcgcttgaacccaggaggcggaggttgcagtgagccgagatcatgccactgcactccagcctagcaacagagcaagactccatcttaaagaaaaaaaaaaaaaggaaaaaaaagaaaaaaagacgtcaagaagcagtttactaatttgttcctcagcagatttttttaaagtctacaattaatctagatatttgaactatgaaatttgctatgttttgtttagtatgctccttttgaaattcaagcaaaggatcaaactggatgttggtgacatatgaagtgtaggaattatggggcatttaaaagttctaagatgcatgtattggagtcctcatcttcaaaaacagctctttaattaaacttcaagagtctgagactacaacccagggacttgccacatacatacaaaaatgacaaaatgactcatatgtgaaatgttccattttgattagactgtgacctttgagaggctttggaatggctcattgatatcgtatgtaaaatagcatggacatttatataaaatgtacctactgaaaatactttaaggattttttattgtggattaaggaaactgacattgttagcatgttgtaaatgctgttgtttcaatagtttgaatgacctcatttattcttgacagttttgcaaggaacatgtaaatacgttccttttatgagtgcagtaactgaggctcgggggtcacacgtggtaaatggcagtgctgggattcaaagcctgtgttcttccactaaccccaggcctttgccatagtatattcattacatgtaccacaaagcaccacgaaaaaaaaaaatcagtaatgcagaaactggtacacactattatattcacccatgcatgaacaaacgtacacacagccttctccctatctatataatctgaagatcaaagcattagatataaaatgttctctgtgagtatgatactgttgttttaagaaaaatcctaaaataagagctcagttttccagcgtgtattatcctaacaggcttcaaaaggatctcaattcatctcaataattcagggctccactgcaggtattctcctttggctatcctctgggcaaaggggagcacttcagtttaatttttaccaagtcagctttgaaggataatttcagatttcaaacagtctctgctgggtatatttataagcactaggtaatgtgctctgggcagtacacagagctcattttatgcattacccccaccccagtcttctccttttgccaaaattagaaatcatttcccacaaagttagcccaaataagacaagcaagcttttgagtagtgatgaaagaggtaattttgttttgagtaataatttgtcttacaccaaatactgctcttgccgatgattgcattacagtacctaatctctttgatcaagcatatgtgtatatataggtctgtggctgagtgtgtttctctgagaacacaaggaaaaacttagaattgcaaacagaggcatgcacagctgtttccttctattcacttcctcaaactccctttctagccgttttgcactacactgccttgagctggcttctcaacttagatccagatctcaactccaggcctcaacaagtttaagtgtgaagaggtgttgtgtttattagctgtgaattcgtagaccagaatgaaccacagcaaaccagacaatgttccatgcttctgcctgagaataacaagcaagtggcacaacaagagatgttaggtgacagagtaatgccacagacatgaagaagaaattgcctggctgtctccctgtagccagtcgtctatatagtgcattgctcttccactgctgcctgtctacatgcttgtcagaccaggcaagtgatgtcttagaggagctacatttgatatttcaggagtttggatcttttcccaactgatgcaaatcctttacttagtttgatgatcgagaggcagcacttttgattggaatgtttcacagtacgagtagttactttaaagagctgattaatatgtacctaaagctgtccattttcttttttacttccttgcttcctcttttacatccttctttacttctctatgcaattttcaagactacttatcattaaaagcataaattacaaagtaaattattgcactattattatcagtgaaccaattaacgaagaaaattatattcttagtgctgcttcattggggaagataggagaaaattaaacaggagaaagctatgtctgtggcaaaaattaattttaaaaatagaggatgctccatctttcatattgagtaacctaaactaaccttaaagtgtaaatatttgtttaattaagagtcagaatagaaagacaatagcggtccagttgaagtgattagcgcacctcatttacatctcaccatgcagaaaaggccagtgtaacacagccctttgtttctaccttaaccaattaattcactgaaaatttgattcaagttagccatctgataccacatagacaaaaataaacaattaactaattgtatttcactgctttcattgattgtgatttttttttacaagagacttcccttttttaaaaaactatcaggttatgatttgctgaagatcttcagttcttcagaatgttagagctttagatggtaaaatagttgccggcaagacagtgttgtacttggcagctctctcccaccagatgttgagggagaatgctggcagggctccacctccagtccacccttgccctttcatttaccatgccacttcttccatattggctgcctttgtggttttagtcaatgtttgggaagatattttattcttgttacagggaagaaggaaataaaatgtgaaaagaagacttatttttagggtattttgagccaagaatttagaaattgagttatattctctctctctctctgtctctctctctctgccttctatttctcattctgtctccctgcttctctcccctccctctctccctcccttcctccctcccttccttccttccttcctttctctgcctccctccctcctttctttccttcttcatttacagaaaaggaactaatatttcctcaactcctgtcatatactaggtactttacatccattaaataatcagggatattacatgtatgttgcatcatttaaaaggtgtaaatatataggatagaaatatttagcatcgtgcatttatatatcccgctttgaggtttcagttatgaaagaactatggtaattaagactggacgggataaagccacatgctaatgtcagaaaaaggtctttaacagatagcaaaaaaagaaaatgtgggtcctagaatgtgattcctctagtggtatttgagtggggttacaaagttccagtttagattttaattggagaggtagaactttgccttaaaacaaattgttacaggcaaaactaatctaaagaagtcagaattataatgacatttccaaaagaatattgactaggaggaggctgaaaggagccatctgaatgctgaaatgtaactggatctgggtagtggtttcatgggatttgtgtaaaaattaattaatctgtgatttgagttatggacgtttcactggatatattatacctctcttaaagaaaaaaaaaactttaaaaaagtagcctaagtgccttcagaacatgtattctctcccccagcatataaatgaaatatattcaaaatagcaatttcaacatgcaaatgtatttttaaaggagttttcatatccattcatattccaaactagacatcctaaattaacgaccaatttggaaaaatacatatattactttcagattaaggtatagccttagacattttaaattggggacagtcctcccattgacattaataatagtttatgaatatcttccctgaaatgtgagacaagcttgagtaatacaaactctttttattgaaacatgtaagtacagctataaaacccgatctgtagcagagactcattaagctaccggactactcactgaggtaacaggaaacgttacatacatcaacagatcatgatgctttaaggatcgcttgtacaggccatttggtcaacttttcagacatattaatatcattagtcacatgaactttagctaataactataatcagaaagtggtaattagaaacttaaagtaacatatataatttaatgtcaacctattgtttatttcaatcataattacctagagataatatcttgcttgaacaacaaaataataaacatttgttctgataattagtattttctccaaaacttgggctgtatagtcaaacataattagttctcastcatttcataaattatcatataagctaagagagatgattactctttacaagtagtactacaaataaattgtcagcagcttttccctatagatattatccaggatatctactgtattggaaagccaattattaatgtataaatctcattgattttgatttcagattttagtaaccagaattagacttgtctcaatatttttgtagtttttatatcttcttagcttcactttgggaatacaggttttacgaggataaaagggcatacttgtttttcaaagcctgattttctgttccctatggattcttaacaaatgtcagttgacgataacaaattactgatgttaatacttgaatattccagttgacttaatgctcattccaggaaggctgtgtcaaatgtagatgtatccccaagttggtgaatgcataattgaccatcatttttacagactgcaatgcccaagaaactaagttgagaattttaaggtatatcaaatgtatcctgtagcttttagtacaatatgattaatgattaataagtaaaataaggtcacttctctttgtaaagctaattatttttaaaaatcaggtaacagaaatggaaaaattggaaagataatgtacaacaaaatgaggaggcaaagcattgacaagctcagcctaacttgaactgcgtctgtattttctattacttttccccatctctagctccctgccttcttctctcccaacatcttgtcttttctgtcagtgtctttggtatataaatctgaagtttttgatttatgtatctatttaattaaattgaagttcagggaatctcactacacatagcagtatttcttctcatctttttaaaccagtatatttttatttctagtatattttagttaagtttcttcccttccatttttttttaaactcccactctcctcaggtcacataattctccttctgttgaccatatgtaatccattgttttcttgtggtatatgatcctcagtgcgtgtatgtatgttttaggtgtagatggaccttggctttttaccaaagtaatgtttcctatttgattgtcaatatcttctctactaagttccagccttttgggggacttttggtcatggtaatacattttattcatgtctttatgatatgtgagcaatgaaatgcataagtgttaaggaaaaatatttatttttatattatttttatttttctcagtgtgtgctgtatttgtgggccttgaaaattctctaccccaaaacactgtttttacttcgtggaaatcatgaatgtagacatctaacagagtatttcacatttaaacaagaatgtaagtatacttcaacctccttcctttaacactatatgtgctaaaaagtaattttaatcaataataagatacatacaatatgatctattgcctaaagtcaaagacttaaagtgacactctttcatattatcctatatttctttctaagcatggacatttatgagaattcagaatttctttttaaattagaacttctttataaagtgattgaagaatttgaattaagatttgatgtaatttatcctaagaaacaagtgatttagggatgctactgtttggaacaataattctactcattaatctcacattactcaaaaaacgcaaatggagggcaaattcaaccctatgcctctgttttggacccaataaatgaatactagcttctagtgaatcttataaaactgaagatgatgtcattctttagacatagacactaggagtgtggagtgcttttttcaatttctttttcctccttacaatttttcttattattcactgaatcttacaaaggtataaaaccttacatttttgttttatgtataaatacagttaaatggaagagctgggaatctctctatacatatcaatatttttctctttcatttagtcctatattcaatggagcataaagacttctcctcttaaaacattagatataagtcatgggaaaagcaatgtgcagtaagatagaaacagctttaggaaatgtcttgccatctgcttttctacaaaatcgttaaggaatatcaagcagctttatggctgtttttctattggtcttccagttgttcatgtacatttttttggtgagacrtctgcagataaatagccagaatgtatataaaaattctcttgctatacaaaacgttatgaaaattataaagtatgaattaataaatgacaaaaayaggaaatactagatataaaagattaatatgttactttcagaaaatcttaattatgttttggaattttgtagtatgtgcctttatgttaataatagggtcctagcaagaaaacttctcaaaaaaccaaaactatttcagtgaaatgatcctgcctataaatcataagtattcttttaatcacttctaaaaggtaaaataaagtattcagaacgcgtatatgatgcctgtatggatgcctttgactgccttcccctggctgccctgatgaaccaacagttcctgtgtgtgcatggtggtttgtctccagagattaacactttagatgatatcagaaaagtaagttttgttattttccaagtctaatcattttgtgcgctacagtaataaatagaagacattaattaccctgcctttatcactgactttattcttttgagttcaaataatttaaagtggtcatgaatcgctcctttgtgttaaatttttatctagaaagagagatatgtttatacttggaagaatttttatctctacaacctcagggttggtcttaccatctgacatgtgtctttggaaatataaaatatttgacctctaaaaaaaatatgccttatcatttccatttggcttttttcaaacaatccgttgtatattcatgatgtgttatgctagaaatgttgctttgcccttgggaaaatatcataacataaccattaaactgtgctcattttatggttttttaaaaatctatttgttacaacttgagacttttaagtagcaatctaacaaggacagtgataatattttattaattttactgagtggctgagtgaaaaactggactttttaagaagtatttgtaagaagtttttaagaaatactccagtttagcattggctattaacagttgtttaaaccagcaaaaagatgagttacattgaatgtggaagtggattgtgtctctttcttgagtaaatctagtaacatgggatagttttatgtagtacaatagatagacaatcttttatttctttggtatgtttctaactctgattgcaatgatgtaaaagatagagagtaataaaaaatcgcagtgtatttttcttggtgccaaaatcggaccaaagggagaaagtgatgtaaatgttttcttaggtcattttaaaataatattacttggaattattttaaagtatgataatttcttcacattgatatttataacatatgttattgaaaatttgtgcccaccattaagctttctatctaggaaatctaagccaaattttttctggaggaattataaacagttgaaaactgtatttatcttctttcctctacttttagagacctaagaaaatacgcttgtacttatcccatagaacagaggggtgaaaataattctaaccttttattattattctcaccagtaattttagcaagaataaattggtcacattgttctaaattactgtatttgaactataaagattggaattttgctgagatttcttctaaagatacatactactcagtatatatttaagcctaatgtatgataggtagactttggcttcaaataagtgatgcactaatctcaaggtgtacagaatttatttcttaagttataggttcacttaagaataaccatgggcacagttcaaattctagatcttgcttatcattaggggcattcatacaaagactcccttggtgtcacttgtttgattgattgccatttaattgtttttttccatttcttctgagtttggaaacttgattgctaagtctgagaagtctatatgatgaacatttgcaagttaattctatcagctgccataagttattaaattagtaaacagtgttttcccattgtgttcagtggagaaggaaagcaaatattttatctattcatgtatccatgtatcatattaacctgataaccacttattgaaataggtttggaaaatgaaaagtcaaattacaaataagtatagtagtttctgttagcaaatgatgggcatgaaagacatgcatttatgttttattctcttgccttgatcaaatttcatggccttggatggaagatgagaaacttactaagtgtcctccttcaaagggggattagtgaaaacttccctcaaaatagtgttttaattatttgaacaaaactgatacactgaatagagttctatactgtagagaataaatagaaaggataaggctattgtactattttgtttaagacgcaatcaccagcaaaaaggttgtaaacctctactacaaaatgaataaccattttcatatagctctcatttgtagtgtttctttaatacttttgttaatgaaactcatggttttgaggaaatactttagtaaattatgaatgtatttgcataccataagtctctactaccatgaactcaatattcttttaaagttcattagtttttagagaaaaattattttcaggtaaaataaaacattcaagttcttcctatcattgaggttcaagtgttcaagtataaaaataatgtgtttactttcctattggaaagaaaatgcatgctttttattttaaaattcaagcgaaagcacaataaataaaccttgtttcctgctctgtgtctttgtgtccatttttgcaagacactatttcacacttctatagagcatagagcattggtctttgctctatatttaaagtacagtagagatgtgatgctggttcagtataaaattgtttctttctgggccaagcatggtgcctcacgcctgtaatcccagcactttgggaggccgaggcaagtggatcatgaggtcaggagttcgagaccggcttgaccaacatgttgaaaccccatctctactgaaaatacaaaaattagccaggcatggtggcgcgcgcctgtaatcccagctactcaggagtctgaggcaggagaatttcttgaacctgggaggtggaggttgctgtgagccgagatcgtgccactgcactccagcctgagtgacacagggagactccgtctcaaaaacagaaatgtttctttctgcatgaatataactagctcattctgtaatctgatggattttttttaagtaaataaacttcacatcgtaaattaagtagattttttaaaatatcacctaatatccctaggacttacttcccaggatattttagatattatattcaattttcatacatatcattaagctctgcacatggccagaaaatgatttttaagtttttatcttgccatatatcaagtttttttgtatttgtttatttttactgtcaattatattaacttttagaatgcactgtatactttttccagaataaatgttatattctggtagctttgcagacctttagttggggattcatattaatcagaaactttcccctcctctactgtcctacccttaataagttattgtttttcagaaagaagttctgtatttttagggacaagtattatttttcttgaatgtattgttccaagagcataaattatttaaatctcttaaacaagtttaagtttgcaatgaatattttgtggctaacataatggttgaaatgtagtcttgttttattgaagtttttcattgggtattgaaaacataaaatattgcctcattctctatagatactaataaaaagtagtgtgcaacaaaaccattacttacatcttgtatgtcccagaaaaaaaaaatagacaatttgattagttgtaagcaaaatatgttcacttgtcttcattggatttttaaaaatatcaatatgaagaatatcaattcttaatagattttcaaagctattgcatgcttttattcaagagcctttataatatctgctgattcaccaaagatcctttaattgcagttaaatcaggataaactaaagtgtttaaaattgatcgtgatatgttatttccagtgatgatatttctaatatgccttctaaatgcaccttttaaaattgaaatgtgacttcactaaacatttatagctggaaaattgatttcatatgaaggcttcaggtaaaattataaagcttagaactgtgaactgaagaatgacccgctaaagttgagtttattttactgcttatcattactcatatttgtacccactaagatcaactacaggaggcttgtagtttatcattagaaacctagatagcccataatgaaatagtatccaaaatatcatatagcaagtggctacttttaaagtaaaagccatcttttctcaaaatcatgttcttaaatataaaaaaataacataagcatgaaaactaggagttgttttccatccaaacttctaaatcacagtttaatagaggcagtaataggaattttcccaaagaaagtaattctcaataaatgaaacaggggtagagtcataataactggtcatgaaaaaaacatttggatagataaagtaagtaaggagagaaggataaaatgtagaataggagaaatgagaaactgcgaaatctagagataatagaggcaagaggaaggtaaagggttagatgaagatagatactaaatgatctcatcagaaggaagctggaaagaaaattggagagagatgaaggataggaaaacgagtaggaagaaggacaggaagagagagagaggtagaggacatttcaccctgagctgtakctggggagaagaggatgggttctgcacagtgcttgtttcttgtattgtcagaattctaagtttccaaagattagtattttgctctctgtcttctatttttcttagttagaccgattcaaagaaccacctgcatatggacctatgtgtgatatcctgtggtcagaccccctggaagattttggaaatgagaagactcaggaacatttcactcacaacacagtcagggggtgttcatacttctacaggtaagaatagagaacttgctctctggaacacgtttgcatcataatgctaggatttatcagtccatgtgtttgatttatttataatgtttgtattacttctttaatataaatgaaaggctcactagcatttataaaatgaaaatataaataaatgaataagtgagtaaataaatgtgaaatagatatgtatacatatacaggtgtaccttggggatgttaagggtttgattctagaccaccacaataaagcaaatattgcaataaagcaagtcattatttttttggtttcccagtgcatatagaagttatgtttacactatactgtagtctattaagtgtacaatagcattgtatctaaaaaaaaaaaaacaaatgtacataccttaatcagaaaatacttcattgctaaacaatgctcatgatcatctgagccttcagctagtcataatctttttgctggtggaggatcttgcctcgatgttgatggttactgactaatcagggtggtagtttctttctcaaaagaagacatttatgtggccaaaaaacaatgaaaaaatgctcatcatcactggtcattagagaaatgcaaatcaaaaccacaataagataccatctcatgccagttagaatggcgatcattaaaaagtcaggaaatggatgctggagaggatgtggagaaataggaacgcttttacgctgttggtgggagtgtaaattagttcaaccattgtggaagacagtgtggcgattgctcaaggatctagaaccagaaataccatttgacccagcaatcccattactgggtatatacccaaaggattatatatcattctactataaagacacatgtatatgcatgtttattgcagcactatttacaatagcaaagacttggaaccaacccaaatgctcatcaatgatagactggagaaagaaaatgtggtacatatacaccatggaatactatgcagccataaaaaaggatgtgttcatgttctttgcagggacatggatgaagctggaatccataagaactattatttttgccccaatgcaacaaagtatcacaagaacagaaaaccaaacacctcatgttctcactcataagtgggagttgaacaaagagaacatatgggcacagggaaggggaacatcacacaccagggcctgtcagggggtggggggctaggggaaggatattattagtataaatatctaatgtagatgacgggttgatgggtgcaacaaaccgccagggcacatgtatacctatgtaacaaacctgcacattctgcacatgtactccagaacttaaaaaaaactccagtattaaaaaaaaaaaaactgtaccaaaaaaatccaacaccagccttgttttaattcaattatgttatcacatttaaaagttttaccagtttctgtaactcagatcagaaaaacaactttacattggttaaatcaatcatttaattccttcttacatttgtttatcaggcttcctggataaattaaaataagcagctttacagtatataggaaccatagtatatttatttttaggactttgacaagccaagttgaaaatatttttataataatttttacattttacaaatcgctagagatttacccattacatgacattttataacacttcagaaaggaatctgcaacacgattaggtttctgcatgacctcactgtcttcctatcgtgtcacctcagttttatcctcccagatgtgatcttcctcagtttcactaaagtctcttatcattatacatacagcttatgtgaaaattgcgagagtgaaagagaaaagaggttatgaagaagatgagaatttttaattttagaatacttactcctcctcttctcctccttcctcctcctcctcctcctcttcttcattattattattattattattattattattattattattattagatactgaagaacttaacctgatgttccctgaagttaatgctcaattccagccctggcagctaagctaatggcaaggctggaagaattctgtaaaatacatccagctgtgtatcttctgtctctagagtaagcaaatatccttctataggacgttgatctgatgcctatttagtagtaggacattttgttccatatactaagttttcttatgggggaaaaaaagtttttctatctgttgatgtgattgataaattaaagttcatgaatagaaaatctagtgcactataaagcgtctttcaaagtatagctttctttatatgaatattaacagagaggtttgttctaagcatatttattttaaaaatttatagttcacttctatattttggaaatgtggtttaatgaatccattttggctgaattaaagacgcatggtataatatttctgaaaaggctaaaatttattttcagtaattaatttgggagtaatcttttattaaagatgtttaaatttatagtgaaaagttggcattgttaaagtacgtcaaagttatgtgttcagttttccaaagctagtgttaactttctaattataccctagatgtttaaattacctgcttgatatcacagagttatacttcagtaacataatatcaaacaaaattcaaactcttgattttgatattgagtcctgttgcattaataatagtatagcattctattcgttttcgtgtcagctgttcaaatcatattctaagcagagtcccatactgaacttatataatactgaacttatataatattatggcattagacacagatgtgtatatattatgtgtgtatattataatatagacacagatatgtgtgtatattataatatagacacagatatgtgtgtatattataatatagacacagatatgtgtgtatattataatatagacacagatatgtgtgtatattataatatagacacagatatgtctatatattacggcattagacacagacgtgtgtatatatttgtaaaataaatatatagaatatatttagaataaagtctaccatctttaataatagaggataatcagagaattaaacatattttcacttttgttttcagcattatgattatttcgtctcattaaacatccttttttttttttttttttttttgagacagagtctcactctgtcacccaggctggagtgcagtggtgcgatctcggctcaccacaacctccacctcccgggttcaagcgattctcctgtctcagcctcccgagtagctgggattacaggcatgcgccaccatgcctgcctaattttttatttttagtagagacggggtttctttctccatgttggtcaggctggtctcaaactcctgacctcaggtgatccatccacctcggcctcccaaagtgctgggattacaggcatgagccactgcacccagcctcattaaacattcttaataaataatgatttttagctatggcaagtatagattatgtgaatagctgaatatctaaatctgtggcctatatatagactgactaatgtcaaagcagtctggattatgttttatctaaggaggagaaaaatgtttctcattctcctacagctttttggtccttttgtctttagtgccaccttgaaagtatgaaggcatcctctgggattatggtttataaagtggatctagatgggcacaagcaagccatgaaattggtagagaaccttagtggcaattaccattttgaattattggcaggtattttgatccacagctctcagttttatttaacatttgtatgtgtagtttgtgtgtttactttgctatgccagcctatccactatctaacatgttatctgggccattatttaaataaaataaagttatgcagaaaatatgcatcagtcagaatttaacactgttcctgagttatatcagataggcagtgtgacagagaggaaagaatccataagatctatgattttgccccaatgtaccattatctttagaatcttagaccagagtttgcacactcaaataatacctataatgttcaggcagatagttgagatacttggagcagggcaagtgttagattctggaaattagtgaggatcatgacaaattttcatttcatgtagaccaatgaaaactggcagctggatttggtgtttaggttatcaatctgtatttctgccttggatgaatcatataagctttgtatcctgggtttaccytgcttcaaaatgagtgagttaaattagacaccctaaagctcttttaaactctgaaattttaggggcatcttgacagtgattttgaagtgttttggaagctacaggtagcaactcactcaaatcactactggtcccttaatcacaaatcagcagccttctcttctcacactgcccagcttctgtgcagcagttgacactcttatcagccgcttccatcttgaaatcctctggttccttgtttatatatcctgattctcctctgacttgtcagggcgatcccttctcttcctgatgcctctttttttttgtctttcttctgctttggcatttttttcttcacactttcctctaggaacctcacctacacccacttccctagattcactgtaaactgtaaactctatggccagttcctgaatctatgtctagcccgcttcatctcttttcctgagctcaattcctgtatgtctagttgtctgctggaacttcttttctagggattccattttcaccttaacctaaactcaccatgcctgaaagggcttaattactttcccacttgcttaatccccactgaaaattcctcctgttttttgtttgttttttgtttactgttcattctcccagccatgcagactaacaggtgtctttgctttttcctcgtgtattgaaatcaccaccagtcatcacatctttataaatatcacaagcatctaaaccatgctgcctttcctctttcccactgtgaattcaagacctttatttttagtctattgaaatcacacctgagctctctgcttccaatttcattagtatcgtccctcttccctctacccaatgcatactgttccattcatgggtatcttttttgagaattttttcactcattcarttatttagcacacattagctgagcatttactgtagtatattctctctactaagtttttctcttttttttttttttttttttttttgagatggagtcttgctctgtcgcccaggctggagagcagtggtgcgatctcggctcactgcaagctctgcctcctgggttcacaccattctcctgcctcagcttcccgagtagctagaactacaggcgcccaccaccacaccaggctaattttttatatttttgatagagacagggtttcactgtgttagccaggatggtctccatctcctgacctcgtgatccacccgcctcggcctcccaaagtgctgggattacaggcgtgagccaacatgcctggcctctctctactaagttttatagatgctgagtccctgccttcaagaaaatggcagtccagtagcagagctcacaaagcagaaacagacaagtaaaatacaaagtgaatagtgccgtcattataaatgtgcaggctattacacacacgcgcacacacacaggttggtggggagggggagagagagacagacaatctgagtgagtgtgttgggaatcctaaccccaagggggaatggattaggttcaagggactattcatgatgaaggcattagcagacctgagttttaaaggattagtagaacatatccaaccagagtcattggggaagatttttgcaggcggggaaagcggcatcatgaaaatatgaaggaatgtaacactgggaattctgcagagaaggtcacctgatcttacttcacctctactcccaaattacattagctgcttcattatctgttaaaactgaacattcatattaccaagctattcagcccctattttatatcctttagaaatgtctctataagtgcatcaaacgacatgtgcaaggttaatcataacagccaagaaatgaaaactcggatatccatttagtagaatgaataataaattctaatatatttatacaactaaatacagcaaatgagaatgagcttactaaaactacacataacaacatggttgaagatcccaagcataatgacgagtgaaagaagccgatagtgaccagtagatactgtatgattccactgaaataagagttcaacatcagagaaaactaatctttcatgctataagccaggatactggttacccatagagaggaggtgacagtaagagaaatatgaggagtttctggggtttgataatgttctgtgtcttgatcagagtgcaggttccaagggtgttcactttgtgaaaggtcatcaaattaatttttgcctttttctgtatagatgttttactttactaaaaagtttgccttaaataaaaattgcttgccacttctgaacttaaattctggaaaagttctgtcaggaagagttggccccttaggacttgatccccattggacaaaaatgaaattagatcaagaaccctgggacaaaaaagaaacacagcaagtcctaggaaaaggtaggtctgacagcatccaggtagccccaggacactcctgggctaagtacccattcccaggccccaagaagcagaggaggagttgaacaatcaggcagggtcttccctattactggatctggaagaggagaaggacaccaaagagactgtggcttcctccttgtgtattggcaggggattgcaggctgcctgcctctgctttgccaaagcactgagggaggagggaaagaaaccctttgcatctctcacctgcttgactgcccctattgaagctacttcagcaattgagcataagccccaataagctgacagattgctgctaagcatttaagatatgaaaatgcaaatgaaaaagcggtgttcctctcctaaggcattcactattgctggagcacagaagtagaaatataatttacactacaacatgataagtgatatattagatacatatattgtaggaacacagtggatacagcagttgtgtacaccttaggtgagatagccttgaagagaatgcttcacaggtgataacttgtgaagacttggcagaagaataggcctttccaggaggaaaaactgcacagggaaagtatccataaaggcataaaaacatttaaaaaaaaaacattttaataatgcccactagctatgtcatggctaaagagtcttacatctgggagattaaactcaaggttgaaaatatagttcaatatgatatagaaacaaatacaagagaataaacagaattaatctaatagtaactgtttgctctactgccaagccaatttttctaccatttattacatttttttcttttctaccttccttatctttgttcctattcactcagcttctgatgatccctcttcttttccgagcagaattctaacccctttcctatctaccaatctgcatacgtcattctctttaatatataacaaaagatagatatttttcaaaaagatttctctgattaatttcagatgctttcttgcttgctttataatatctttataaaacttctattttatcttcaatgtgttttataatatagtaattttttaaaaatattttttataatgctttatgttcctaagataataaatacccttaggacagaaacctgccttgaacttataccgcccctccctgtagctaatactgtcttctaacaaatggaacaatcatcactgggcctctgctaaattactggggaataagtgatttttcatctctttggggtgtttaggtgttagcaatatgcttttcctgccgttctctctctctcgctctttctctctctctctctctgtgtgtgtgtgtgtgtgtgtgtatatacgcagtgcttttcagcttgaacattttgtgatttgtgataatttccattaaaaagcataaaagtggaacagagtttctgtttctcttttctaatactattagaaacttctgtatatcctaggtaaatagttcagcaacagtgggaatctagatgatattcaagtattgtctagatctatgaggaaaatgttggtatttctttgaaaagctgagtatatgatggcatatgttttgaaaatgtctgaagtttttcttcaaaatgaattccctccaagtcaataatgcaaatactcctcacttaatgctgttaacctagcaaattggcacttgattaattttatttttttcagatttccaataaaaatcaggtatatattttcatggggaaaaacttagcttaaacacataagggtatcaaacttagtgtgacgaaaatattttaaaattattctttcttaagaatagtgtaagttgttccaaaagggcaaataagaaagggcaactaagtcgtttaccaagggcaaaaaagtgacagacatagtcaggcaacctgtctgacagtggtaacaagacagtatacttctatacagaggcattgcgaaggcacaaggaatttaagtgaaggcctcaaaaaaagaaaaaagatagggaaggaacatttattgagaacctattctgtgccccttagctgggccttttatagctaatatataccaaacaaatctgctgtttttgaaagaccaaccagtatctctgaaagtaaagtggttttttctttgtttttgtttttgttttttttctctgacacacacttacctggaaaggtcgtatattcacttttctttaagcagaacagaagcctttgaagacacatgttggtcaacacctgattctgggtaccagatgggcatgtttccatgcagagactgggccatcctctccagtttytaagatacactcatgttcatcagttagatgttttatttattgaattgactggggacaactaggaagtggaggccccatgattatctcctctttttctccctttctcttacaaaacacactacacatgggcacatgaacagagactgttttcagtttcagatccctttttgccaaagaactgaatcttttttatagtcagtatctctataactgtatgttatctttctttttttttttttgagatggagtttcactcttgtcgcccaggctggagtgcaatggtgcgttctcgactcactgcaacctccacctcctgggttcaagcgattctcctgcctcagcctcccgagtagttgggattacaggcgcccacccctaagcctggctagttttttgtatttttagtaagagacagggtttcaccacattggcaaggctggtctcgaactcctgacctcaggtgatctgcccgcctctgcctcccaaagtgctgggattacaggtgtgacccacgatgcccggccaactgtatgttatcttaatgataattttttcctgttggtcagggaatttgtacaaaatgtgtaacacagaaactatcttttcttttataataaattatttgaataacatacattactagaatgtttccctgcagtgctatttttataattgatgaatgttttcaatggtatatagtttaagttctagtgaatatttgcagtttgaatattggttttctgtaccttgatttgcattgtcaaaaatttatttttataatacacatttgtttcattaaaagttcttagagcagagacataatgactgtaaaaggtttttcaggtttaatttatgatttgaatttcatttataatgaagttatttgagtttgagactcttaaaagacaaacataattgtatattggatgttttatttagtcaagatagataagtcttaagataaagttctgctgatcatatttaaaggacaaattctaaagccttgtgaatatccataattttgtttaggttttgaatgatataatcatcttattgtacccataatgttagataaagcaataacttgatttcccaccgtatgggaggagtcttaaatctgggagattatagaaacaaaaataattaggaggcagaagagagcatatgtattctcttctgcctgcaaactcagttatctctgttgtatacacatacatgcacacatatgcacaaatggtgcaatatttgagaaaattgagacttatattttaaattcattatcttgttatagttatgctccgttcactttgtctttaaatgtagacttttaaaaatttatttttctgagagtggacactttcctaatgttttataatggcttatgttttttcccccagttcatgcacctcaacccctttctgattatgtaaaaagtacagctgtagatgctttttctgccacaaggataaacttggccttagagtcaagaggcttgtttcatgaatgatgtatgtttgattatctttgatccagtcacatagatctggatgttagagataaatgtgctactcctgatgatttcctaacagatgcttcccttttctttttgtctctggcagttacccggctgtatgtgaattcttacagcacaataacttgttatctatactccgagcccacgaagcccaagatgcagggtgagcagttttgagcatttataaaaaccatgcattgtccattttccagaacttcctcactttgcttaggctctgcaggttcccttttaccaggctcactcccaaaaggaattagagcttaaaattatcttctgatggatgacacaggtatgacagagtcctagggaatgaatggctgcagatgtatcgtacagtctcccgtaaagttcttacatctttagcctgaacaagtccattttcagcttgatttcttaagtactgtaagggcacctcctcttattcctctcaattgttgcatttacactgtcatataagtgagtaaattaccagctacttttcagtcttgttgaaaatatgaatgagaattatactaaatatttaacaggtattgcacattttactgttgttttaaagaataccattcctaatcctgaataccattcctgatccctgtaatatccctgattttaaagggaaaggaatagggacatctttaaaaacagggaaaagtttatgttctaactagcaaatgattaaataaagttgattttgtctcacctggtaagtttctaagatgtagaacaattttggaggtttagaaaattatgaaatttcagatgttcactttaatagtatattaaatctacattagggagaaattagactacttttaagatttgaggtctgataccgtttcccagtaggctccactgaaaggcattgcttccctttgaataattaaactcatcccttcatagtctaggttttctgaaaagtagtagcacttctttttataacctgtgtgctgaaattgggaatatagatacctgcattttgaaggaggcccatgtctatgacatccctgaatcaaggaagataccaagttcatttcacaattagctgttttcaagcaatcagtcaacaggtgtgaacggatccagtgttatatactcactgttttgtagctgatgtttgaagtaacctgtttatatacccaaccagtcaggtcttcaaataattgttctcacttgtcaaggctatggtgtcactatgctattttggctgtgttccagtcggctgactgcccatttttggcagatttatcctgattgcactacctacccataaccactggcttacttgaatgtgtgttaagtgcatcagttaatatcaagtatttttgtttaaaatgagaagttgattgattcattggaaaaattgagattatgtcatccagtttctttgtttttgtttgttgtcaagtaggcatagtcaccctctgtctataaagtcaaggtactaggattaagagtgaaactgtctttcacatggattttgtttccataacgaagctcagttccataatcagaatacatacttttagaacatttcaaaaggtttttaagggggcattttcttttatagtatgaccaagttccaaaaagagaggactcacagtgtttttaaaattataaatgttaaggtggctgtttatctatctaaagatactttttgagctgcttttagaacctaactatattaggcacggttcagtctaccagaaataaatgacacagatcaacgaagaaatgataaaatgttgttttgaagaggtatttctaaactgatactcctaaaattgattacacagaagtcatgagatacatttttatccttatgtaaaagagacacagtcacctgtatttttaattgagaactaaagtgttacattataaattatttctgcttagtaactggattgttggtttatttccaaagttcttgtgcatgttctgtttcattactgattgattaaatattaccctgctgagacaataatctttgacctgtagacaccagcagagattggtaataaataaaattctaaaatagaaacagtctcaatttgtaaaatttcatagatttaaggggacattctttttaaagaaaattacttagtctaggcaaaaatgcttgtatatactgcatctaggaattgcattaaatctatgaattaaatctaattattaatctaaaaattcataaatttaaggggacattcttcttaaaatcacttagtctaggcaaaatgctttacagaatattgtggatttatcagataattggcctggttattagtggtaagtctttgtatcttgctctacttatttggtctttttatgtcaaaaatgttgacaacattttgaaaattttgggtgkgtacaaagtatctgtgtgcactaatcagccttctgttgaacacatggaaatgaattatgattttccaatgaattccaccctctcttgaggtttgctaacttagaaaatacctgtttggaaattttacatatgaatgtatgttttcatacccacccccctgaaatgtattaatacctgtgtataacaggcttcagagataaatttttatttagtgttatatgattggaggccctttgaatgatggaacttgactcatctaattttctatttctcaatctatgatttgatattatcttttttccatacaagctttgttttgactgtatttgttctttttaggtaccgcatgtacaggaaaagccaaacaacaggcttcccttctctaattacaattttttcagcaccaaattacttagatgtatacaataacaaaggtaagtgtttttaaatacctcttgcagtcttacataatatgtgtaataattcttaagccgttttattttggtttggtcttaagtattttaaccagtctttttttttaaaattttttcagttattgtttcatgcatactttgtgattatcctcaaagatacagattcaaatttggtcagagattgggcttatgcactattaattttttaaatgttttctaggacattttaatttttagcagggttgacagctgctgctctagtagacaaagactttaaaagaaataataattggaaataatccaaaatcatgcttcttaaaaagaatttggatttaaatagaataagtgtgattgtccatggaaaggatcaagaaaaataaaaaataaacccagtagcttgaaattcaaatttgaattgcatttattgagtatctaccatgaatcagttcctatgctaggcaagtacatgtttatttctttaaaaagcaaaaaaaagtaaacttcaaggtaaatattattagctactctacctcctccttctttaatatgcagactgagttcctgtggttaattgccttgtccaaggtcacttaattaggaagtaatgaactaggttcaaatccatacttctggttcagtgtcctgtgccttttttctgaaactccatgcctgaaagaaacatgaaacaagagggcattattacttactacagggaaaagaagaagagcaaggggtgcattattatcttgtttcataaatgtaatctctttatttggaaatattataaagtgttccacatgtgtcacatgcgtgataaaatgtgaaaaagcctttaactctatgtagcattggtctggatattatataggcagcatgtccgagtgtggctttctgagattaagagaaatggatcacgaagtcaggagatcgagaccaaactggctaacacggtgaaactccgtctctactaaaaaaaacacaaaaaattagctggccgtggtggcgagtgcctgtagtcccagctactcgggaggctgaggcaggagaatggcgtgaacccgggaggcggagcttgcagtgagccgagctcgcaccactgtactccagcctgggcgacagagcgagactccatctcaaaaaaaaaaaaaaaaagagaaatggaaacaggaggaaaaaagcgtcaaataacatatctaaggtcaaatatagcccagaaggggtggtaaaaggcagcctagtttctgcaccagtctgaaaactcctggaattaggagccatgccccttcataaatgaggtgtgatgggtgtcttcctggcccaggcctggtgtccaggatgcctaatatgggccttggccacctttattcccaagcacctgttgaatgtccttagtcctttgtttcctttcatgtattccactttcccatagcccagagaatgacatctgctggatggtgtttgctgttgccatacggtcttttacattgccgttttgaccatagtgggtcctcctctatagtgaaggagcatggttatcagtaaggcatagtgcagtttttgttgtaaccatggggaagaaaggaggcagttcctagaaaagaagtgctgccattagtagtctatggcaagaagaatgcaaaataaaataaaacatgttctctgcttgccacgtgcttttaagtatgtgggagtgggagtcagtgattcactgctaaagtgaagattattgtatttgaataaaattgatgtcacctagaattttgaaaagcactgcaataaaattgggtcacaagcacctttaaaacacaatcaatggaaaaatagctgtgaagaacctatgagttaatcatttgattgttagaaacaaatgatcataaaggaccctagaattataagctgatagttacagtatgatttgatttttaaaactactgtagagttgacaaagtaagacatttgggtaatttaactaaaaatataagacccaagatgattaagtgtaaacaaagagagtcaaacacgaaatacatttggtaagggataattttctagaatggtcagagaaggccttaagataaaatatgatctggatgttaaagaatagtgaatgtttgattagaaagagaaataaatagtatcagggccaatgaatatttttaaagcagtaaacatttattgtataaaactcataaaagctaatctctttgactggatgaggattctcaatcttgcacgagagaaggaccctgagatacctgcagggaatgcaggaatttagtaagtcatattgtatatcccagtctcaccatgatcctataatttaccaaaagtacataaagtatgcttttatatattttttataaacatgagtgtattgttctatggcattaagattttttactattaaactgagggaaggaaatgtccctaaaagtcattttcttgccaaagactgattactaaatagcatgtactctgcttagaagtttcccaacagtttctaaaaaagaaaaccaaaacagtaaaaacggaataaaaattgggattttactccacaaaaacaaacctagactctttcaattcttcataatgctaggtaatgcagttttgcctgagaccagtagctatttctcaaataaggtgtctatttcttctttttgtatagttctgatttaacaagtttggaacttaaaaaaaaaaaaaaaaacagataccagtgcatcactgactttgagattttgtagttctttcactgtgttcttgcctttggggtagatcagaatctctcaggaaagggagtagaactgtttcattttgggaaccccttcataaaagaaaatattctccggagagaaaaagataaactgatagggaagagaaagatgtattctttagtttaaacaaaatttcaaaagacttttatgtaaaatttctgaagcactttaaagctattatactaacagtgtatacagtatgtgggagtgggagtcaattattcactgctaaagtgaaaattactgtgtttgaataagattgatgttaactagaatttttaaaagcagtgtaataaaattggattgcaagcaccttcaaaacccaatcattggaaaatagctgtggagaatctgtgagttaaccatttgattgttagaagcaaatgataataaagtactttggaattataacctgttagttacagtatgatttgattcttaaagctcctgcagcttaagacagcagtaatactatctggcaaaatgaaacagtgagaaaaataggtttattcttgccatcttaaaaccaataatagttgtgatcagattcatatttaaatgcccagtatttcttattagtagttcatacttatctgtaattaacaaatagcattcagaaagttatgaggactaaatgttccatctcttggtatagcccacattaattcattcagtctcatcctttccagtctgcactgtcttcctgcctgtctccctgcctctgtgtcttcactctgacagctctgcaagatgccatagcaaaagatgtaggtttgaatctcagctctgccattaagcaactaactcatgtaaatttattggacatgcagtggcattgctatgagatgagaaaaaatgttcgtttgtgaatactgcatgaaatcgctttgaaacaaaatgctgtgcagtattaagacattatcattattgaatattttatgttgttattattttgtcacatgttagtgcaaagcttcacagaagctcgcaggaaaattcccttattcctcagtttcttatttataatttcactatatgcctgaaactaccattatcacctgtctctctgcttatcttggagtaaacctcattgccctgagcaactttggctttctgtttctccactttttcacctgcatacttatttctatccaaaatatttgtctcattcttctgcctaagtggactagacccactccagtctgcgtttccataaagacttctgttggtggtccttctctgaatgtctgcaatgctaatcattttctcttgtatttattgtttacgtttttcttgttagcttttgcatgcattcctgttatttcccaatgaggttataattagtttgacacatgaggctttttggtacacattgtaaagccaagttgcatgccttgtacgtggtaggcagtcaatacatgcattgatttaagcatttttttttttttttggagaattaacagcaagactgtgaccagaagtatcctatcaatattgacccacagatctttatctcactttaaatcactcctataaccagtgctgataccctttctaaattggagttaaacatttgcagagcactttgcacatctggattgttgaattttctcctgtgaatctgtagacctaaaggaaaacctatttcctaattactcaaatacaccaatcaggtgaaaattacagtaatgacacatagcttcaatttttaaaaaaattatttgccccctgtaaaagtgattttaactatacccactcaccaatacaataaacctttattgagaacttactatataccaagctccatgctaggtgttggggatataaatgaaacaagacagacatggtctttaacctagtgtgcttaataatctggtagtatgatagacattaaataaataattccaccaatgattatttatatgtatttggaaaaagcaacaaagaaaagagtggtgtgatatgagagtgaaaattagtctatggggactaattggggaagtgacatttaagcaatcagtgagagtaaaatctctctggattgagaaatagagtggcagatgtgaacattggcttaaacaactcagtttggccaaaaattgcaatgaacctctgggaaaatgtattttataccttgatgtaaacacttgaattcattttctctgtagaggtacacctgtgcttcaaaagaatctaaagtaaacgacagtaggtttccatgtggtacaagttctttgtagttcagatgagttgttggatggacgggtgattagatgagtagttagatacatatgtagagaaatataaacatatataccaggggtatgtaacttagttccagtacacactactgacagtaaaattaaggaaatttgttaaatgaaaattattttggatttgagaggaaagtctaatggcaacgaaactaatttagtaatcaagaccaaacatttaaatgataaccaagaaacaaaccaattcaatattaaagtagttaaggaagagagaggtagaaaattgcttttataagatgcacatggaaagcatctgatgtggttttgctgtgtccccacccagatttcaccttgaattgtaataatccccacctgtcaagggcagggccaggtggagataattgaatcatggaagtggtttcccccatactgttctcatagtagtgagtaagtctcacaagatctgatggttttataaatgggagttcccctgcgcaagctctcttgcctgtcaccatataagacatgcctttgcttctcctttgacttccaccatgattgtgaggcctccctagccatgtggagctgtgagtccattaaacatctttcctttaaaaattacccagtctcaggtatgtctttattagcagcgtgagaacagactactacagcatcatttgctaaaattctgagatgcaaaagtctatcctttttgatagggaaaaatatgatgttttggactcataaattagcaacttgatataattgctgataaaaagcattttactcttgatgttttccatatcctcatatattttccaatcaaaaaggagtcataggcttcaagaagataccatttataaataaaaagagaatttctggcttggcaggaagataccattgtaagagagaatggaattgctgctgtaatgaaccaacataagaattttgttggcagtcatgatgtgaacagaaaggagcagatgtaacatatccgatgccagcttgacttggtctcctgacttctggcgggaaccctcagtgacactgtctacatagtgtggtatggccagacctcagaagctcattccatactataccacaatttttttccactaggaggttgttttatcattcaggaatatttttcacaaacttatagatatctgctacccctgtggttcacaagccaaattcagaatcagctagctcagatctttctgagagggagatgaggggtctccgaaaggaaagtggaatctatacccaggcgtctccaagtagcatatctgtytccaccacagcacatcaaagagctcactcccctacaaagttgaaccatattttacagcaaagatccatttctacgagcctgaggcttgtcttaagcatggacataacttttagtattgacttttaaagcactttttttgtatccttacaaccacaggttaaatatgatcactggttgctttaaaagttggataaaattaatccagagactttgccccgtaacaacagttttcccagcatatgctttttccctgccatcatctcaaacctgaagatcctcttaatgggtcctgagcacttgtttgccccagatcacttactgcagtataaaaaacgtaaacatacagtcagggcagtatatttggtactttctagtaattgtaggccaaggttgttttacttttttatttttgttttttgactaaagtaaaacaataagacatccccccaacccctaattcattccttcatttatttgataaagattcttaaagccatatgggtatgatagaatcatacacactagaagataatttattcttaatgattattaagcctaagagagttcactgagaaatgttatgaaatacaataatttatatgaaggaataaagtagaaattacaaacaaaacctcttagtattcttttattatcagtatgaggtggtacataggccgtgtgcatcccagcactttgagaggctgaggcgggcagatcatgaggtcagaagttcgagaccagcctggccaatatggtgaaaccccgtctgtactaaacatacaaaaattagccaggtgtggtggcccgcacctgtagtcccaactattcgggaggcagaggaggaagaatcgcttgaacccgggaggccgaggttgcagtgagctgagatcacgccattgcactccagcctgggcaatagagtgagactccatctaaaaaaaaaaaaaaaagtatgtaagtgtgtatatacactatacacacacacacacacacacacacacgtatatatatatggtggtagaaaagaaatttatgtaaacatttaaggctgaagagaacccaagggtaggaagttttgattggcttttagaaaaatcaccctctgagatgaatgattaaaattcactgcagagaggtttcaacagaatgtctcctctcattgcattttatatccaagattcaatatgtgtaattaatccaactgtaatattaatttcatttaccattgtcattatcattgtcaccttgagtgatatagctttatatatatatataattttttttttttttttttgagaaggagtctcactctgtcccccaggctagagtgcagtggctcaatctcggctcactgcaagctccgccttctgggttcacaccattctcctgcctcagcctccggagtagctgggactacaggcacccaccaccacgcctggctaattttttgtatttttagtagagacggggtttcactatgttagccatattttttaaaatcttcagttggttatatatttagcaaatataaatatttcccttcagttgtgatagcatactatacttatgctgttcactttgttcctataaatagcatataataataactaacatttttgagcacttattatgtgccagacactgctcagagtttatgtgtataaatgcatttagtctttcaacaaccctatgaattactgtataatcttgatattattgatgaaaatctagggcacaaaggaactgcatatttttcccaaggttgacacaagctgataccagaaagcactgagattgaaactcagctgactgactgcagagcccacatgcccatatattaacctctgtctgtactcttctgccttagctttgttgtgtgaaatgtttgtgaacgatccactaatccacccttcacctcatggttccattatgtttaggtgactctaaccattcttcaataagaaaagaaagcttttgaaatgaagagtcatttgttatcactttaaaattacctgagtgttatgcatccaaatamatgcattattaaaagaatgaagttagaataccttgtacatttttctaaaataaataattcatttctccctttaaaatgtattccctaaagcacttttgcttttgtttattcagctccactgtgaaagtgtcattgctggaggccactttgtaaataggttagttttaatccagtagtcacttgctcacatttaaacatttaattaatggaagggatggtagaatataaactatcccattaaaatttaatattgaaagattccttgtactatatattttaattgaatgaatctacacataatctctgtatctttgtgccaacagatgaccttcttgatttcttaaaaatcactactctctaattgtaaatttagttaagtagttgtgaaacctcaacaaagttaagacacagtgtgtgaggtaattcttgcttttcacaaagctttgcctatagaattacaggatttcagatgtcagagttaggggagaccttaccagggaacaaaggaggagtcaatgctgaatcctccatacagattcattgccaagtgctcttctgccaccagctgaaaagggtcaatcaaaaaatccatcttaaagtattgaattccgttgtctgatagccctgatagttgattcttcagttgaactaaaacctacttctttagaaatctcattctctataaagcattcaacaagagaaaaacagtaacaatctgaggaatgttaaaaacttgaattaatgggttgtcacttgctattcattatctaggaattctagacctgcaagagactcttagactttactcttacagtgtcaaaaagtctgtcataacattatttccatggaaaacaatgttgatatgaagtgtaggaacttaaaactaactcagtgccaaggatatcttggagataacctagaatcattgcaagctatagctcaaggcctgatacaaagtccaagcttgaagttgaaaagggtcttctacgaatgtgtagtgataacaccagtttcaaaatacctcccaccagagtacagttacccttattaggcttttggagctgcactgaatgagagcaaggtgaaggcacagtgtttgctatgcccgtgccatctccaacagcttaaagcttcagctaagactctctctctctgtttttagtctagatttgtgtaagcctcactttagcattattataatacagattagaacataaatgaattcactagctgaaactgttaaggaactgataattgccaatgtttcttccttattaacaaaaaaaaatttgctagaagaaattcaaatactctatgcaaaattgtaatgttagaaatgattcacaatgtttaactggacttgagctacatacaaagatcaattatcagccccaaattccctggatcctagtatgtaggtataacacattaggtgggaattataaaatggcaaactatttaaaatagatagccatgcctgccttgaggaatttgaaacagacttataatacatttctcagggacaaaatatttcatctgattattatgcatattaatcatatgtattatttttttccctggcccattctcagcaattggattatttcatctttatactttaaaagtgagagggcagatattattcctattttataagtttggaaggtaaagactaaataaggagaaatatttgcccaagttcatgcagttgccatgtgacagaactagtatcctttccactgttctttaatttacatgctcttacaattttaaaacagtttagcctttgaggtgacacattgccttttacctgaattgctttatgtttccctcagatttctgtttatattttgttagttatgtttttagtatcctgattagttatatgctttgtgtttctttcctctctttttccctcttctcccattttctattttcattccttaggttttttcttcaaacaacacaattaagcatcaaccatatgccagatatagtacataacactataaaaaaaagggatctgtgcctccctcattccttctattgtcttcttcccacttactttacccaaaattctatatatgaataataacctagttaagaatttgctaaccctatatcaagaatggaaacacatacagaattgaccccggagcaacacagaagttaggggtgccaacccccactgcaatcagaaatccacatataacttttgattcatcaaaaacttaactactaatagcctactgttgctcagagccttcctgataacataaacagtcaattaacacatattttgtatgttatgtgtgttatattctgtattcttatagtatataatacacaaaacctagagaaaaaaatgtcctgaaggaaattataagcaagagaaaatatatttactattcattaagtggatgtggattatcataaaagttttcatcctcgtcttcttcatgttgagcaggctgaggagaaggaagaggaagaggggttggtcttgctgtctcaagggtggcaaaagcagaagaaaatctgcatataagtggacccatgcagttcaaaactgcattgttcagtgctcaacagtacacacacatgcacacatgcacatagtcataagattacctcatattgtttcacagaaatatctattgccatctctgcccttcatgtaggtaagataatatgagtattttatttaggagacttgtaacaaagtttgaaaaggtgttgtaggtactatgaaggatgcatgtacaagttatataaagtatatagaggttgagaatgtatttccatttccacctagtgagtaagaggagtggggcaagggctagaatggacataaagtgattatatatagtaacatatatctgtgtccttgatacacacaaaataattctcatagcttcaagtaagtcatatatacctactatttgtatccactaataacaaaatatttcagattggctgaaatttagtcattatgagccaggcatggtggtgtgtgcctgtagtcccagctacttgggaggctaaagcaggaggatcacttgagcccaggagttcgaaactgcagttagctatgattgtgccattgcattccagcctgagcaacagagcaagaccccatctcttgaaaaataaagacagaaaaatttagtcatttactgaaaatttgcctgtgaaagaccctatattaggtactggatgaaacaatataaacattaactttcccatactgaagaatatcatggtcaaattacctaaaaatttaaggcttgaagtctatcttcataagtgacttgaacacataactttcacttaagcttatgatctaaagagtaaaagttatgaatacagtccttgctcaccaaatactgtcaccatcatgaattagtacatttccctttaagttattaataatattaaaataatcttttgaagacagaattcatccagcaagaactaggacattgaaggggaaaaaaaggaggtggaagttagaagtcagattttaaaatggaaggaattgtagagactgtgttcatgaatgctataatatatactacggaaaagtatgcatatatgtgaatatgcatatatgcatattcacacaatcttaaatgaaaattgtacccccaaaaagtaatctttatgagaaaatacagatttttgaaaactaagtagcatggctcccagaatttaaaaaaacccctgcatgcagcataccagcataatcttcaaatgctgccatagaacattatgagttgcatgggtcctgcttcaggaattctatccaccaaggcattatgcctcctttcgtgatggtaggactttgccaaaagaacacactgatgctagtttttctgctagggcatctgcgggtggaagaattggaaggaaaaaacatcctgggtctattatgcaatttatttgtgcttttgctatttctggatggattatgattctggaatgcccccattcggtttcttctcatctttgtttcttttctctccctctttcccatcttctgaaggtggaagaggatggtcagttagagataaggagatgaaagacagtagcaaaagggtgagaacaggaataaaattcaagtcatttttcattcttttgacctcttctcccctgtcttaaaatcaggactagtggtgtgaagaatgcctgaagtatgttggaatcattacagttacaggtttttcagaaaaagaactttgtattcctctggacacccacttgaaaagtgcttagtccatgtgtggtttggtaaactggttaataccacttgttagcaataattttgatagctggtctttaattagaagctttttattattattattattattattattattatactttaagttttagggtacatgtgcacaacgtgcaggtttgttacatgcgtatacatgtgccatgttgctgtgctgcacccattaactcgtcatttagcattaggtatatcacctaatgctatccctccccgtccccccaccccacaacaggcctttctactcttgtcattcattgctttgtctctagtttccctgggtgatggaaattgtagagagcatgttgcgaaatgttttcatgttcttatgaaatactagttgtttttttttttgtctcatcaaaatttcaaattaaagtaagaaagaccccctgttttacagatttggatatggtcaggcaacttagtacatggcttggtagacagagcagtggattaagatagagattctattctttggacttcactatgtacagggaaccagttgtgttattagaaataatcgaggttcagtccgccttccccattcaccaagtaggagcaggcccttgattactaattttacatcttttacagcatgtctttgaacacagggttctacaggtactataaaaatgagtggattgtctttaagacagtaattttgacatcagaaaaaggactggcagtcagtcttccagattcgtgggattagtattcttttcattataccaaatttccttccagctgttcttcatacctgcaactacaacagaagagcatttatttctgtggtgtctggtgtgctctgaatgatggttaataatgtcaggcctgcatgtatgtcacagtctctctgttacaattgttaagtgacaagaggtcatgtggaattgccagtagaataaaggagctccttggtagtagacttttgttctttttttctctgtttctcagacaaggtctcaggaggtggtcttgagtgattattgaagtacaactatttgtattatttatattgtactggagataaacgtctttcaagtacttcagagaagagcgcactgttagggctccagttgggttttgtaatcccaatgacagtcggaggcaggtggcaggggcggaggatgtgggaggtggaagatgaaacgttaactgtgaatttcgtgactgcagatattttggactgttttagtttttttttctcatgtatttctgtgttatatatttattttacaaaaatatcagaattttgagtaacttactaatgtaaggttattcaaaaagtatttttgcataaatgtgttgctgaagaaaaaagaatacatattgttgtagtttcatttttaattttaggattttttgagctagagaaaaataaattctatttataacctatagaactactgagaatattattttttgcattagtgatgaggcctttcattgttaacagtgaagtttgttaacatcattcagatctggaagagactttataaattatctataaacccacgtagttaggtaactgagacttaaagatattaagtaccttagtctggtgaataattagtgacagattccatcttgtagtctggcctcctggctttccagtccagtgctcttctttaaagagattaaacatggaaggagaaagaatgtgtgtccaaaacttgatagacactgaatgatttatactattaggatgagtgtattatgatgtactagaaggatcagagactttagactcaggccaaaagtgagatttacctctttctaagtgtgactgtgggcagataacctctctgtttgcttattttcaaaatataaatgataagaaccacttttgaggaatattgtgaagatttgtaattatgtttgtaaagggccacacataatgcctggcatatatcagatactcagtaaataaatgaaaataaaatctgaaaacaatatttgctttatcagtaggtactcaagtaaattgtattgagccaaggtcaaatgaacttttatctcaccaactgcaaaacagaacttctgttttatctattggatgagacttacccttgcttgtaaattgcatcctgtttcactcaaacgtgtattttggcaaaagctaaaacctctttaattatgaaatccatattcaaagttaaattattataacagctaggactagaattcaaacatttataatttatgagagacagcagggaatgaaagaaagggaatgaatttggtgtcagaaaaagctgagtttaaataatgagtgagatctgtcasttactggttgcatgatcttgagcaagtttctccatttctcaaccacaattcctttgtaacataagggcagtcacacctgcttctcagatttgttgtgcggattattatataaagcctgtctgtttcctccagggcactgttaattataatatttactttccttcctcctgctataccaccaacctaaggttaataaaaagtgggggaacttagaggagaaattactcttcaaaaagacaatttagagccttaaagattcatctgaagatatgaggatgcatttctgctgtgaacattcagtgttctgaaatagtaaaaaccttttacatggagctagaactctggtagcacttagcaaagatgggaaatacttcacctttttcatactgaagatcaaaagtattgatatgatagtttgccttgatttttttattttgcatgtttttagcatcatgtaaatgtatcctaatggcataaatgataaagcaatgtaaaagggaatgggtttacagaaatatatgcaggaattagtattccacaggaagaagaggataactaccttcatatcagtattgcctacactatctacatttcttgtccccagagtgtctgtgattatatgttccctggaaccatgttggtcagccagaaatagcaattcaaagcaaaggccttaccattcacaagtacaagtttagttaaatgcaggctgctaaaaacatcaacatattgttaggctacaatatgatatatatagtatccacaccacagaaaatgatatattctccccatactctgcactgttcaaaccaacctagatgattatattacttctgggccacattttaacagagacattgccaatctggcatgcattcagaataggttgagcaggctgagctaaagcatcaagaagccatgtcatattaaagagggcgaaaggggataaaaataatttgcttgaaaaagattgtaaggcagataccaagatgtgtctccagctcctgagcatccattctgagtaaaaacaaaaaagtaaagaaatgattactttttctgtattttcaaccccataacataagcaagaaaagatcatatgatatcatataaaatctgttggttactgtcttctaatgtaatacaaattatgccctgaatagataataaaaatgaaatcttgccaaagcctaagaaggtatgcttgagtatcatatttaatatttaaaaggctgtcattcagaagcagaatgacattaaatattaaatatgaaatgcatagcaaaaccatgatcagtgactggtaaaggcaggtttaaatgcaacctgagaatttcctgcaacttcaaattgtctatccatagaataggtgacctcattaaaacaggtgacttttcctttattgaaagtactcacagagacatgaagcatgcagatttgtcttcctgagtcatggatggacatctttttcagaaatcaaggatagagtcagatagaagcacattattttatgtgggattcaatccaaacattttattttattaagtcaagaaagcagtctactatagggtaactatagttaacgataatagattataatttcaaatagctggaaggagaatattgaatgttccaaatacaactaaatgataaatgtttgatatggtatttaatgtatagctaattaccctgatctgattactgtgcattatatgtgtcaaaacatcactatgcaccccataattatgtacaattattatattaatttaaaaaataaagtaaaaawtaaagcaatctaacttaaactattttgtacaactrttgggagttctattgaagttttactttttaaaaataaattcattcaaatatttgaggagattattatgtcaaacttagctgtgccacttttattagtgtcatcagatatcaaattttaagaccaaagtattcttggctgaaaggggagcttgaatcagttcctgacagacattggattaacwattttgtgtaaatattttccaatttgttacacaattacatattaattattcatatattgtgcagttatatattaccctgagtaaggtttaagtccataagttgtataagcattctgggatgcctaaggtgtgagcctggatgttttggaacttcagtcaaatggttgaattttcttgatgagctaaagccatacatagaagcagaaatatgttctgtgttcctaacatcctcttttggttatttttagctgcagtattgaagtatgagaacaatgttatgaatatcaggcaattcaactgttctcctcatccatactggcttccaaatttcatggatgtttttacttggtcccttccatttgttggggaaaaaggtatgttgtrgaatcctgagatgttcttcttaaaatagtttaggaaggaaggaaaggagattaaacactcagaaagagaagaactttggcccagccaataaaattcacaagttgtacaatgaaagatgtgatttggaagtggcagtgtgtcactctgtatcctattaacaggacacaattggtgaatgagggggaagcaaaaaaaaaaacaaaacacaggaatatttaggaaatttttacaatcttattagaataatataacgctttaaaaaataatggaaatacaggtttacctggtttcaagtaatgtctaccctttttccttacccatttktactataatcccaaaggactatttaattttacaaattatctgccaaattaaaagattaggatagccatgctctccttacatttctgatgttaataaattattgtacgatagtgcttaatggctacaatattttgaagaacaacatgtacaacagcaaagtagttcatcaataatgtaggcattagcgcattataaggtacagaacaggagacaaatttacattttagaaagttatttgttaactttcttcctrccttccttctttcctcctttgttttgctttcatatgttgacttaaaccccaacaaaaattttggggaaatgtctgcaccaattgtttttcattcaggaggcctaacagtgatacacggattgattctcatgtatcttctcatactttccatgagaaggtgaatgggcattgtaagaaaaataaatgttcctataagtatcagagtaatgatgttctatgaggagtatcagagaaaagctaaatatttttctgaaaccctaatggttgttttccctttaaatgccctaaaatgattaaaccagtcaagttatgagttgttggcaaagaagccttccctttgaatatcaaaataatcaaaagtaaatttttaataatctctgataaatattcccaatactactccatattgcaactttcttgcactgatcaaattggagtagtgtcatctgttggcttcgctggaaacagaagcagtgtggatgctgacaactatggggcaccttttgaacatcctttrtttgggttgtttctattaattattaaaatttgggacatttattagaaattaacatattaatctattggtacacaaaatccagttttgataattaaactgaaactctggatcagtgttggctctattgaagtttgactctctatcattcatcttcaattctagaaggacatttttttaaatagcatattactttaaaaagtagctctcaaagaagcagtagacaggcttcttttcacatgcatggtagaatccaatctaatttcaaaaaatattaaatgtaaatagcatggtttatagtataaaaataatgcagtactaatttcctctgtacaacacttttatgtaatcctattgtaatctattaagtaaatttytgattaaactgcaactgtttaattttttaagcatttttgaaaatcaaatttaatgatatttctgtcaatacatttttaaaattagtattctgaaaaatacttcaaatatattagtttatcaatcaacagtttgtattaaacacaaaaccacatgcctataatggcgtgaagttctctaggtgattaaaaatataagaaaaatcatcattcttagtccctactgaacagaagtttgtaatctgatctagattaagccttatcattgtgtgactaataaaaattcaaaaaaactattttctctttcattgatttgtagtatattcacatccacatatttgatttgtcattgtctattgacctagagctagtaaatgttaccattagatatcataagcatcagctaatagtttcataaagtctgcatagaatcacaaaggctgtcttttatgatctggatgtttactgaaactgcttctatatacaaactaaataagaaatgttattgctaagtttgctcattaacaatgccagagtaatagttaaggttataacagaaaaccctgacttttctttctttgctttctctctttagtgactgagatgctggtaaatgtcctcaacatctgctcagatgatgaactagggtcagaagaagatggatttgatggtaagaggcttgagcctttgtgctaatgctatttgccagataattacttagagtctcattgctaaatctaagaataaatttctaagatttggattatgtttaaaacgtaacattattgagaataaaagatatgatttcattttctgtttactttttaaaagtataagaaacaaatatcatgagaattttctcattactttaaaaacattgttaaagtagtaaactgttttaataagctttcagtagctcacattgctaagtgaccttttttggctttttgatacaaatttaatcctttattttctaacagatgttaccaattactggacaattattttttcttttaccaggcaatttaaaaatgtcctctaatggggttgctcacatcaattattcaagttttgatgtttatgatgaaaaaggcatttacatattgatatattggtatttatttcaatcccaatatttcttctttctgtagtaataggtaatgaataaactgtgaggagttttttatgttttttaagatattacttggtgtttaattaccctcaaagggtatgctttttctgcaagaggcacagatccatgaagttaaagatgaaggggaaaattaccctgagtcttacaaaagcacctcaaaatgaatggaaactgacaaaaatgtacttagagaagaaaagcataagagcaaactttactgcatttaagaagtacagttgaggccgggtgcagtggttcctagcactttgataggctgaggcagatcacttgagaccaggattttgagaccagcctgggaaacctagggagaattcatctctacaaaaaattagccatgtgtggtggtgcatgattgtggtcctagctactcagaaggctaaagtgggaggaaatcttgagcccaggaggttgagactgcagtgagccatggtcataccacagtactccagcctgggtgacagagcaagatcccatctcaaaaataaaagcagtacagtcagccctccgtatctgagggttctgcatccatggattcaaacaacctcagattgaaaataattcaagaaaaagttgcatctatactgaacacatacagactttttttccttgtcatttttccrtaaataatacagtttaacaactatctacatagcattgacattgtgttcagtattgttaagtagtctggagattaaagtatactcagaggtcctagattcaggacacccagggctacaagatgcattaaaaacctattctttgaagaagttgcaaactggttggagagactgatgcataaactaataatatcaataaaatgacacaaattataaataaagggtgaagagggcaagggaaactagatattatggtgagtttaaatggataaaatgtatacctttaaaaactgcagttcagtaaaatgaaaagagaatgtggtcctttctaaaagttggtttccaaatgacatgatttaatgtttacctgggcttgatacaggtcatgggtataaatgcaaaatacctaatgctgcaggcaaaagtataataaacctgttcatacactcatgtaaatagagtctatatactcaggtaaatttaatgtatgagatttatttttaacatctcatagtttttctcctctataacttctcttgtctttattacttgtcttcatatactatttttgagtcatataccacatcgcaaggagatgtgcaacatagggaaggaaaggggaaaatggatatatttaaaaaacaactttactgggctaaaattaagaatatataagaacttaaatatattggcatattttgaaatatgcaagagatcaatggacattttgtgctttatctaaattctagatgtttcatatgttatagccacagtttgctactgttatcttttaaatgatagcactgttttcagaatggcagaaattttttcctaaaagaatactaaccaaatggaacctaaatcataaacatcaacaaacgtttttcagtatgtacctttcactatattccttttattctttaaaagaaagattaacattaatacaataataatcccctattaataaatgtttgttttttgcaaagtccactggccagtatttatgatatagagaacaaaaatgtaacatactgtagagaataagaatgtgtagacctacatatgtttgtaatttttatgttaatccattcactcagcaaatatatattcagtatctactaagtaccaggtaccatagccaaaatgactgcacatttcactggtacatgttattcctgcacagttaccaacattaccaagactaaccctgtgcttacttcacttctagtaagttccctttactcaccatctcaatyacttacatgaaaggatttgttttgtcagttactttattttaaaataattagttctaatcaatgtgctgtgctcaccaccaattgctttttaaactctgttttaattccaattgtaggagtgcatgtttgtcttaaggtccttggaagaatttttttctttctaagcagacccctgaattccccctttaccactctttaagttttaagtcagtcctgcagagaaattttgtcctaccaggtgcagggaggaagrtggtcaggaatgcctaacctgctcttaccagctagaaaagatgagctttatctctcacttttgtcarcttccttcagtggtccattcctgtcaagttaaacatcattaagttatttatctttctgaacagtttcttctgctttaatttatttstgcttagctatattaacaataagatttgtgttttcaaaattttaagcaaaatttacacacaggctaattaaagtattcaatgcatattaaaagtcctatgtgtctataacttatcagattgggagctagcagaaagagataagattattgctatataatttttagggatagacaatttaatttccttggtttcctgtctcatggacctcacttaaccagtagtatgtgggtgttttttctaccttttttctccatcttatttaaaatttgttggtgtatttcccttagtcaaactaaagagaaacaatcatctaatcttatgttttatttcttttgtatatgtacatatgagaggaggaggaagaaagagatgaggagaggtgaaaagaaaagatccttctgcctgattgggctttgccagcatatgatagcagtgcaggccttggttccatgagcagcatcagattcaaatttcatagaaaaagagcccagaggaattgaaaaagagaaattaaattcaacaaggagaggcattgtatacattatgcattcacgataggttatgattgagaagaagctggtgctttgggaaaaacatattaggttctacatttaccctttttgaatagttttctcctttctaaacagggtgataataggagaatgctgaatgcctctccattgaatttggaaactgccgggccagcattagtgtggtattgtctgcccacacttttctagatgcaagtttaagatcatgttcagtgtgaacattgaggactttagagatcggagtccgaaatgtgtcaaagttaatgttaatagatgctgtcctcattttgtaactgtgacttctaaatgtgaccttttagttcatatctcataaatttgccatttaagaagaaatacagaaatgaaagttttaagttttaattaaaagtatatcttgctgggtgcagtggctcatgcctataatcccagcactttgggaggccaaggccggcagatcacttgaggtcaggagttggagactagcctggccaacatggcaaaaccttgtctctactaaagatacaaaaaaaataggtgggcatggtggtgcacatccgtattcctagctacttggaaggctgaggcacaagaatcgcttgaacccgggagacagaggttgcagtgagccgtgattgcaccagtgcactccaacctgggtgacacagtgagactgattcaaaaaaaaaaaaaagtatattctacttaagatattatatatttcagtataagcaatcaggagtcctagcatttaatgtaacatgacatcaaaactggatttcctcaaagggttagggttagggtgcttaaagatgctcaaagaataatttgtaaagcttctcagaaatccttggttttctttgggaatactgtttattgacaacgtatattgaagtgagttgttttttttttttttttggtaacattatttccaaccttaggataaaatttccaattgcggcaccctgtccttcctgcctgcagcctgtagcctgtctcccttatggggctggctctctcctgctgcttgccaggctccttatttgttgcctgaaaaggcaaagcagaaatcagaagacatccaaagacttaaataaaagtcttccttaaattgttgcttattttaagtgggctatcccttcatgagtcatttatcaagcccttctcaatatttcattccatttccaatgtcagtgggaaagtcaaaggtaataatagttactctacagtccatgactgtcttttatcttatcagcttgactttttagtgtctgtagtgcctatagcaatttagagatgcgcctatagcaatttagagatgctcctcatttccttcagaatctgtcaactcctgtttactatttaatgatgatgttagtgacagcagctaacacttacgtgttagggatcaagcttagttctttaatttactcattttaccttctggccaacaaaagatttgttattattaactgtcctttatgttaagtttactaggcaatttatgtattatctttcatcctcaaaacagcctattgatataggtactattattatccttattttacatataaagtgatccagactcagtaagttgaaaacctaagttcatccagctagtaaagtgcaacagagcctggattcaactaatgtctgcttggttgtcaggctcttaaacttcccaccacatgtggttacaatgtttgaaatcttgttcattcagtgtgatgatttttttaaaacaaacaaaaaacactaataagcaaatataatatgctttaatttgttctgttaaatatactgtaaaataaaatataaatataacacaaatataatatgctttaatttgttctgttaaatatactgtaaaataaaatataaatataacaatatataagtatmctgtaaaataaaaatattctatgaaatgaagaaatagattttgcagtattatttggccatgaaagtcaatgcatatgaaacaatatcattctattattttaacataggctaagaagaaatgtgtttcatcttgtaaaaaatttaggtgtatctgagcagacaaaaagtcttctggctcacacaggcttctggataggaaaccatgtcatgattctctcttcgttagcttctgtcttataaataaaggaatttgataggctgtctggaaaaagattgctgttttaaattggcctctggtcttctatgttgaaaataaaatttaaaacttctgttatcttgtaaagtttggaagcagtttaatgccaatgaatgtcttttgatgatctaatttatatgtaatagggtctttgtttcctgtttccacttcttatttcgaatgttaaaatgatagtctggtttcaatttagggttgttattcactggaacactttagagaaaaaagaaatccaagtaaaggtatctcatttggcagataatgctcattaatgaagaaggctcatttcagaccaaggtttagtaagtgattccaaagtagagctaacagaaatcaaccttcattacaagagtttctttattgttcattattataataaggaagtctggagaaacagtaagcattagcaacctagtgatagttttgtaagttaggaatagttatttatctgggactgtcttttaggtcctaaaatcataggcactgagatcacttttttaaataatacaaattatgtttgagactgtgatatgtgataagtctcactcaccagaaaaaactgtggaagttaaactgaagccctgtagaatgagaaaggaaagaaaaaataataaagtgaatacatttcaagccaaatatagtttcaggctgcactggaaagacttaatattaaattagaatttatgtgtctgcttttatctaaagagcaaaccacatggtagaactcttatcctttgtcaacatttttgccttatcctaatgttaaccataagcaagtgaatatggaatcagagtagctttttgcatgcctctatgaaaccatctatgtcctataccagaaaattatcttccatagtctgccttgaattagataattcttcgtatctaataccacaggttccagagtgtctccctacctatttctgtctagctgttaacagttgtacagaacttaaagtgcaaagttgggaattagtgtgactaatgttgtatcttactggtccttgaggaatacttttctaagggtatgaatatattattttctaccaaaactgtatttatttgccatgatgaatgtttgacctagcaaaaagcgtttggcactagtaattcctttgtagaaatgccttggcaccccaagcataaaggaattacccccaaatcattactttcaaatagtcacagaatctaaatgggtttggttaatttaaaaatctaaatggaattaataaattaagtttaaagatttaaccttagaaagtcccatcactttgtgcatttagcagcacatatactaagagccattagcttggagctttttttgtgctgtgatttttatttctgagcaactcattttagcatcctatatttcagcttcctcatctaaaaaaatgatgttatagcctgtacagtttagggggaatatattaatctttaatataaaaaatagaaaaaaaacccatttagatatacaaaagaaaatatgctctgaggaacacagtggtgataagattcttgttctgtcaacattgaagcctaacctaaagttagtaagtcaaggaataacataataaaaacagtatttgagaaaaggcaaaaactttttcaagcttagataaatgcttggaaaatgaacaaaggatgagtagggatataatttaggaacttaataaagtatcttgaagttgcagtgacaagatctgaacaaaaatattgttaagaaaaacatttaaaaggaaccgttcaaaagacctttccgaggacttatgacgtagaatcaacaggtcttagacagaggggcaaaggaaacaaaagctgagtttgacggttcaaacctaggggcataggagggataataacatttatggaaaaagtcaccacctccaggagaaagatgagttctgttacaggcaggagtttgagtaaaactgacgtgtaattctagaaatgcccaagcaggatttggaaaaggagtcctagaaattgagaaagaaattggggctagtgacagaggcataggattaagtaataactgaatttattaagagtgaaataggcctccaagttgctgacttagaataaaatctcacaaaattaaggactgatttttaaaattagcctgcactgttaaagctggagatgaaagaaggagaaaataggagtgatgacagagcacaagaaccaggtttgtgtagcagttcaggcaacagctacttaaaaatatttgcacccagtgcagaaaaattaatatgagatataagtctggccagaattaggaccataactttggctatcagacatcagattgttgaaagagatgaatagcaaaatttatttgatttttacagtggcacgtaaaattgaaatcattgacaaaaggaaaacactaaaataaaattcagtgtgccctattctaatatcacattgtttttactttacatatttttatttctgtgtattcattaaaagcaaatattgacataatatattttaccatatattcagtgatgaacagaacacatatggtccctgccttcattgatcttggagtcaagtagaataagaattaaaccagttttaaacatgctagtcatgcagaggatataggtgtttaaacatgctagtcacaggatataggtgtttaggggaggcagcaggaattgggataaaatattgaatamctaaaggaagaacatgggggacatctttctttttctacttctgaaaagccaaaaaataaacttttatgaattttgatgttttagaaaatgtggccatgtgataagtccatattattttttcaaggaaattatatgcaagggtggacatccgtttaccagttttgacatctcttatatttttataataactgagtttgcctgatgtaattagggtacagggaaagaaagatgtgtaaaaaggtaggttatttaatatttttaaaagactaaattcttctcaggctttttttttattgttttcccagtttattgttggtttttttgtttgttttcagttgcctaatatttttgtgtctaatttaaaagctaaatcgtttgtctttataagtttattatttatttcttataccctttataaagtacagaatataccctttataaaatacagaaaactgcttgtttcattatgctttcatcttaaaaagaagacaccttgttatagctagtatatcattaaaactaaaagatgtctgaaaaacacatgggcatttattagatgtagtttggtatgattcttatcgtatttagggctattgacattttgaagccttgactatcaaataagcttttacctggttagctatcatactttaattagtttcatcaaatctggccttttatctttggtcacaattattaaaatcgttttaatttagcaattaaaatggtgcagtaatataggtatcagaagtactgccttttcttcatattgtactactatgattgcacaaatgtgtttcttaattatctggcataattttcacattgcatggaagctcgtaatttgcagaataaactaaatgttaaaaaaacagccatatccctgttgcagctaattggctggataatgtccaccattggccagcatattatactcacagtaaggtaatattacaaaaaatactccagattttacactgtatttcaacatgcagtattatatgcatgtataatatatattttatacagcttttgaaagaaatgatttttatagcattagtttttattcaactagtggtgacattagccaacttatactaaacattagctattgcatatctaagcataaatggatttataaaatttattcgagaaagcaaaccatgttgcataagggaagtaaacatgtggccctataaaccttaatgcattctttatttgaaaggcattgaaatagagagctctctcagtgaaagcaaagaatctctgtattttagaacactttacttctcgcaaacagggttgagataattggcatgtgaaagaggcattctttgtagaaaggcctgtagtaagtaatgttaactagctgaaaactaataccaaaagaaaataaactttatttttcaaacttttctggcagagcttttctgattctctttgtactaaagcattaatggattcaggttcttaacttgaagattgtacttttattagagtaattgataactgatggaacaactgcaagagagttgtgagtccacagtttctaaaacattctttttagagtaacttatctcttatggcaggtgtaaaggctgtacttaaaagttcaataaatgtccacaaaatttaaattttaaaagtatttctctctgagattttcctattttcattcttctagaaatctgtttaattttttcctctttattcttagctcatgagaagatataaaagctgtcctcccgttttgtctcagaactctgtagaaatagaaatgtagtttctattttatcaaccgcatctttttggagtggtctattttgttctgactgcaaagccagcagcatcctggctgctctcattgtctccaagtgtgtttgccataatctggggtccagcctttagcctggctggcacaaaacataaatgaggccacatctcagggcagcttgatattcaccaagatcacataatacatcatttaatttacagagagaaatctaactgtttgaaaaactggaatgttcatatctgcacaagggtttcttcttaataataccaagcattttacaatacttcccatataccaaagttctgttttacgtgcattagcaggtagcaccctgactggcacatttattttttgaatgttgagaatgaatgagcacattacttatttaactctgccaccacgagtgaagtaggtcagtcagctggtactgtaatgaatccttgttctgaatcacctctagctaaagaccttaggcgaataatgttttgttccttagaattattctctgtcaaatagagactagcagtaccatctccatgtggttgttgcgaggattatatggaaataatgcatttagaacatgcctcactttatagataaggaaagtgagccttaaagagacttaatacttgcccaaggtagcacagctggtaaatgatagtgctgggacttagaccaaggtcttttattctaggcacaagttctttacctctgttctattctggctttcaaatgccaatttagttatatgtcttaagagaagtggagaagccaagtatttgtgatctgaagctttgcagtaggaccaragcacctcacagccatttggcccatggacagtacttcccagaacatttcaaatgtttgcctcagctgctctactttactatgcgtctgttgcaaaccaacacattttcaactagcacatccgttctcctgataagataataatatatttataataatatatttaagtgatgttaaagtctcatgacttggggaccatctactttctgaagttgcctgtgcatgggtcactggccagaacctagtgcttgttttctctacttctccttcttgggcaaaactttactacatctcmcacgaagtaacaaaacaccgtgcctgaattgtgaatagcaaaagacctttgaatgacttctttcagataagctcattagatgccagtgcctcagccattctccacggtcagatgaaggagttgtattacttctttccgtctgctttttattatgctgtcaagtggtactcaaattaactttttatctagggtaaaacatatgagacaatcaaatgtaatatttaatatgtttgtttgttttctcccttcactttgttacatgttatcatgcagagataacatgtaaatgtcattctagtatttgataaatgtataaatccatatgggcccagaattaagttccagtctgaatgcattcttccagcacttatcacgtatgcacaattatgtcctcagtaaatcctattaaacagttatatcctcatccatgtcaagagcaatctttgattagacatccaggcattatgactgcttcccttttagataataaattgatattattaaatttagatttattcctttttgtttttattttctgttattactttataaaattgatgtgtttttgtcacgataaaggggttgagccaaatcagattttatggctcttaattgcttccttggtaaatattaaaaaacaaaggcrgggggagcaatatcctctgtaaggcatgagctgaatatgtgaccgtttcttgaaaaatcaatggaaagttcctaatctactgtaaagtctttcattttcacccagttagaattctgcttatagtcagcttctgcractcaaccaaggagtcattaaacagacggaacacaacatcttagagaacaaaagtgcatggaatccaattagagtttggaagtgaaagtgacttataattaaacagaaaataaccaaataatgacagtwattgggcatttgagtgtagtctgtccatttttaagacttcctatccaaagaatttggttatgttttatgacaagagaggtggagaaaaatttaggctcttctggccttccttaaaatccattgaacacttaaaatccgttacacccttaaaatccattacacaggagaaacttttttaaaaaaaattacattttaaaggctcttctgttgctttcaaagtgggttgtaagacagaatagccttatgccaaatatcacaccattcattgcaggctcttaatatatactgagattgtagtcaagttaaaaaaacatatggaagaaattcagaatatttgctttagagtgatttggagtgagtggctattatgtcccaattttatcacctatgggaaggataggtaatagagttaggatccatattagaaagatattctaaatattttagtttgtaatcttcaaaaagatgaatttttaccaggatttttttcacttgttgtcttgaatgtgtttctcttttgcccaaaatagtaacttatataggcatacatatggcttttttttttttttttttttttttttttkggkgagagaaagcaaacaatctctggattcacattgactgcactgaccctaagtaraaraacagtgcaggattcccaggtttatggctagttaaggagttcttccaatagctgtcaactctagaaatagagtaatctaattcttgatagaacagcagtcttcaggctggaatatttgtactgtcgcgattaccataagacatttcaagaggagttaaaaggaatccattttcacatcctcagccaccataagtcttattttcttaaaagtgatcagcctgaraaggcaccttggctggaggccttatcgcagcttctcctttcccgcctcctctttctcaaatgccctttttccattttaacagaaaggcacaggtctccttagacatagtcactatgaacatttccttgagctataaaaacctctggggcacacacaaaaagagacattggaaaacttagtgtctaggaagtctccttaatcaagggagcaatgtaatttccctcccctctttatcattaaagagatgcattccaataaaattttatttctgtgcattttaatatttatgaataattatcatatgttagtgctctctatctcagttaggaactaaagagttgataattgtgaactatctataataataattatattatttattccaaaggaatttttgaacacttaggacccatcacctcaggaaatttctaaaatttagttaaatctctaaatataacatataatgtagtgacaaaaatattttaaagtttagcatacctgtaacctcactggggagactgaggcggtaggatcacttgagcccaggagtcctagtccagcctgggccacatggagagatcctgtctaatttaaaacatgtatatattttaaagtttataatgcactggagtaaaattggggaaatttaaagtggaactcaatttcaaagaaaaaaagaataatataagatttctaaatatcaatgaggattttattcacggacttttctctaagtgaatgatagtgggactcaaattgctgkgatatttataygccattggtaacagagtaatatagccatttcattttaatctcataatgtttacaacattatttacaactatttaaacatggaatgggaatagtattctttggggatattattttgtagctacatgactaaaaattataaaggctacaattttgaagccattccatcagagtaaacaattatccattgcttatggtgctttttttaaatctaggactcaagcgcctggtggtgtaggacaatgtactgaagcacttgtcacaattcatagccaacagcaaaactgggtggatatctaaagtaacttctgcataacatccctttgctgggatataagagctcaaggtttgttattgttaagttaggtcaggaaagaaaaagacaagataaggtttagggattacttcaactgttggacatgtattttcccaaagaagacagtctttatattcataattttcgtcatctgtaaaaagctataaagaccaattacacaagtttcttagaggtatctgaagtctgttctgtcttatgcattatatcttctatttcaaaggtgctgattttggatggacacaaaacccatttttatctttaatatagcacaacaaaagatactaattatctcaataccttatgcttcatttcatcaagargttttattcaaattcagtaattgctctgtttggcaaaaaataaaatctgaaggaacattgaaactctgtttaataatattgacccatgataaaaattttactttcaagtagaataggaatgaactttgtcaagttttaacaaatttggaagtggtgagtggtaaaaaaaattttctcagaatttggattaaatgtttcaaaacatttgaagtctaccagcaaaatataattttaaagatatatctttccttttaaaacacacaaaaaattttagtataaatatactttttatatatatttcatttaaatacatatgctgtggatacacttgcattagttatacgtcctgtaaagaaagaagcctaaatgataacaaaaagctcatggccgatataatgatcaattgggaaaggtctgctagtgtttctatcaaataaaatacaactcaataacaataacaatttttaaaagcagctttttcacattctaacgtaaaaatatttcttttcagaagatatttaagtataattttttcaaactggtcgtttttatttcttacagttgtaaaaatgtgttgaaactaataagaatctgttggattagacttttaaaacaaaatcccgccagttcagttttcttctggatttggtggagaagagagatggggagaatgtaactccagtgagaagtcttcattgcctttttcagcaagctcatgcatcctcccctgttacataaaggaagggcagggcaggacatagagacttctctccccaaagctgctatttttctttccccacaaaaccaaatttcttccaagtatagtttcattttttgacattttattacaaaatattttaaacatacaggaaagtttgaagaactgtatagtttatacttagatactcatcacttaactttctatagctaataattgactatatttgctttatcacatgtctgtctctactcatycagcaatctaaccatttctttcttttttggtatctggcaaagtaagttttatttaactctgttgcatacatgctaatatctaaacttcttgtttgcatgtactactatgctaaagcctttacaggttagaccaggcatttcctgcttctttcccaccctaccatcttccgcgtttactcaaacttcattcacatcaaacttcttacccatcatctgaccataatgtggagttttgctgcctttacacatttaaaaaatctctatggagaatgtcattcttctttctttttggcgtttatttatccttcaagatccttgactgtcaccatttcactgaaaagtttttcttgtacctgcaagcagtttgcacctgtcctcccagggaaaatggccccggtttgtagcatttgcagattttcatggtataaatgtttcccctacagctgatttgaagctaccaacattactgaccatggagttaagaaggaatacactcaatatcctcttaccagctgacagaagccagctccagtgtaccactgctactttcaatataatatttgtcacggtctattgttgttgttcatgtgatctctgaaagcagaggcaatgcctcattcatatttctattgctagcacatggcaggctgtatagtaaaggagtcacaagaatatttgatgaaggaatgatttggatggtaatttgtactctacataacactttctgcacactactaattcaggtgtaactgaagaattcacagtagtagctccacagtggtaactgagctggaagtcagagccaacatctgttatgtgtggcagataccccaggtggtaagaatctctcttcagccaagcacttgcccccactatctgtggtgcaaatgcctttttccagttcctttctaaggctgaaatctaccctgtggcgttgcaacagtcacttagaaggccatttgccatagatatcttaaaacttcatgagaagttagcaaggtgctaagttaagggcaagaaggatatgtattaaaagcaaatctttaaagatccccttggtctgtgtactagcctcccccatgttgaggaaaaattgagttttcagggttgcttagattctggaaatagtaacatgataccctaggcataaaagaagatcagaacttaaaaaggtgaaaggagaggccaaaaaaagaagtgattattatttgaaacaaaatgaaattttacttaaaattactattttttctaacatatgaaatactacctttcagttttggacttccaagttgaaataagtgattatatgtttttttaagtggaaagaaatcaccacagttttcatttaaaaggtattttatgtgtcttcattatttaatatactgaattttaatttgagctactgtggtacattttcacaacttaaacagaacagtaccaagaatgtttaatatgacattatctttgcatgttgcaggtagtaaaattctgaaaaacatgtacttattcttgatctttctgtttaattatggactgtgaggatttggaatgaaataagtttttgaaaaagagttttaatgatctctggaaaataccgaaaacctggaatagcaatactaagtatagtataccagaacatttacatctgaacttaattctctcctgctgttgttcagctcctttacactgaattacacatcaatccacatattttatttcagtattataaatctttgtgagattatatatgtgtggttagagctaattttgattttgattatatggaaaagattgaaggtacttttcaggataaaacatttagagaatagtttaatgtctcttcttactgtccatggtcaggttattttactttttgtgtaaatatatttcagttttataagagggataataaaactccttatctgggttattgagaaatttttttttttgaaatggagtttcactcttgttgcccaggctggagtgcaatggcacaatctcggctcaccgcaacctctgcctcccaggttcaaccgattctcctgccttagcctcctgagtagctgggaatacaggcatgtgccaccacacccagctaatttttttgtatttttagtagagacggggtttcaccacgttagccaggatggtctcgatctcccaacctcgtgatccgcccacctcagtctcccaaagtgctgggattacaggcgtgagccactgcgcccggccgagaaatttgaaaaggagagtttttttttttttttaattaagaaaagtgctagagtgtgttgtgattcactatttatggggagcacaactacatatacataaagtagaatatcttttatatgctctctaatcattcattttatctgaaaatataaggaatagtatactcactgtgagaatgttcattttacatttaaaatttagtatgtatttgagcatttttctgatcatcagcttataccaagctaagaagcacagctttacataatttatttccctccttttccagcatagtttcttacttttcattgctgtagttatgatttttacaagttttttatcagaaatcttctgtgagattattcttcatatatattttttacttatttgattttatatgttcctcctctcacctcacttaaatacatgaagttttatttttagacgtcttagccactcctatgctgcttttcttgttgtgcttctaaatatagtgaccagttttggagctctcccagtttccattctttgtgttcattgaattgatttcatgatctggccatattgtttattggagagagccagaatattttcccttactcagcacatcatgacccctgagttcacaggtcagttgaggtagggaattttaaacatagagtagtaataggacaatgttagactgaaagcatcattgaatggaataactgaaatatatatatacatgtataggaagaccaccctaaggggactatttgccatcccactttaaaaaaaaaaaaaaaaaaagaaaaagtcttttcatggtctcttgttcattaatcatctaaaatccaagcacagagaattcaattttagatggtctccagagcagaatttgatgtataatcttaattacaaatcatagataattaatattgtttacaaaatcagaatacgattagaggtagggatcctgcacacaccctattttcctccccagtgttctgaccgagagactaattaataattcaaggaacttacagtgaatgagaacccatggttttgcttaattatcagaacagctagatctgagaacagctgtctcccacatggatagacacttattccacccatttgcaggtagaatagctggcaataataagtccttcccattggatatgttgaaaggtgcctgccatggcatagttgccacaagagaggaagaaatggacacaaatgtaggctgttttcagggcagagggaaggtgggaggaaaccagcttgctggttttcacacaccctctggggaacacccatgcacctatgagatgggtttgtgttagcatcacctctgaaagattacccacccaggcaaagaaagtgacccatatgttttcactttcttggagtggagggcaaaaaaaaaaaaaaaaaaaagcaaagaccttttttctagccatttcaaaattgtgtgtgttgtacaagttttctttctcatggaaatgttggcatattaattgatccacacaatcaaatagattagaaatggtgttcataaaagccctctaagggaaacagtagaaatctttttttcaaaacccttctgtgaaagcttgctgttaccacaaattataataaaagaccaaaacacataccagttatcatctatagactaccgtccctgagcaaattacttgactcaaactgttcatttggattaggaacatttctgttattatttgaaaagaatattctgttgtatatctattagaggcagtagaattagacgatctgcttgtgttaatgctttctataaaatcccacataatgaataaaaaggatagcttatccattttaccttggattataaaaatcttgaccaggtgcggtggctcacacttgtaatcccagcactttgggaggctgaggcaggcaggtcatttgaggtcaggagcttgagaccagcctgaccaacctggtgaagcctgtctctactaaaaatacaaaaaaagttagctgggcctggtggcacatgcctgtgccagctacttgggaggctgaggcaggaaaatcacttgaacctgggaggcagaggttgcagtgagccgaaatcgcaccactacactccagcctgggtgacagagcgagactctgtctcaaaaaaaaaaaaaaaaaaaaaaaatttgtgaggtattttttctgttttatacttcttccaatgtacctcgggaattaaaagaaaaaataaaatgggctcattgaagtattactttaaaacattattttaaaataatatgtttatttgtaacaataatctatgtaattaatttttttaatttagaaaatgtaacaagtggtaagacttacccagaaaaaccatgcataactttcaaaaatagtactaaaatgcaaaccatggtgccattgtctcttactaaatccaatttagcagttctctactcttttctctagaactcatgaaccaaccagaagatgaaagagtatcaagtactcaaacaatcatcatcaaataattatgaatgatgttgcaaggcagatagggaattaagagacttcttagtttaatcacatcaaaggagaacttttggaaaagcagtttcctaaagtagttttcccagcatggagactgcaaatgaatagaagatggtgataaggtacttaactcttcctcccaatgcgtggtctctgtataaatagaaaagaaggggaaagtcaattggaagaggaggataggaacctacccctctctgctcagtgattttccagttagcttcttactcacctcccctctggatatctcraaagtttttctttggcactatggggacctctcaaaaatcacatcctagtattggtggccaaaagcttaaattttcaaatttgatttacagataaatcctcttaagggggaaaaaaaaaaaatactgattttgcttactggagtctgttgtatgtgtaaatgtgtaaaatcaattacaattagataaaaaattactgaccactgaactctgtttgaaaatacaggtgcaacagctgcagcccggaaagaggtgataaggaacaagatccgagcaataggcaaaatggccagagtgttctcagtgctcaggtgggtgcattcgtactctgtttttgtttcaaattgtattatgtgtcacctaataaatactttaatactttcatctggtaatttaaatattttactagagaatatttgtctttttttccttttagattaaaaattgaggaaaattaaatgagaaattgtcagtttctcactattttagttaaattgcaatctactaaattatttctgttaagaaagtctcgaattgcatcacattttattcctctatttgctataggactttaaaacattgatttcacggtaggttgaatatcttaggaaacaggaaaagctattgtaattttttttgttttgtttttcgttctggctcgtggtgaaagatgtatttatcagacacatttcactagatttctaggaaatgaacatcagccataaagctgttcatgtgaatctatgttattctaattattgagagaaaaattactgtttcaatttccatatagtagtatattttgtagattatgaatcatattattattattaagcattaatttagaaaacaaatattttcttgaaggaaacwccagttatttctaaataatacaatgtaacatttctcttcaaaagattactttaaaatatgatatatttatatgtaaggagtctacagtcaattcaaaatgatacatattagcgagtaaataggaacaccttgggaaatattacatctacaattggataatttaataatcaaattttttgccaaatttttgccccaactctttctcatagagtatcgacactggctcttttgatttcwcctcttgctatttctatcctcttcctggtacagtcactaaagagtaactgaatgacttaatgccaaaagaggtagccatgagaaggatgaaaagcattatcatgctctctcagagacaccacatcaaaggcagtgagaactctgtggtagccagcacattcacgaccagccatgttcaagcggaaaatagggcatcattgctcccttccgttattgaatgaggctacctttgctctattgctgtacgtttccaactacattttcagggcttattcattcatgccataagtaaatatagtgaaacttaaagcattgattatgtaccatggagaaaagaaataaggcaatgtagagatggagcaagtgggagataaagaacttcttttagtgtgtggtcaacaaaaaactttctgagtaatggtatttgggcaagcataggtgaccttcatgaagaaatgaggtaagggagttcaaggcaaagacaatagcaagtgcaaagatacttaagtaaagacaaaactggcagttttgaggaccacaaggaggcctgtatggctagaaaaatgttctgtggggacaaaggcgtatatgaaggtcataagcttaattggaattctgagtaaacacttgtttatttattgtgcctcagatttaccaataatgcttttatttcttattctgtctgaagtctctgagggaaagtaaaaacagctctagaatttccatgactatcccgtgataaatggactatttgaacccagtgatgagtgacttgacttaaaattgcacatgttaatagaaaataaaagcaagctctatattattgtttttctataataaaagcatccataacacatatgcagaatatagagagatcctatccagaaaaaagtaagttaagcttagtaaataatgattgagcattaactgtataccatgcactgaattaggcaatctagataccaaattggaatgccagccagatagacaataaactaacaaaagaaaataaagtggccgggcgtggtggctcacgcctgtaatcccagcactttgggaggccgaggtaggcagatcacaaggtcagaagttcgagaccagcctgagcaacatggagaaaccctgtctctactaaaaatacgaaaattagccgggcatggtgacacgtgcctgtaatcccagctactcaggaggctgaggcaggagaatctctcaaacccaggaggcggaggttgcagtaagccgagatcgcgccactgcactccagcctgggtgacagagcaagactccatctcaaaaaaaaaaaaagaaaaaaaaagtgtgtgctaaataactacatgaatagataccctgctgtggcattagacaggaaggaaccttgtgtttcctgactggagtgttcataaagaggttaaaattggaggagtgctgtgaaggataggctggattccagggcagggagagatgtggtgaaggcattcctggaagtggaaaaattatcaggagcacagccacacaatcctaagagcactatcaatggcatccttttatggggcacttgctaagtgccaggttcatgccccatgttatgcacatttgacaatcatcgacacaggaagcttgcaaggttgtggtgacttcactttsctgtgaggaaattgaatctgagagaggctaagcagagtgtccaaactcmctcagttggggagcaacactaatgagagtcttactcaaaactgtgctatgtagtctagtataaattcttagcaatactagtagtctagtaatgaattctaaatgtattaaaggactgactagcaaaagacatgaaggtgagtgaggaatctagtttaaaaggagactgaaaatatactgaagtccatatccttgagtgttttgaatagcatgttaaaacatttaatttttgtgtgtgtaggcaatcaggagttgtagaattattttcgtgagattagaggcatgctctaacccatgtttcactatacatgttaattgcaacgtgaagattggctagcaaggtgacgtatggataatgaaaaaagtgaataaatataaaataaaatgtaaattaaaaaaaaaaaccatttaggaagcttttgaagtaatcccagcaaaaggctggaccaggctatggggagagaagtgcaaaggaaaggacaaatacaaggaatttgggaaaacaggacgtgattaatgaatgtggartgtggtacaaatttgtcaggtatacttgcccaacatgtttcttacgttttggaaatgtgcaaccttataagggaaccagaaaactgtctttcagcagtccttgcagataaaatacaagtctgttgcctagggtttgccagtcagataaatgcatgtaagcaaggctttgtttcaaattgagcatcatgaggaagcagcaaggcaggacaacaattgtcctgtcaggtgtggaatctcatgggccagcagtggaagagcttccacctcagcattttgggagctaactacacagcattagtatgagctctggcattggctgtgaacatcagtggcaagcctttcatggagcccaccccacagtatgaacaagtactgttacccttcccagctacagagcatcgaagcccagttctctggatctgtgagctctctaatacctttaatatatctctttcctgttaaaattagccagaatagatttccggtgttggctgtgagaacccttacctatatgagaggctacaagagagaggaagtattccagaatattctacaggggttccagtctatgccattgataggatgccattgtctaaagaagaggaagtacttttcaatttaaatacctaacaggtatttatcgggaagagtaggatgcactgaatttggcagagcatttatgtagaggcacttagaaattctgccctggaggttcagagagaggcgagggttagaaatgtggacataaggctgggtgcggtggctcacgcctgtaatcccaacactttgggaggccaaggcgggtggatcatgaggtcaggagatcgagaccatcctggctaacatggtgaaaccccatctctactgaaaatacaaaaaaattagctgggcgtggtggcaggtgcctgtagtcccagctactcaggaggctgaggcaggagactgccataaaccccggaggcggggcttgcagtgagccgagattgcgccactgcactccagcctgggcagcagagcaagactccatctcaaaaaaaaaaagaaagaaagaaaaagaaatgtagacgagagtaaacaacacagagacaagagtacagcaatgtaagctgatggtcttgctaaaggatagcgtgaaaagtgagaggagaaaaataaagaattcttcagaacattgctttccaatagaaataaaatgtgagccacatctgtcattttaaattttctagacaccacagtaaaaggggtagaaacagaaactaaagaaattattataatacagtctgtttaacacaagtctccaaaattttatcactttgacatttgatcaatataacacttattaaagggacattttctattcttatatttgtactacatctttgaaatcccatgtgtattttacacttacagcacatcttaattcgactagtcatgtctcaggtggttaacagccacatgtaactggggcctacatattagaaagcacggatctggagatagaagaaaaagatcagcctaggaactgaaaagatgtcagagaaggagaaggagaagcaggagaaaaaagcattacaacacctagggcaaagagtctttcaggacggagggcatggtcatcagaggaaattactgcagagatatcagtttgaatgagaattcagcagagatagttggaattgaaaaatgaagaagctgctagaaacctttgagggcatggcttccgtgtgaggcaggaatggcagtcacaattaagggaagtaaggaatgtggttgaacaagaaagaaaaaaagagcaaggaaggaaggaaaatgaccatcttctatgctggggcttttgtaacagtgtatcatttaatcttcatggaaatcccataattacagttgtgattttatagataaggaaactgaagcccaagaaagttaaatgatgtcccaacatcagtcttatgactgagatgttagcctgagtgtgacccccacaaagatgtgatttyccaaaaagatcttcctactgttggtacaaaattaaaattttgaagattaaaaagaatacttcagattaccagaagagttttgtaggtaaaaagctaataatttacttggctttctcagagcattatgggttgtaattgttttttttgatgagtcccatgtttttgggggggktttgtttttttgttttgttttgttttaagacrgtctcgctcttkcgctctggctggagtgcagtggcacgatctctgctcactgcaacctccacctcctgggttcgagcaattctcatgtctcagcctcccaagtagctgggattacaggagcatgccatcacacccggctaatttttatatattttttagtagagacgaggtttcaccatgttggccaggctggtctcaaactcctggtctcaagtgatctgcccacctctgcctcccaaagtgctggaattacaggtatgagccacggtgcccagcctgaatcccatatttaatacaggatttgacaccaagattttgtatgtaggaattataatcactcatgaggcaaaagccatattttgaatatgaatgtaaaagaaaattgtgttcgttctttagaggtactcccaattttcccaactcatattatcattcaatgtatttcttcatgggacctctagtggtttgacagaccacagaagcttaaaaagtttgaaatacatgcatgaaaataaacaataattaattatctcaaacctattatttttaagtaaactttgcagtagaggatacagaaatctaaaatatggattaacatttccattctccattcaacttttactgttttatttttggcaaatatttttgaaatgtgagctatgtaccaggtactgttctagtctgggtgctgtggatgcagcagtgattaaagcagacaataacccctgctctcatgaggcttgtctagctgggggagggggtgggggcatggcaggaggggaatggagtggacaggagaccagaaataagcaagtaaacacactgtatcgtttttcaagggtgataagtgccttagataaaaataaaataggcaaagggagaaagagtagagaaagggattattattattttaaatggcattcctaaggaagttcttgcttagaaggcgatattggagcaaagattagaaggcagagtgggagtgagccacacagatgccagggcaggaggatgacaaagaaagtgcagcgcccctcagtggagtgtgctgggtatgtctaaggaaagtggacattggtaggaaatgttgaccaagagatgggtgcgaacaggagagtgtggggtagctgtttattttaaggcctttgtgaaacctccctttcacccatcaggagaggagaagccattagagagttctgaatacacaagtgacaggatttggcataggtatgaaaagcctcaccctggctgccatactgagaacagctgtgggaggagggggcaagagtgtgactcggatggagcagagagaccattcggaaggctcctgcaatccaggtaggtgatgctggtggtgagcaaaagaaggaagtcacagaaggctgtattttgtattattttatttatatgaaatgtccaagagaaacaaatctacagaaagtgactagaagtgatacagggctgaaggaaatagggagtgactgcttaatgggtatgaagtttcttttgggggtaatgagaatgttctaaaattgattatggtgatggttgtacaactctgtgaatatattcaagaccattgatwgaatcctaacactttaggttaattctgtgccaagtttatatctcaamaaagctgttatcaaaagagatgcagtagtagccttgtgagaatggttaaactagaaatattttgagagtagagccctcaatttttgctgatataatggatatagaattaggatgaaaagagttaaagagtgatcccttactcttaagtaactaaaagatggaaytgctaatttctgagttgaagacagattgtggaagcagcaggttatggggagaagttcaggaattctgtttgagtcacgtgagacaccttcgtaaaaatttggagtagataattctacatactaaactctctccctgtgtgtgtgtgtgtgtgtgtgtgtgtgtgtgtgtttgtgtgtgtgtgtgtstctctatgtatgtatatatacacgcaaatatatgtatgtttgtgtatatgtgtatatatacaatttgtattttaaagacttttttctggttatgtaggattgcaatattgctatgtggaaagagtgagtggttatttagtcatggttatttaattatgaggatttaacaattcaaaatgattaatagtgtcaagtaattaataaatataattaaaataatgatgtacttaaaactgattgattgtaaaacaattgtcatgctgagtaagaaaataattttatattagcaaatcagtggggaaagtgactgaaaaaaaaaatctgggaaattttaccagtaggtttattggctgcttgccattattttatgtgtttttcatgtaacatctaaattactaaatgccttaatttctcaaagtccactgaatgtaattcctgattccctaatccacaaatcagattttttttcaatctccatatgctctgtttttttattccgtcaaatcaaatcacttccccttatttttgctgagccttggctgaaaaacttaacatcagcattctctatggctcacttttaacatacagaatgcacaacaaacactttgtattgagatgcctgattacaaaatcaaaatggttttctttatctatctakcttcgatactcaaaagaaacagaacctccctaattggataatgtaaactttatggtagcaatcgtttatggaacattactggtatataaataaattaaaataaagtatgttaaaaaaaattttaaaaaaagatccggagagccaagatagagggaaatgtgggtgcttatatgcattttttttcctttcagtcatttctttctttwtcacaaaagaaattaaaagttaatgtcgcccctcattgtgccttccagagaagagagtgagagtgtgctgacgctgaaaggcttgaccccaactggcatgctccccagcggagtactttctggagggaagcaaaccctgcaaagcggtaagcaggctgatgggtatgactgtgtgctggggcatcgcagtcagctgtgtcattagagccctgatttattcattcatttaagctctgtcttggtcttcrgttcttcttctcagctggcagaagggctgaaaccccaatcagtttgatcagtcatgtccaacataatagctccctcattctctggaatgtggtctttactccacctttcccccattccctcattcacatgttaatctacrtattcagcctagctacaggacaactcatttaggttgcctacatgcacaataggtttgactactttgagccactccgttgtcaaaaacaactttttaatcacatttttaataagtattctggttatgtttcatttatgagataacacatacacacataaccactaaaatatacctgtatgtctagattttcaggagatgatttcattatcctcttgaatggaaattggaagccatttgtgtcttttctctgatttatcaattgaaaacaagagactgaatagaaccacattttatttttgaaaaaagagtaacatttcctttataatacagattttgtgttaaaatgtgtagctttctagaccttagacctgtgccgtccagcagagctctttgtgatggtggaaatttctgtatctatacagaagccgcatatgactgttgagcatatagggaatataaccaagaaactaaacgttttcttttatctaatttatattaaatttaattaaaataagccaggaggctagtggctaccatgttagcagcacagtcctatatattctttcacttttgttacatttgttatcaattttaactactattattattacatacaatacaattttaacaataggagattgctattagatgaggctttaacagaaaaaaattaaaatgaaaatatgctataacatttttcaaaacattctcggcctcttgcttattttcctgtatctttctttgaatcttttttgtattttcttttctgtccctgcccttcaacctagaagactcactattctcatttatattattcaataaacttctacatgaagagtaatgatcaacttcatgaatatagtattgctgaatgatcacatcatggctgcatcacattaattgtctttattttcagatgaatatattccgaatcagtgtctttttttttacaaaaagacaaaaatttttaaatgaaggtaggaagatacatagtattgagaagtaaacgtcccctttaaatttacagctaggaattattttaacaactttaaaaaaaaaaacacacaaaagtttttctaccaaattaaatatcttactaaaacattagcataaatggatcatttacatgtccaaaatgtaccatctacctaactgactgaaatctagtttctgataagcacattttaaggcacagcaagtgtattatcagaaactgtgggctttagaacacatttaatagtgttcatttaacattcgctttagaacatttaatagtgggcagtacatagttctaatatgtcagtgctggtgtgattctggatgttttgctttacttttaaacttacgttacttaagtttttccagttctttgtttcatttccagattttcacttgtgtttttacttaggttatttggttttattttattttaaatccattggtttgtgtttttctatggttcaacctacacacaaacacacatacacataaaagacatatgggttggaacctttctatatgggtttgaaaacttactatatattttaaaccacatacattgatacgactccaaaatgtattgcctgatgcccttcaatttgtctaaaagggtagactacttacaactttgctatgtactctctctctccatggtgataaccattctccatttttatcataaggaatctcgaatccaccgtaagtaagttatagtgcacattttgcagttgctgtagttttaaaatcttgaattataagaaaaatgcaaattaaagtcaaggggtagaattttaatattaaacattttggagttacagagaagttttgcattttaagatttcattagggaagtataaactaatcttaataacatagaaagactcatatacttatatagtggaagtttagaccctaaccttattacaaaaattgctgataaagcagtgggcttttcaagttctgcctctgaaatatgctgtttctgtatattcagtatttaggctgcctattctttaaaatgctgatagaattattgccactactggcacgttaccacttgatttgtaacattttaagaattttacttccaaaaaggatattccactaaggaaaagaaaacataattgggcttgctggaaaamgaagtccagattatatcattcgtttccttttttccttttccttcaccctcttcctacccaccgacccccagatctagtaatgcctgatgtgtttatctttaaagagtcacatccattatctccttagacaccctgacttttatttttcctttaaatttgaatctccctgtttttccatcacatcaggaaatagtgctgtttaatattaaatagtgtgaatgatcccactgatattgtggcactgcttcaaattctgccattttgtctggcattttaaaactaaatcaccaagcatagcagaggttatatagtattctgtgtgagtcagaagcacagttgagatttacataatctcttataattcagtccatgtaaaagaaattttcctaagtgttttcctaaagggttgtttgttatttatttagtgggcaaaaaccaaaacatttaattcagataggcgtacccagctcataaattaaatttataatttctgtggcatttkttttctttttttttttttttttttttttagcatttctgttttgttgtctgtgccagaatctagcacttacaggaacattagttctcttagctcctttgatggtcactgatttgttcttagagttaaaaaatcctctgctcatttttctcattcattttgcaccccctttcttctcttcagctactgttgaggctattgaggctgatgaaggtaaattggccagtcccctttctgttgtacctgcaacagataagggctctgctgggtgtattcatttttttgctgtagcttgtacagagtgtgtgggtgttgagctaacagttgtggctcagtattaaccaaaatgttcttgctttaaaggggaaaatgtccttctatggtttgtttgtttgtttctttcccttaaagctatgtttgacttttgtatatgatgaatactataatcacagaaaacaaaaggattatatattttgaatgatgtggggtgggggttatggcagctgttttgaccagtagcttataaaacaataatctttgagctgaaccatgtccctccctcaaatcactttcaggcagcactgaagagaataaaaatagccatcttaattctagtcttcagaagtttgtagccaaaggaaaaaaatgttcatttaaatagtgctttgttgtagttcaacattaatttgtatctctaaaaaatattccaacatgagacagctgtatataagatgaacagttctggtaatcttaaatcaaattgtaacctactggtatttgtatgagaattaacaccagcaaaatattataaaaagttcaaaagcatctagtggctgtggaagtggccgataacaagaatagcgagtatcaagtagcactcaattgatgaatgtgtactgagtgtctgctttgtgccaggcactgtactaggagctgcaggggacatcaagaagtgtccatctccagctgtgttctagcactgctcaaggacagtagagtcgaacctttagtatttgctttttacttgactgttgtttaaatatatagttataagagaactgcatatcaaaatagtttttaatatttattatacataccatatcctttggaaatttcaaaaataataatttgaagttcccctttaaaacaaaattcttcagttgtattttgttcttgcaaggtaacttttttgtttttctcaaaattatgtgcatatggtcctttggtgtgatacaaaaagtgccactttagactcttccaatttgtacatgatttggatatggtaggggaaacaatagcactgtaagagaaaatacaactgcttcctaaatagcagtgaataaactgctatttatgtgggaattctctattcctcttggcaaattctaatctgcagtgtgcattcttgttgatagtttggctgttttctgtggtttctgtgactctgtgttgtgttaagtatactaccaatgtaaattgctaatacccattgtctgaccagcaactacagcagagcacattcttccataccaggatgacaaaaatgattagaaatggagccccattccagaagtatccattgttctagctacatttttaacactcccaccctattggcttttaaaacctagaaatttcacttttaccatttaaattaattaaatcatttcataaatgataatgatgacaaacttttatacctgttaattatgatgaaattatattcacagtagtctaaaaaagacagtagagtaccacttcatgctattcttttgtatttcaaaataattgagttagttttcagggtgggtgctcattagacagctctattattttgcaatttattactaaattagagaagaattaacaagctttgctttgggccttggtctttccccattttcgcatcttattcctctcacagttgactaatcaccattatgctaacctttaaaatgcagaggggggaaaaactatttctcatcttttaatgagtattgaaacaactgtgtatatcttttaggaatctcatccatactaataaaaggcactgcacatttgtgtaggagtggctggtaaagtttcagcttgaaactgctttcctttttttttttttcccccccaaataaggttgggaggataaaggtaccatgaaattatccttaatcagccatggtgatgcagcccaattgagcattggtgattggccctgaaatatctggcttgcacttcacagggagtaaagcaaactgatgtcattggttccccatttatgtgttttatttgcagctcaccagttggtgtactcactgaaraaatcattaagttttttgtacaaatgccttacctatcgctgtagcacaccaaagattactttttaaaaaaatcaaatatcattcccactttgagaattccatgttttaattgaataggaccaaaaccagttcaatgcatttttgctaaatattgtgaaaggcatttttttccttgttattatttaaccatcacttacatctacattgatctactgagtttttctttcatttaggcagtaatggataccagatgaacatcagtttgacctgttcactgctgaagggcagacgatacatttctacctagtgaccttatcttgatttttttttttagtttctcttaccttgtcactcactccacatgcttccaaagttaagtggagacaggagtttataatttctttttttttcatgtcatcattgagttgcttgtcaagaagttctttctgggattctgagatggcatggaaatgccccggttaattccttttctagctccttttagctcctgctttaagccctttgctaggtttttaggtatagcaaacatactgattccactgaatttgccattacctagtacaatggaggaatacaaagagggacatgctgcagcctgtctaggttaaggtgtttgatgcttatgatgtggccagttgatgctggttctagaggcttgtccctgaaagcagctttcctctttatgtgtccactttggatttctttgagctaaactttcatgaagacaggagaaatgcttacatcttaataacttcaagaggacattttggttggcaagagacattggctgttttcaaacctttggttacttccgagtatggtaaggagtctgttgtgtggtgtgcaggtcccgtcactttgttcttcactgaaggattccctctcactgagaaatctctaacatcacctgctgcaacagctgtgccctttgttttcctttggataatcctggttttctttttttaatgattttctgtttagctatcaaaggattttcaccacaacataagatcactagcttcgaggaagccaagggcttagaccgaattaatgagaggatgccgcctcgcagagatgccatgccctctgacgccaaccttaactccatcaacaaggctctcacctcagagactaacggcacggacagcaatggcagtaatagcagcaatattcagtgaccacttcctgttcactttttttttttttttttttttttttttttgagctgcggggcatgatggggattgytgcrtatcagcagttggatgttcttgcctctgacagtagcttatttgctctgggggccaggaattggattcagtttacactatcattaaaaaagagggagagagataataaactatattttggtggggatggtgattaaacacctcttttgggtatgccttttaaaaatgcttatagagaaaaaaaattttaaaaagaaagctaatgctagtatatactgcaatgttaggggaatgaacatgttttcctactgcattggggacttctagataggttaatgaaaggccttttattctgttactggacatgaaaactttgtctaatttcttactctattgtacgtttacagtcgcagcactaaaaatggatgacatcaaacatttttaacaaaatgatgtacaaactaaggactatttattgataatgttttgctactcttgtcagacaatggctataaactgaattaggcagtcttaaaaaaaaaaaaaaacagaaaaagaaaaaaaagaacgttgcaaatttgttaaaatgccaaaaaggacagtttaattttgtacagattatgcttacctcaggtttctttagtgtgcttgaatgcccttctttccatataacacttatcttcttcttaattcggcaatggaatatcttttaagttttaaaaaaactggaataattatatctatcttttttgccgtttatatttaggggtttttgttgataaaatcaagtcttggttgtggcttgctgaattaaatatttatgagtggtgcatttttaagtatagtgaacaagacaccatattaagtacagtgataaagcatctatattctgtaaaaaaaaaaaaaatctgcctatgcatgttttttaagaaaaaaaaaatggctgtatcggcctgtatgggactgtaatgcgcttagtggtctgacatatactggaaatgtatgtatactggcgtactttatattctctaaaatgcttaatgcctttgaaattttgtaatcaaaaaaaagctttgaaaaaatctaaaggggagagtattctttaaagtttttaacataagcttgtcaatgcacatgtagatggttagcatgtttagcaaaccttgtgaaattataataagtttgtagttacatgtgaaactctaaatgcatggcaactgttaatgtcataacagtttagttattttgttctgttctgtcatgtgccacaaaatatgtacttttttcacttttttccctttgtatatcagttacgggttacaactggttcattctgaaaacaacaacaacaaaagtccattcatattttttaacaattgtataagtgcccaagtaattcactacagcctaaagccttgcctttgtaatttgacttctgacatgttggcaatcaaagcatgcacttgtaacaatgaaaaagaaaaagcattttatattactactcaataaaatgtgcatgaacttacagaattctcatccttccactgagtccgctgaagggatttatgtgcacaaccaccatgtgtcttctaggtgstggcccaccaccacacatcacaggctgatttccacaggcttcttcctaggggcctcgtgatctgaggggtggtgcctacttccactgtaaraaagaatcttggtggatttgtgtctcaaatcagataagagaagcctgtttaaagagcagatgccatcttctggcttcctcaaggagccagttaaaaaaccagagcattcctttttattgaaaaataaaattaatttgttatcaggttgtttcagttgtattggatgccctatctatctgctaaagcaaaaagtactaggctactaagtgcattttcatcacagaaaagagttgcatttgtattaacaagaaatttgtatacccacgcttcagctactatctaatcatcacccgaagatttaagatacaccaaatttcagtttgtttgtaacattgttcatctttagtgcactttgttttatataataaagtatgcctgttatattaaataataagaatatggcaattagcgatatagcatacccaaacaaagatgttctcgatacagtctggcaaagactatcccaaggttattttaatgaattcagacattttttcctgtggatatttctccatcctaaaaaaagtggcaaccaaggaaaatatttagatgcaacttactagagtgatgatgtgaaagaaatggtgattctggtatcatggtgtttattttctttcttataactgcagagaaaatatcctgactaaaaaaawttcatttttttggattcctttcttttacaaattgtgctgaggcaactatggcatagaaataaacatttgacattaaaataagcagttgatgtgagtattgcttggtctttctgatgagtggttaggaaagtaatactgtgtatttttccataatagtttggtctctcaaaaaaagttgatagagaactagttatttcttcaaaagggataacctttctagaccatcagttattaggtttctctccttcacttttggagaaactatagaaatctttagttgctcatgccagtgtacctctggttacacacacagacacagacatacacacagaaacaacctcctgtcccccgacctcctgcacccagtccccacggtgacttcactctcatgggattcaaactcagtgctgaattttcaactgttttcaagaacgaagagctagatttgacggaccctgcatcagctgtttttcctgtctaaaatatcctctacttctgttctccgtaaatggtatttgagaaaaagaaaaatcttcagaaaccaaacttgtgtgatgagatgaacgaactggaggggaagagaaacatctctgcccatctacagtgtatgacttaggatgacatcaaagctggaagtatctcgtggcatcagcccagaacgtggtgtcatggtgaggctgaaaccctcagaatggccttatcctgaaacacttcttccctctcaccctcgccacatcccatgtgaaataaattttaatacacatctatttttctactcagaaaccagggcccccaacatgaagtcagccccgtaggaggcaccatggcaatggtctgtcttaaatgtctcacactttcaccttactacttcatgtctctcactcactggatccctcttgtcacactccatttagaaaaggggacctttcagtttgccccaccagtttcttcaaaactgaaagccccttgggttgaacaaatttgagatctccgcaactgaagagatgtccttttcccttgttatgtggctttttattttattcattgctcaaacaccaggtctctgccatgttcctttcactgttctaggttcttattttttccacataaacacacaaaatgcctgccaatcttaacaacataccagtttttattataatgttaaatgtcagcattccattgtacagtgagtcactgtcaggcttaacactgaactgctcttttcgtttcatggatattccttctttatatattttaaggtaatattagccagaaaagcccctgaccaggccctttcaggacaaatgtcttttttaaaaaatgcatacatagaaatgggaggcagaaagtagtgaaagaattgttgcacctatgtctggcgatggaattttgaaaaggcaacattgtcaaatcggaatgcatgtgggagaatggagacccagcaggagagagtgtctgttttaaggaaggactgaagaaacttaaaaggtgagcagcagaagtcatgatagctataataccaagttggttatcccaaaagacgttctttaaatcagaaagatgcctaattaccataggatagatgcttaaggaatgactctgcttaaccagagagtaagctgcaggagagtgcaagtgcctcccctttgctgcaagtgttaaaacctgggcaaactttattcagtgcctagacacctcctgagtgatgctgcctggaaggagttatactggatgtagttgaagaaactctcttcaaagatagacattgaactaggtgatatctaaattacccttcaatcgtaagattctaaatatccatgcaattattcagtcttccgaaaacacagaactttgatttgcaaactgttggctagaagcttgtatttccaggaatactgacatgggactgagctttctgcatcaaccaaagcagctcttttatgttttttgctgtgtatcagctgaaaagagtctccactagattatcaaagttttaattgactatagaatattagcttagaacaaagttgacttaaacttctcccctaaggcatttttgtcatgttatattttcaaatctttttataccaattgctggaaacatttaggcttctcaacaactccaggttgtctgcaggactgtcctgcagagagtcttacaaggtggcatgtaagtgtattcacgatctgattcctgccaatctcatctaccccaaacttgaccctgagcttcggccatagtggacttctcacaatgttcggaagacaccaggcttcctcaattctctgggtctgtattcatgcatcttctatgtgcagatttcagatgtgtcttaaatactggaatgagtcatttcctcctctctaagcacacagtatcctgtactacctccgttttgacacttaatccactgcatgtaattgtttattgtctgtctggcactgcagtgagcattgttgctatctttgcattcttaggatgaaacactgcctggcatagtgtttcttggaagaaggggaggtagggaaggagaaataaaatattttttggcatgaccttatggtgtgggcactcccagattccaaatggcaaaccattattgaagagcagctgaaacacttaccccagttcaatgttacctgttctttctcgtaagaatttcctggtccccaaaggtctggagtggagcctacattttaataagcatccaccaaaattcttgtggatcagacaagtttgagaaacctagtccaatttatttctaaagctaacttaaatttcagttctatatttttatttctacagattttctagcacaggcaaatattttactgcttaacacggctgttacacaagattatgtatgattaatttaattttcatttatagttgtttaatggatatgaatttacacaaaaatgtgggaattatttaagtatgtaatacaacattcacaactgaaaaggttatgagaagaaagcggtggttttgttgttgttgttgttgttttagtgtattagacttcacccagaaaaaggagataagtggtggtggagtatctggagattcctggtgaagaatcaatgaaaaaagttgcctgtgccttgaagagaatggaatgctttcatattgaaaagattgcttatttcacaccaccctaccttaccataacaaccacacccattatcaccatcagcttgccagaatttgctcacaaaatgccttttgaatatatattcaacactgtttaccttccggaagttttaccatgagtcattcctttgagttcaaaacaccttctctaaaaatcttttttttttttttttaagatacaaatcagagaaggaaaccaccaacctttgtcagctattaacatcttagtaaaatttaactcatatgtttctgacagggctagtcacagactaataaagatagctgtgtttatagagaagggaaggccacagctggagaatgtgagagtgcttggggagaggactaccacctgatcaactgggtgcattattgtgtagctatttctactaggcctgtggcagagaaaggagtacagtgaaattcaagacaaaaatctagtctctcacaatatgcagtggcagtgaaaataaatcaatgtgtgtgccacatgtactcacttctgtatagggttcttgacaccagtcctggcctacagttaggcctgggttggaatttttatagctctgatacttattagatgtctgtgtgaacttgagaaactaagcttctttaaatctcattttctccctggtgatatgaaggcaatgacagtaattagttcataagcttttcacgggtttcaaaagggatgatgcaaataaagtagtaggcatggtgcctggcagaaagtaggcactcagtaaacttcagttattgttgtattcagcagcatgcagagtcaaatgagtgcttcagatattccgtaggtgaagattgtgtatgcgtgtgtgagcacctgtgagtgtggtgggcggctgagaaggtaggtgtagtcagaaaaacctaggcaaagctgacttggttggaatcttcctacctagaggaaagctggagaggctgcagagggggcaggcatagagggggctccagtgtgagaggaaaaagtgagagcagaggaaaagatccagaaaaatagtgatatgttgaccacttggtgaaagcaaaggaggggtggggcacaaaaagtgatgagaatgagaagctaagatggagccaaatcagtgtttgtatcaggaggtatttcggctgcaagtaacaaaatacctaactgggttcaaaccacagagacatttacaattcccagacaaggacatctgcgacttcgaggacccaaggttagtttggtggctcaacagcatcactaaggactgaggctgtttctatccttctcacactattcttctattggcttccgtccttgtggttgcaaggatggtcacagctcctggcatcacttcctcatgcaacactgtttcactactggaaaatactaccaaagtagcctataaataagacgaaactgaattcattgcttaccacagtaatgtaaccactaccttgacagaggcatagtaaatctagatggggaggacaaaagaataatacttatgatatatttctttctttttctttttcttttttttttttttttttgagatggagtctcactctgtctcccaggctggagtgcagtggcgtgatctcggctcactgcaacctccgctcccgggttcacaccattctcctgcctcagcctcccgagtagctgggactacaggcgcccgctaccacgcctggctaattttttttgtatttttagtagagatggggtttcactgtgttagccaggatggtctcgatctcctgacctcgtgatctgcccgcctcggcctcccaaagtgctaggattacaggtgtgagctactgcgcctggctacttatatttattttggctaaggtgaatctttccatgtaagagtctaataaggattggacaaattttatgactttgtaattttaaagtggtagaaacaacaaggggagaattactaagtgaattttgaagaaataacagtaagtaggtaaaaataataggtttttttcctcaagttttttaagatatgtatacaattgaaaacaaaaattataaaattacaagatgctgataaaaaaaatcaaagaaaacctacaaaatggaaagacactgagttcattagagctcagttgattggaagacttactgtagctaagatgtcaattctcaaatgaattggctgtctagatttaatgcaatcccaatcaaaaccctggcaagttttccttgcagatatagacaaactgattctaaaatctatgtattgtagaaagattaaagaactagaatagccaaaatgtttttcaaagtccaacaaagttggaagattcacattagccagttttaaaatttactccaaatctatagtaataaaaaatgtggtattgatggaaggatggagacataaatttgtggaacacagcagaaggtccagagatagactcacaaatggtcaatcgagaaatgtacaaagatatttcaatggtgaatagataacttttcagcaaattagtggtagacaattggagatccattggcagaaaaaaggaatttgatctctacctcataccttatacaaaaattaactcaaaatggaacatggatttacaaaatctaaaatactaagtataaaatctttagataaaagcatagaacaatatctttgtgacctaggattaggcaaagagttcacataaatgacaccaaaagcataaaccagaatggaaaaaaaaagataaattagaccacatcaaaattataattttttcctttgtaaaaggcagtgttaagaaaatgaaagaacaaacaattgtctgaaagaaaatgtgttcaaatcacgtctatcagacaatttgtatacagaatatatacaaatctctccaagtttaataacaaattttaaaatgtgcaaaagattgaacaaacataccagacaacgtatatagatgacaag

SEQ ID NO: 95703 - DNA, 76353 bp, Homo sapiens
  misc_feature (1)...(76353): n = A,T,C or G
caaagtaggcactcaataagtatgtgctgattgaatgaatgaaggtgacttgaaatagaggcaccagcatggcctttggagctagaactgggcaccactcccatctctcccacttcccatgtgtcctctgcaccacatgcatcaacttcctagcccagctgaacaagagccagactttctagatttgaatcctgactctactacttcctagttatgtggtcttgggcaagttccatcagtttcctcatctataaaatgggaattgtagtagtttgtatacttcatagggatgtgtggcatgttgtaagtgcttatgaattatctgggcttgatttcccagctctttaaagagaatattacttgcaaggttgttgtgagacttgaccctccataaatagcagttatcatgattccatttgataatactttctatgatctaatcacaactttatgaaatagggaaagcatccctattttgttaaaaaaaaaaaaaaaaacaaactaatgtgtaaattgagtgatacattcgagttcaacactagcaaggatagggtctaactcagacacaaacacatctctccagacccaagactgtgacccttttccccgcatcacaaattcctttacaggtctgaaaaggccccctgttaaactgaagatgttcttgggaaggactgcactgtaagctttactcttttaaagaaagacaccatacggcagtagtttttaacatactgtgcagcagaagcacatggaaaaattgttaaaaacaggttattggctgggtgtggtggctcacgcctgtaatcccagcactttgggaggccgaggcgggtggatcacaatgtcaggagttcgagaccagcctgaccaacatgatgaaaccccgtctctactaaaaatgcaaaaattagaatggcatggtggcatgtgcctgtaatcccagctactcaggaggctgaggcaggagaatcgcttgaacccaggtggcggaggttgcagtgagccgagactatgccattgcacttcagcctggccaacagagcgagactccatgtcaaaaaaaaaaaagaagttactggccccacccctggaatttcggattcagtatgtatgggttgagctggaaaatcttgagaaccactcccctaaggggaagtagctgaaagctggcttagaaagcaggaaatggtgtgggcaggagagatctggggaaagccagggaggcaggaaggggcagctttaagagccagccagagaggggagggctctgccagatggaagaaaaagcaccagatcaggctctagctcaatctcagtctttggcaaatcaccttttctgagataaaaaggagtaattcttttaaaaacaagctaccacagctcaccccatacgaaataatttgagtacccctgtaactgtttcaaaaatcgaattaatggccgggtgtggtggctcacacctgtaatcccagcactttgggaggctgaggcgggaggatcatgaggtcaggcattcgagacccacgcggcaacatagtgaaaccccgtctactaaaaatacaaaaaattagctgggtgtggtggcggacacctgtaatcccaactactcaggaggctgaggcaggagaattgcttgaacctgggaggcggaggttgcagggaacagagatcgtgccattgcaccccagcctgtgtgccactgtgagactccgtctcaaaaaaaaaaaaaaaaaaaaaaaaattttaaacttccaaaaaaaatcttcagggcccagatagtttcactggagaattctaccaaaagtgtaaagaacaccaaatatatacagtctttttcagaatacatggtgggggaacatttcccgattcattttatgaaccctgacaccaaaaccagacaaagacagttttaaagaaagaaaactgcagaccaacatgtcccaaaaatacagacatagaaattcttattaaaatattagtaaatggaaatctgcaatatatagaaagaattgtataccatgagcaagtgggatgcagtatttgaaaacaatgtgctccaacatattcacaggcagtggtggtgaccgcaaagggactccactgagcagtaatcaatggcctgggatgaaagtggggccaaacaaatctggggaagcagaaaaattagattctatacacatggcttttgttcaaacaaaataaagctctgtactccacacaaatgtggtggctgttaggttctacacctaatgcttgacagaaagaaggggccaccggaagtgcagggacaaacaggagcaaggttatcttgaggctccaggtgctaagagggacagtccaagcagaaaacccattccccaaagtcactgccatccctagagcagggttcaggggcagagaaggacaggagaccctccagtcaagaagttggcggccaaaagctgagaaaacccatcctggaatttttgcttaggggctctgagtttaaactttgaaccacatccttataaatttgtatttgaatttggaaacactgacctgacaccttttaaaacataccaaatgtagagagagagtttgatggctaatcaagttcatctctgtatgaagtacttgaactagcaaaccctctgtctgggacatatctcccacaatggaaaggctcccggctgcctctgctgttcaggacagtaaggattttggctctctgccttgcccacatggccacggcactcaccattctgagtcctagtccaagctgacagcgtcttcctgtcctactgagataaagctccagctgaaagcttgctcttgctctgaaatctgcagaagtcctggggagttcatctcctgggaccagcccttagtcaatgaaggatgccagtcagaggataaaaaccccagggttcatgccagtgggagggatggctggggctgttcttcacaaactgtaatgtgcccctgaatcacctaggaatcttaataaaatttagactctaattcagtaggtctgagttggagcctgaaattctgcatttataattttttcttttcttttcttttcgagacagggtctcactgtgtcactcagactgaagtgcagtggcccaatcatggctcactgcagcctcgacctcctgggctcaagcaatcctcccacctcagcctcccaaagtagctgggaccacaggcatatgctacctttcctggctaatttttaaattttttttttttttttatagagacaaggtctctctatgttactcgggctggtctcaaactcctaggatgaagtgatcctcctgcctcagcatcccaaagtgctgggattataagcatgagccaacactcccggcctgagattctgcatttctaagaggatcctaggtgaggctgaggctgcttacctggggactacactttgatgcccctaccagtgctttctgcaatttcctcccaaataaactgtctgctctcaaattcttgtcagaggctctgtttctggagaaagcatttttttttctacctctctacttatattccaggttccttgttctcagttttcacaaaacccagccactaccttacaatgtgagccaaggaaatcacttcatttcctcatctctagaataagagtttagactgtccagttccccttcccactccagcattttaaagattttctcgttattctagtgattgtggaacttcccacacttttttggatcagctttcctgctcctgtgtacaaacttttaaaatcaagctggcttcacattctgcttatcttcaaaaatgtctctaaacacaaatgaaactcgaccttttattcaagcataatagtaaaaatctttgacaccagagagaaatggaggtaacaaatgttcatgcatgcagatkacattttcattgtaaaaggaagaaagggaccattcagaaaaacacaagaatagtaaaatgaaaattagtatgaaaccaacaaaagatatgaaaccataatctgaagacatctaaacaggagataataaagataagaaaacacagcagtgaatttgtgtaccatgtctgcttttaaagcaacatctctagacaaacacacaaatatacacatgctgtccccttcaagaaaatcattttggaaacccatcctcttacacttatgcgtaaacatttttgaaatttcttcttctttttctttttttttttttttttttttttttgagactcaagctcactgcaacctctgcctttttggctcaagtgatcctcctgcctcagcctcctgagtagctgggaccacagggacacaccaccacgcccaactaattcttgtatttttggtagagagagggtttcaccatgttgctcaggctggtcttgaactcctgagctcaagcaatttacctaacctcagcctcccaaagtgctgggattataggcatgagccactgcgcctggcctaagtttctttagtttataagaaaccaagtatacaaccatacacataattcaatatcaccactttagtcaccactttttacccaaaataatacaacccagcctaaatgcaaactttatttccagtaatttaataaacttcccaaatattaatacagttcactcatgtaactgtcagctattgctgcataacagacaacccccaaaatcacagtggcacacaacaataagtagttatgtctcactcaagagtcttcatgtctgctgggttgctctgcttcaggctgtgagtcctccggctggctgagatgcctctgcaatacgtgaattcagtctggtacccagatgctaataggcagctacttgacctcatggcagaggtcagatgttcctgagaacagaaacacggtgcttctaaaggcaagactggtggtacactgctatctctccacattccattcttaagcaagccacatggccaagtccaaggtcaataaatgactctcacagagttattggtagatggagtgaatatatgataatctatcaattcctaaattatgatttctcaatacagaagtcattaaaaagaaggcattttccaaggaggagtgccaaaagcgatgtaataacgttatcattgaaataagtgtatagctacataatgggaccatcttggatgcacaagtttttgtttgcttttaaaagttattttaatgccttttatataagtcagacttcatgcttgcctcagtgaaaacatgcaattcctatttatgattggattgtcctgaaacctatacacagaggctcctaaaagctatcaagtcaacatttccttatttcttcactttcatttaaaaaaaaatcttttaaaaaggaaagaaaaataccagaatctccattctgatgtcgccatgctgaggcttggcaagccaaaaatataaggatgaaaaggcaccaccaattcgtgagagtcggctaggcttcttcgtgctattccggacagtcaggagccctgggttccagccaggtgatcgggtcgcttatcggctcctatcacctcagctgcttgctccacttctccgggtttccagttctccatcgtaaatgtgctccctggagcagcctcccctgacagtcagacatccaccaatccattagatgctggaggttttctggagacactgtttccctaatgaggactgctttgtacagtcactgatagcagctctagaaagtgtaacagcttttttatgtcaaaagctgttcctcgcgctccggctctcggggagccgccttccagacctgtctacccgggagccccctccccgcgcacttcccagacttctcctgagacccgagagcgctggttttcccccactcgcgatagtcctgggatgacagtgcgggccccctcactcgcagctcccaccacctggcggccaggggttcgcggcccgggcgggcggcgccagtgccctctggagctgggcggggagggcggggcgggcggagcgggcatggtggggtgtcgggggccgcaggcgtagcgctctcgccctggccatggagcggccggcgcccggcgaggtggtcatgagccaagccatccagccggcgcacgccactgcgcgcggcgagctgagcgcggggcagctgctcaagtggatcgacaccaccgcctgcctggcgggtaggcgggcgccggggctgcggggaggcgcgggaccggggctgcgggagcggcggcggctgggggctggggggggtaggaaggcgaggaaggtacttgcggagagctgaaccctgcgcagccagggataggggtgttgcaacagtgcgcccgcgctgggcatggccgagaccggtggttcccaaatgtgtggctctcgggactccttcattccattaaacaagtgaggagcccagagagcttctgcggggttttttgtttgtttgtttgttgttgttgttgttgagctctctcccgggctggagagcggtggcgccatcagaggtcgctgcagcctcgacctcctgagctaaagcgatcctcccacctcagcctccagagtaactaggaccacagacgcacgccaccaggcccagctgactttgggagttttgttttgttttgcttttgtagagatggggtctcactatgttgcccaggctggtctcaaacgcctggactcaagtgatcctgaagtgttgggaggccccagcctcccaaagtgttgggattacaggcatgagccaccgcacccaggcagcttttgtttatgtaggctatttatatcacatttaccgtaatggaaatttaaaatttttaattatttttaaaaaagaaatggactacattgttagcataacatttttaattaagaaataactattttccacaagaacaaaagtgtagcgagaggagtggtgataaaggttacatcctggcgagtctctctaaggtctggctagtggaggattgctgacttctcatacctgcttctgcattcaccctgctgctaccacacccttatgtagtctctggaaaactccactgtgttcttgtgacagaatgacagtaaaaatggcaaaaacatttattaaggactgaattatatcccccacaccacccaccgaaatttatacactgaagtcctaacccctggtgtgactctatttggagtgaagaattaaggctaatgaggtcataagagtggaatcctggtcccatacaattaatgtccttataagaagagacactggagagcttctctctgccatgtgaggccacagcaggaagacagccatccacaggccaggaagagagccctcactaggacctacaatgggcaagcacctcgatttggaacttccctgcctccacaattgtgagaaatcaatgattcgtttaagccttttttttttttaacaggatttgagattggttatattaacaatggaaacatgaatacaaaattaatccacacataggaaaaaagaataatacataaaccactgaggttgctaataataatgatgcctgtttccaaggcaactgaatacattatgagaccactgaagtgacttttagttaccttgcttagtgcctctgtcttgtgatggagaaacaatggcccacctgcaattgtcatcatttctatgacctgacatctttggaaaccatggaaagatccaattgacaatcaattactctataccttaatagttacattactattagtagtataatattaataactgataatgttactaatattaagaaaacctgtatgataaagttggtttgggcaacatgaataacgcctgtgttaaacactttatggtgacctgaggcaccacataagcaggggacattatttagccaaggtgtaactgaatctgtgtagtaatataaaactgatttctctgggattttctcagagttttttataggccagcattatctctttagccacattactgcaatcccagtcatggcccccaaggcatttctatgacccctaggcactgctggattccaaaatgtcttctcaatatttaaagaaagatgaaatattctcactatccttacttctgtcagtggccccattatttttccagtcccttaagtctaaagtcttgaagctatctgagtaatcctctatctcacacgtccatgtattattttggaacatctcacacacayggttttttatttgtgaatcttttccagggtttactatctctggagtggcacccaactcatctagttgagcaagtcaaaagtctaggagtcatccttgatatytctstctccaccttacttctcacttcacatactctatgcatggagcaagtcctatcagtgttaccccctaaaggagtctctgaaatccaagcactttgctgcacccccattgcgamcatctactccaagctatcatcatgtttcatgcagacttcagcagtgatttccaaactcatctccattcattctggtctcctctccacactgcttctaaagtaatctttgaagatgctaatctgattgatcatgtcatatgttttgttcatttttccctttcttttcttcaccaagggctttaaggatttttctaagatgttcaagtgcttcctactaaaaaatctcccacagataataattataaactctgggcaaaacactaaataaaagagacttaaggcaggtgaaaagtgaacaaaagtaggcttataacacttgaaagttaacacatgaaagaacaaagtggtgttggctttttctgtgtttgttttataaatgacttgaagcctgaaagaaaatgccagtctgctcccagctatagttctgatggaaaacccacaggcttgctggtttgaagagcccaaagacagggtttgggaaaagcacagctactgaatgaaatacaaaagggaaagttccagaaaggaaagagccagagagacagagccctaaaatctatctataatcttttcccagatatctggcaaatcttgaatcatgtatacataggacagactccaaacctcctggttgaggccaaaagaactgaaaatagttgtgcccatctctaggtagacagattatagttttggtttggtcaggttaactgcttgctttaaaaaacaaaaccaaaaacaaaaccaacacttttcagagaaacacagtttctacaatggatcactcacaatggctaggatattatccaaaattacttgaaatacagagggaaacatgatttattcttaagagaaaagatgatcaatggagattcatccctagacaaccctgatgctggaattaagcttcaaggattttaaagcagctagtataactgtgctcaataatataattaaaaatatgataataaagattgctgtaatcccagcactttgggaggctgaggcaggtggatcacttgaggtcaggagttcaagaccagcctggtcaacatgatgaaaccctgtctactaaaaatacaaaaattagccgggtgttgtggcaggtgcttttaatcccagctacacaggaggctgaggcaggagaatcacttgaatctgggaggtggagattgcagtgagccgagattgtaccactgcactccagccagtgctggagtctcatttgagaatgagactccatctcaaaagaaaaagaaaaagaagaaaaagatttaaaagacagtacatttctgcagagtaatagaaactattttttaaaagccaaatggtaattccagaactgaaaaatacagtgtctaaaataacaaactcaatggctaggcttaacagcagaatggacatggctgagaaaagagttagtaaatgcaaaaatacatcaatataaattatccaatctaagaacagaaaaaaatgaattttaaaaataaagtgtggccaggtacaatggctcatgcctataatcctagcactttgggaggctcaggtaggaggatgrtttgagcccaggaacttgagaccagcctgggcaacatagagagatcctgtctctaccaaaaaaagaaaatgttaaaattagccaggcatggtagcatgtacctgtagtcccagctactcaggaggctgaggtgtgaggatgacttgagcctgggaggtcgaggctgcagtgagccatgattgcaccactgtactccagcctgggtaacagagcaagaccctgtctcaaaaaaaaaaaaaaaaatacataaataaaataaagtgtcagagatttgtggaaaaataaaacataaacataattagagttccaaatatggtgaaagacatacaattacagattcaaggtcatagaacatcaagaaaaactaatacaggctgggcctggtggctcacacctgtaatcccagyactttgggaggctgaggcaggcaaatcacctgaggtcagaagttcaagaccagcctggccaacatggtgaaatcccatctttactaaaaatacaaaaattagctgggcatggtggcgcacgcctgtattcccagctactcaggaggctgagcaggagaatctcttgaacccaggaggcggaggttgcagtgagccaagattgtgccaccacactccagcctggatgacagagtgagactctgtctccaatttaaaaaaagaaagaaagaaaaactaatacaaagaatacatccaggcatatcatagtcaaactatgatgaagagaaaatcttgaatgcagccagactgaaacaccgtatataggagaacaacaattagaattaccactgacctcatcagaaacagtggagaccagaaggcagtgcaacaatatcttgaagaataataattacaaaaactttgaaccaagagcttcaaggccctgtgcatagcctgtcctcagccttcactcyagcctcatctcacccactctccctcctactctctgcattgcagtcaccaggacctttgtagtcactgttccctctgctcagcaggccttcccctcctctgccctccagccttcctggataccccacctagtgtattatctcagttactgactgtcataaaatccctgttttcttcagagcacttagtccattttgtcattatgtatctgtattagtccattttcatgctgctgataaagacatatctgagactgggtaatttataaagaaaaagagatttaayggactcacagttccatgtgggtggggaagcctcacaatcatggtggaaggtggaaggcacttcttatatggcggtggcaggagagaaaatgagaaccaagcacaaggggtttccccttataaaaccatcacatctcgtgaggcttattcactattatgagaatagcacaggaaagacctgcccccatgattcaattatctcccaccggttccttcccacaacatgtgggaattatgggagctacaactcaagatgaggtttgggtggggacacagccaaaccatatcaatatccatttaattaacctctagctcatccactagactccatgagagcaggggtcctggctgtttcccattgccagcaccttacgcagaggctgccttatataaaataaaacaagtgttcaatcaatatctgctgaaggaaggaagaaatgaaggaaggttaccactatttttatcagtcatcatttcgtacctacttacaatcacttagcttctctttgttctcccaggaaatcagaaacagctttagggttttccacttctgctggtatgaagggcaatcaaaatcaagaaccagaacaagccagtcctgtgagttcatgtcatctaattgacactcgtttaaaaacacagcacgcatgtaatgacatgtgaagccaggaccctatggtggtccccatattttttttccttttagtttaatgacccttgaaaatcaatggtataaatcatgattattgagctcctgaaacccatatttagccacgtccttctctgggagtgttctctggtttgtctaacctactctttcctgaaagttcctattgcttctatagtcaaaatcactatttagaacaatgcatttaatctttctaagcctaaattttcttatttataaaagggagctaataatagtaccaacttcatgtaatcgacatgcttaaatgactagtccagtgcctgatcaataataaatgcttaataaaaagtaactgtcatgattttattactttttgatcccttaagaaatctagtatagtgctacatatacagaatagatacccaatataaacaataaaagtttaatttttttactggttactgcattttagttatcatttaagtcattcaaaattgataactcagccgggcatggtggctcacacctgtaattccagtgctttgaggggccaaggcaggaggatcacttgagtccaggagtttgggaccagcttgggcaaaatcatgagaccctgtctccacaaaaaatattttaaacaattttttaaaagttagctagctgtggtggcacatgcctatagtcccagctacttgggaggctgaggcaagatcacttgagcccaggagttcgacgctggagtgagctatgctcgtgccactgcactccagcctaggtgatacagacctcgtctcttaaaaaaaaaaaaaaaaaaaagatactcaagatactcatgttggtatacattataacactttattactaagaattaataacctcaacatcccattccctcatgtcaagtaactggaatgaatgtttattaagtattctttaatcaatgatttaagcatatatttgcaaggtttcagcagttccctggaaaacttaagctctaaaagggtactgactatggctggatctctaagtgccacagagtggactgcttaaaagatagagctcatgcctgtaatcccagcactttgggaggctgaggcaggcagatcacgaggtcaggagatcgagaccatcctggctaacatggtgaaaccccatctctactaaaaatacaaaaaattagctgggcatggtggtgcacacctgtagtcccagctactcaggaggctgaggcaggagaattgcttgaacccaggaggtggaggttgaaatgagccaagatcacaccattgcactccagcctgggtgacagtgagactctatctgaaaaaagaaaaaaaaaaaaaaaaaaaaaaatggaactcatccaactcagtgtctggaaatcagcaagaacttaacaaatgtttggtgcattgaattaagttgagtccaccttgagcattcctagagtccgattcttccattttcccttccttgaacatttgaatgtccaattttctgcagaattagatcctagacaggaatgtgttaaatacgtgcgcagtggggtatctctcatgtcttcttacctaggactatcaattaatacatatgtagttataatgatccagtacgcacaaggaagacaaattcagtgtaattcactcttttcttcatcatgtggcaccaggactgaagtctccaaaactaaaatgaggtcaaaagttcttataaagccaatataatctgtttggctttcaattgtgtttctcaaaatcaaatctggcagaagcacatgtcaaaatcttccccacagagtataaattctggtgttttttatgtaaagcaaaaccaacaataaaaaaaaaatctgagcaaattacgtgcagacatagaacatggaaataactaagcttcttcctgaactctcccaccctactcaatactcctccttcaaggtaattaatgtatactgaatttggcataaatttggtaataataaaataaatattgactaaatatctactgtgtgcccatctctctttctctgatacccagagaagatcctctttgatttgggatgactcggggtttcccataccgctcaagtgcttacggtggttaaatcatttaaacagattctgctactggttatgtgggcaagtggctacacctgtgatgctttgattttaaaacaagaaggatagtacctgataaaatatttaaagtcagcaccaacttactaaaattgctatttcaatagctagatttgcaggatcttggtattaaatttcaaatacaagaccatgtaagttaaaaattaggataaaaagtgcagtaattaccatacattagaaatataactcacagagcaaagaagcttgtaatgagccagttgatccagaaagtgtaggcacagtggtgctataatgaatgagggatgggtgactaaaatcaatgcacttacatttcattcctttcccttatactgaaatattctcatatcaccactaaagcagcacatttttatgtattttttgaagctgagaaacatgctggagtttcctgcgttacagcctcagtggatgacatacagtttgaggagacagctaggtaagtgacattgctccatggctcctttctcctgggtttgtgggttcatctgggacatgtattggtggcacctgagcttattcaggcagaggtagtgatcttgtttcttaataaaataaataacatgtgacccaatttaggtaagtaaaaaaataatcatagggcctacttataagaaacactcttaagtgtaacttcacagtctcaattttgtggagaaatagctctcagccttagatgcattgtggcataaggcataacagccaaacagactttctataagctcctttttttaattgtctcactctgctgcccagactggagtgcagtagtgtgatcttggctcactgcaacctattcctcctgggctcaagtgatcctcctgcctcagcctcccaagtagctgggactacaggcacatgccaccatgcccacctggctaattttttttgtatttatttatttatttatttttagagatggggtttcatcatcttgtccaggctgatttcgaactcctgggctcaagcgatccacccactggcttcccaaggtgctgggattacaggagtgagccaccatgcccggctactataagctaattattaacatccccttcctgtactagaagaataattaatgataataagtatctttataatggtgaatttcatcaggttgttaggtaaacactaattcatctgagtagagagagtaaattatgaaaaacattttatgtgtgaaagttcttaaccatcttttactgtagaaaatttcaagatacacaaacatttcaaacatacatatttaggttggtaattgagaaaactgcgattacttttccaccagcctataaaacaagagaggatagtacagtgtatcgcaaggacccttcacccctagctatagcaattatcaactcacagacactcttgctttatcaatacctctccacactcccccatatgcctggattgttttgaggaaaaccccaagcatcatctgtaaatgtttcmgtctatacagtcatgcatcacttaatgacgggatatgttctgagaaatgcatcactaacgacttcatccttgtaggaacatcatagagtgtacttacacaaacctcaacagtacagcctcttacacacctaggctatgtggtatagcctattgctcctaggctacaaacttgtgcagcctgttactgtactgaaaactgtaggcaattataataacatggtgactatttgtgtatctaaacatagttaaacattaaaaagatacagtaaaatacagtataaaagatgaaaaaatggtacacctggccaggygtggtggctcacacctgtaatcccagcactttgggaggcctaggggggtggatcacctgaggtcagcagttcaaaaccagcctggccaacatgaaacccygtctattttgtactaattttgtactaaaagtacaaaaattagccagttgtgatgacgggcgcttgtaatcccagttactcaggaggctaaggcaggagaatagcttgaacctgggaggcagaggttgcagtgagccaagatcacgccaatacactccagcagcctgggcgacaagagcaagactctatctacaaaaaaaaaaaaaaaaaaaaagtacacctatgtagggcacttaaccatgaatggagcttggaaggctggaagttgctctgcaggagtgcaggagtcagtgagtgctgagcaaatatgaaggccccagacattactgtacactaccttagaatttataaataccacacacttaggctacaccaaatttataaaaatatttttctttctttaattatgaattaaccttagattattgtaacttttttactctataaacttaaaaaaatctttttgattcttttgtaataatactgagcttaaaacacaagccttttatagagctgtttaaaaatatttttctttatgtccttaccttattctataagctattttctgtttttaaaatttgttattttttttttttaccttttaaacttttttattaaacacaatgacacaaacacatacattaccttaggcctacacagggtcaggatcaccagtatcactgttctgcttccacatcctgtcttactagaaggtcttatgggatttattaaaccaggattcagtataggtgataggtctcttaagtgtcttttaacataaaatgttcccttccttcttttrtctygcaatttattttttaaagaaacctggtcatttgttttatagaatttacatccactgtagccttgattaatgtgttctcctgtcctttgtatttcttgtaatctgacagttacatctaaaaattgacatgatgaaggtttgattttgttttttctttgagatggagtcttgttctgtcacccaggctggagtgcaktggtgcgatcttgactcactgcaacccaggttcaagcgattgtcctgcctcagcctcccgagtagctgggactacagggcagctgccaccatgccctgataatgtttgtatttttattagagacagggttttgccatgttggccaggctggtctcaaactcctgacctcaggtgatccacagtgctgggattacatgcgcctgccaccacgcccggctggtgagggtttgatattcggtaaaaatttctcatgtcaaggccatatgatatctaatgatcatagactacaaccattctgtcattagatattggaaacatggtaatatgctaattctatcatttcttcttcatttattttctaaaatacttctctagagggaaactctcactaatgacctgagtatcctgaggaaaagtttgttcaggaaagtcttgactctttccctttattcattaagagcctatggattttcatgtacttgatgtgttacaattcatccatgttattcttcttctttttttttttttgagacagagttttactgttgtcacccaggctggagtgcgatggcgcaatctcagctcactgcaacctccgcctcccaggttcaagcgattctcctgcctcagcctcccgaagtagctgggattacaggggcctgccacaacacccagctaattttttttgtattttttagtagagatggggtttcatcatgttggccaggctggtctcaaactcctgatctcaggtgatccacccacctcggcctcccaaagtgctgggattacaggcatgagccactgcgcctgggcaatgttattattcttacagaagttcagactgccccatctttgagcagtgggagcttcttcagtttaatccctaagtcccttgaacaaaagcccaaagttaaaggtgcttaataactccttggccttctggtataaaatgtttcagtctcatcttttacattttcccccacaaacttagaatccattatttctccaaggagtcctgattccttgcagtagaaatgagaagtagagaccacaacctgggcaggaaaggtgcacatcacatcaaaatgggcattcgttctcggccttttcagcggacagaattagaaattatgtatttttaaagcatttaaattaataaactgcaataatttagggttatatggttttacttaatttctttgattttatgtctatatctctgagttttaattttattttatgctgaatatcatgatatttaaagacataaacttatttgattgaaattaatatgtatatacacattaattagattcagaataacagtaccaatattatcactaacaaatgaatagagaaagtagcttaagattatttatgcagtttctttctcaaactgtatctcatctggtacagccaagtcactgtattttgaagtcatttgaaataatcattttccatgtggttaagctactgacttcatacattcttaagttcatttgtttaatttgctttttattttgtaggaatgacttttattttcatttaattttgttttatagtttaaaatatctacaggtaccagagtcaaatctggaaaacagacccatttcaccctggggaaactggctcctccctaccttctgtctaggcccctccctctctttctatgtaagctttatttattttgtgctgtatccttcttttttttaatgtaaagaaatatttatatgtatccatgttattttaaaaataaatttcaacacactgtgtgtactcttctccacctcacttctttcacttaaaaatgaggtggagaaaagtatatatagtatataaaatatacactgtaaaatatgtagtatttccatctagaaaatcactccataccaatatgcagttatgtgctgcatagcagcattttggtcagtgacagtggtcccataagattttaatactggccgggtgcaggggctcacgcctgtaatccctgcactttggaaggctgaggtgggtggatcatctgaggtcaggaattttgagaccagcctggccaacatgatgaaaccccatctctactaaaaatagaaaaaattagctgggtgtggtggcacgcgcctgtaatcccagctattcgggaagctgaggcaggagaatcacttgaacctgagaggcggaggttgcagtgagccaagattgcaccactgcactccagcctgggcaacgagagcaaaaccccatctctaaaaaaaaaaaaaagrttttaatactgcatttttactgcatcttttctacatttagctatgtttggatacacaaatacttaccattgtgttacggttacctacagtattcagcacaataacatcctctacaggtttgtagcctaggagcaataggctataccgtatagcctaggtgtgtaggaggctataccatctagattagtgtgggtacactctatgatgtttccacaacaacaaaatcacctaatgaagcatttctcagaacacacccctgtcattaaactaggcataactgtaagtagatattcatcattccttttagtatctacatagtactccattgtggagacgcactacattwttcaactggccctccactgatgaacatttatattgtttccagtcttttgctattacaaataatatttcaatttgtagtcttgtgcagatgtatgtttgtttgtattttttccagtatatttgtgggatagatttcttttttttttttttttttttttctaagacagtctcactctgtcacccaggctgaagtgcaatggcacgatctcggctcactgcaacctctgcctcccaggttcaagcgattctcctgcctcagcctcccgagtagctgagattacaggcacgtgccaccacacacagctaatttttgaatttttagtagagacagggctttgccatgttggccaggctggtctcaaactcctgacctcaggtgatccacctgcctcaccctcccaaagtgctgggattacaggtgtgagccaccatgcctggcctttgtgggatagatttctagaaataggattgctgagtcaaagggtaaatgcatatgtcattttattaaacattgccaaattcctctccagagcagttgttatgtaggttttatcagttttcaaacttataaaattaagggttaataaaactgtgccagaaatttaaatttgttcagatttctaatataggaattaattgcttaaataaatatacatatgtatgtattattaaactctttacctccagtttttctgccaaaaaatgctacagattatgacaggtatgtagagtaacaatatgtgtgcaaaggctttaaccagatgcagtcactcttctaggtaaacccaactggttcatcttgtagactgtctttaatatatctgggccagatgcactggctcatgctgtatcccagcactttgggagtccaacgcaggaagatcgcttgaccccaggaatttaaggctccagtgagccatgattgaaccactgcactctagcctgggtgacagagtgagatatgtatatctgaacaagcctctctactatgattaaaatagtatgaattgcaattatttaccagaaacctgagtagggtaatgttgtcaaagctttggagccagataagaccagggtttgaactctgatcctgccagtcactatgtcaccttctaaggccgtttcctgatgggaatgaaatgggaatgataatgcccacctcatggggttactgctcagtgaatgacrtgttgttagattatgatacaaagcgtttagcatggtgcttttttttttattattattgtactttaagttctggggtacatgtgcagaacgtgcaggtttgttacataggtatacacgtgccatggtggtttgctgcacccatcaacccattatcaacattaggtatttctcctaatactatccctcccctagccccccaccccctgacagacccccgtgtgtgatgttcccctccctttgtccatgtgttctcattgttcaactcccacttacaagtgagaacatgcggtgtttggttttctgttcttgtgttagtttgctgagaatgacggtttccagcttcatcaatgtccctgcaaaggacatgaactcatccttttttatggctgcatagtattacatgrtgtatatgtgccacattttctttatccagtctatcattgatgggcatttgggttggttccaagtctttgctattgtgaacagtgccacaataaatatacgtgttcatgtgtctttatagtagaatgatttataatcctttgggtatataaccagtaatgggattgctgggtcaaatggtatttctagttctagatccttgaggaatcgccacgttgtcttccacaatggttgaactaatttacactcccaccaacaatgtaaaagcgttatttccccatgtactgtccagcatctgttgtttcctgactttttaatgattgtcattgtaactggcgtgagatggaatctcattgtggttttgatttgcatttctctaataaccagtgatgatgagctttttttcttatgtttgttggcagcataaatatcttcttttgagaagtatctgttcatatcctccgcccactttttgatggggttgtttttttcttgtaaatttgtttaagttctttgtagattctcgatattagccctttgtcagatggatagattgtagaaattttctcccattctgtaggttgcctgttcagtctgatgatagtttcttttgcttggcagaaactctttagtttaattagatcccatttgtctattttggcttttgttgccattgcttttggtgttttagtcatgaagtctttgcccacgcctatgtcctgaatggtattgcctaggtttttttctaggatttttatggttttaggtcttacctttaagtctttaatccatcttgagttaatttttgtataaggtgtaaggaagggatccaatttcagttttctgcatatggctagccagttttcctaaygccatttattaaatagagaatcctttctccattgcttgtttttgtcaggtttgtcaaaggtcagatggttgtagatgtgtggtgttatttctgaagcctctgttctgttccattggtctatatatctgttttggtaccagtaccatgctgttttggtgactgtagccttgtagtatagtttgaagtcaggtagcatgatgcctccagctttrttctttttgcttaggattgtcttggctattcaggctcttttttggttccatataaaatttaaagtagtttatccaattctgtgaagaaagtcawtggtagcttcatggggatagcattgaatctataaattactttgggcagtatggccattttcatgatactgattcttcctatccatgagcagggaatattttcccatttgtttgtgtcctrtcttatttccttgagcagtggtttgttgttctccttgaagaggtccttcacatcccttgtaagttggattcctaggtattttattctctttgaagcaatggtgaatgggagttcactcatgatttggctgtttgtctgttattggtgtataagaatgcttgtgatttttgcacattgattttgtatcttgagactttgctgaagttgcttatcagcttaaggagattttgagctgagaagatggggttttctaaatatacaatcatgtaatttgcaaacagagacaatttgacttcctcttttcctatttgaataccctttctttctttctcttgccggattgtcctggccagaacttccaacactatgttgaataggagtggtgagagagcgcatccttgtcttatgccagttttcaaagggaatgcttccagcttttccccattcagtattatattggctgtgggtttctcataaatagctcttattattttgagatacgttccatcaatatcagtttattgagaatttttagcatgaatggactgttgaattttgttgaaggccttttctgcatgtattgagacaattatgtggtttttgtcatcggttctgtttatgtgatgaattatgtttattgatttgtgtatgttgaaccagccttgcatcccagggatgaagctgacttgattgtggtggataagctttttgatgtgctgctggattcggtttgccagtattttattgaggattttcgcatcgatgttcatcagggatattgccctgaaattttctttttttattgtgtctctgccaggtcttggtatcaggatgatgctggcctcacagaatgagttagagaggagtccctctttttctgttgtttgaaattgtttcagaaggaatggtaccagctcctctttgtacctctggtataattcggctgtgaatccatctgggcctggactttttttggttggtaggctattaattactgcctcaatttcagaacttgtcattggtctattcagagattcgacttcttcctagtttagtcttgggagggtttatgtgtccaggaatttatccatttcttctagattttctagtttatttgcgtagaggtgtttgtagtattctctgatattagtttgtatttctgtgagatcagtgatgatatcctctttatcattttttattgtgtctatttggttcttctctcttttcttctttattagtccggataggggtctatctatttgctgacgttttcagaaaaacagcttctggattcattgacttttttgaagggttttcatgtctctatctccttcagttctgctctgatcttagttatttattgtcttctgcttgcttttgaatttttttgctcttgcttctcttgttcttttaattgtgatgttagggtgttgattttggatctttcctgctttctcttctgggcattcagtgctataaatttctctctacacactgctttaaatatgtcccagatattctggtacattgtgtctttgttctcattggtttcaaataacttatttatttctgccttcatttcattatttacccagtagtcattcaggagcaggttgttcagtttccatgtagttgtgtggttttgagtgagtttcttaatcctgagttctaatttgattgcactgtggtctgagagactgtttgttatgatttccgttcttttgcatttgctgaggagtgttttacctccaattatgtggtcgattttagaataagcactttgtggtgctgagaagaatgtatattctgttcatttggggtggagagttttgtaggtgtctattaagtctgtttggtccagagctgagttcaagttctgaatatccttgttaattttctgtctcattgatctgtctaatattgacagtggagtgttaaagtctcccactattattgtgtgggagtctaagtctctttgtaggtctctaagaactttctctatgaatctgggtgctcctgtattgggtgcatatatatttaggatagttactcttcttgttgaattgatccctttaccagtatgtaatgtccttctttgtctcttttgatctttgttggtttaaagtctgttttatcagaaactaggatgcaacccctgcttttttttttttctttccatttgcttggtaaatattcctccatccctttattttgagcctatgtatgtctttgcacgggagatgggtctcctgaatacagcacactgataagtcttgactctatccaatttgccagtctgtcttttaattggggcatttagcctgtttacatttaaggttaatattgttatgtgtgaatttgatcctgtcattatgatactagctgattcttttgcctgttagttgatgcagtttcctcatagtgtcaatggtctttacaatttgatatgtttttggagtggctggtaccggttgttcctttccatgtttggtgcttccttcaggagctctcgtaaggcagccctgggggtgacagtgtctctcagcatttgcctgcctgtaaaggattttatttctgcttcgcttatgaagcttagtttgcctggatatgaaattccgggttgaaaattcttttctttaagaatgttgaatattggcccccactctcttctggcttgcagggtttctgcagagagatccgctgttagtctgatgggcttccctttgtgggtaacctgacctttctctctggctgtccttaacattttttccttcatttcaaccttggtgaatctgacaattatgtgtcttagggttgctcttctcaagaagtacctttgtggtattctctgtgtttcctgaatttgagtgttggcctgtcttgctaggttggggaagttctcctggataatatcctgaagagtgttttccgacttggttccattctccccatcactttcaagtataccaaaccaacgtagatttagtcttttcacawagtactatatttcttggaggctttgtttgtttattttcattcttttctctcttatcttgtttctcactttatttcattaagttgatcttcaatctctgatatcctttcttctgcctgattgattcagctattgatacttgtttatgcttcatgaagttctcgtgctgtgtttttcagctccatcaggtcatttatgttcctctctaaactggttattctagttagcaattcctctaaccttttttcaaggttcttagcttcctttcattgggttagaacatgctcctttagcttggaggagtttgttattacctaccttctgaagccttcttctgtcaattcatcaaactcattctccatccagtttttttcccttcctggcacggagttgtgatcctttgaaggagaagaggcattctggtttttggaattttcagcctttttgygctgttttctccccatcttcatgggtttatctacctttggtctttgatgctggtgaccttcagatgaggtctctgagtggatgtcctttttgttgatgttgatgctattcctttctgtttgttagtcttccttctaacagtcaggcccatctgctgcaggtctgctggagtttgctggaggcccactccagaccctgtttgcctaggtattcccagcagaggctgcagaacagcaaagattccctcctgttccttcctctggaagctttgtcccataggggcacctgccagatgccagccagagctatcctgtatgaggtgtctgtcggcccctactgggaggtgtctcccagtcaggatacacgggggtctgggacccacttcaggaggcagtgtagtcccttatcagagctcggacgctgtgctgggagatctgctgctgtcttcagagccatcaggcagggacatttaagtctgctgaagctgcgcccatagccaccccttcccccatgtgctctgtcccagggagatgctgcctttttttcagagatgccctgcccagagaggaggaatctagagaggcagtctggccagagcagccttgctgagctgtggtgggctttgctcactttgaacttcctggtggctttgtttacactgtaagggtaaaactgcctactcaagcctcagcaatggtggacgcccctcccctcaccaagctcgagcatcctagtttgatctcagactgctgtgctggcagcgagaatttcaagccagtggatcttggcttgctgggctccgtgagcgtgggacccgccaagccagaccactcggctccctggcttcagccccctttccaggggaatgaatggttttgtcttgctggtgttccaggtaccactggggtatgaaaaaaacactcctgcagctagctcggtgtctccccaaatggccgcccagttttgtgcttgaaacccagggtcctgatggcctaggcaccggagggaatctcctggtctgcgggttgcaaagaccatgggaaaagctcagtatctgggccagagtgcaccattcctcacagcacagtccttcatggcttcccttggctaggggagggaaatcccctgaccccttgcacttccctggtagggtgatgacccaccttgcttcggctcaccctccatgggctgcacccactrtccaaccagtctcaatgagatgaactgggtacctcakttggaaatgcagaaaaatcaccccccttctgcatcgatctcgctgatagctgcagactggagctgctcctrttcggccatcttgccagcaaatcccatggtgcctgatttacacacaacattcagtagagagtagtcattgttattagtatggccacactgagaaacattaaatttcatttaattaatgacagggattttttattgttaatgaattatcaataattccttggtaatcttttgggctttatctatttacatcccagcatcccaaggaaagattggtctccttgaagtcagtagttttgtcttattcatcactgtatctttagacctggcttaatgccaggactactcagtaaaatgccaattaactcagtaaacattagtgaaatgtataagtcagaaaaataaacgatgtttttaggaagtttgaattgaagaaaagaaaagcaacttgagatagaataggtttgagagaaaaattttagaaargagaagctttgagcattgtcatagactgatggagattcagggaagaggcagagattgaaggcagaaaagagarcagagctgatgaggcagagccaacaagggaggggacagggccactggaggatgggaccaatggcacaggtaaagaaagagattaggtctcaagagatccctctttccctgaaacagaagagcaaagagaaaggtgcaaatgcagtttaacattgaagttaaggaagaaaaatccagggggcttctattgggttacctcttaccttctgctaaggggaaggaattagagctgactgaagggcctgaatacaaaagttttggaacaacttcaggttacatgatcgaagtttcaataatagtaggaagtgagtagaccacctagcatcattgagggcccatacaaacctactgaagctgatcagtttgcttgcttgcctttttgtatatttgtccatttatgtattaactaacattcaaaaataaataccagctgtatagatttgctggtgtattttccttaacttctcttggggaaacagctgctgtatagtcagtatgtgttgccgatttggagtcatgtcgcacactatctctgcaaagtctcttttctgtttaaatattggtggtccgctaacaccataagtgtggtttacagttatcggcctttgtttttargtgttgtctttttccattatcattaacctgaatttcscatgcatgaaaattatcagcatgataaggtggaactgctttatggcatgcatttaagtaatcttyaagtcttatctgaaatgaartgtgctaaaactactgaggtttttttgtttgtttttccctagagttggacaagttataaccatcaaagcaaaagttactagagcattcagcacaagcatggaggtaagaggcaccttttcaaacatctgcctgttggtgctcacttcttcattgtttacaaagggtagagcaggaggcctagactaatatttggagttagtgagattctctatttcasaaggctctggaatgtgtagtcaggtcacaggtaaataataagcagcagatgtttccactgtttcccagctaaaattcaacatggccaggcatggtagctcacacctataatcccagcactttgagaggctgagacaggaagatcacttgagaccaggagttccacaccagcctgggcaagatagcaagacccaatctttaagaagaaaaaaaaaaattagccagcacagtggtaagtgcctgtagccctgggtactcaggagacggaggtgggcggattgcttgagcccaggagtttgaggctacaatgagctttgattgtaccacaacattccagcctgggtgacatagcaagactttgtctcttaagaaacaacaacaacaaaaaaaaccaacacatttaaacatgatacagtacactatttctacatagaaggatatacagaaagtaaacctgcaagagaaaaggacagtcttaattctttataaagcatggtttttatttcttaattatgctgactctactattattctaattctgtttgttctccatcccctcaacctctgacagaaactagtcccatgattaactagttttttaaaagcaggataactggactttagtaagaaggtaaatttagaagatttttattctgcatccacttgattttattttctctaccattgtgaatactggattctcaggggctcttgagatctcyattcaggttaaattagcaggaaaggagttgctggatctcatattgtacctcccaggttgctcaggatcagtcccttcaatctctgggcatgaagacatggaagagtttgtattcatttgttagggctgccgtaacaaagcaccacagactgggtggcctaaacacagaaaagtagtgtcccacggttctgggagctagaagtcctacatcaaaatatgggcaaggatggtttctctgagggctggagggataatctgttcatgccgctctcctaccctcccatggctctctgtagtctttggtatttcttggcttccactgcatcacccgatctctgccttcatcttcacgtgttctccttgtgtgggtgtctgcttccaaatttcccctttttataaagatatcggtcatattggattaggggcctgccccaccgcagtctggcctcatcttaactaattacatctgcaacagtgctatttccacatttacattctaaggtactgggggttaggacataagaatttggaagggggaacacagttcagttataacaactgttttgacagtaaccatgccattggtggtggctttaccctgatgtggtcactttctttttttttgtttttgcttttgtttttgagacagagcctcactctgttgccaggctggagtgcaatggcaagatctcggctcacggcaacctccgcctcctgggttcaagtgattctcctgcctcagcctcccgagtagctgggattacaggtgcatgccaccactaatttttgtatttttagtagagatggggtttcaccatgttggccaggatgatctcaatcttctgacctcatgatctgcccaccttggcctcccaaagtgctaggatcgatcacaggcrtgagctactgtgcctggctgatgtgttcactttctagcagtatccaaataagcagaatacaaagcacttgaagaaagcagaaaggaaatgtcgtgaagaaaacaagctctgtcagcaaatggtgtttctggagcgtttattcaactgtggggctcttagcctttgcacacaggagcctctgggcttggcctgtctcctgagggccacacattctcctgatagacagtccaaatatagataaawcctcctttacatttctccttttcctcctcttccctaagacaggctagaatttctaaaggaggcttatctaaaagctaagaaaacaaaagtaaaacccagtgagtttgaaaccacagatttctgatgctggggaaagtaaaccctagcctccactgactttccaggcctgatccgccgtgcagaattttgttctctttcatcttctgcaaatcatgaccaggcagcctctaaattttgtcatactttctaccacctggtagaaatttcttggatttttttccttaaatatagatgccaactaaacatttttatttttactttttcaaactggacatgtcctttagcgtcttcctgttcaatttcagtttcctgccacaactgaggccagccctctgctaatttgctgagcagaaataaatgactgacttctccctgaatccaaagcaagcaggaactctgctstgtgccaaacctacttccaggggattctcagactctactgatcagtctcttccctcttcccacctctggaaggtgtgtgatgcattactattaatagatgatattgtctcatttgcactaagagcacattatatgagtgtgagtttttttttttttgtccttagaatatgtctttaagaatcagttttattgagatataatttacaacattaaaattctcccattttaagtatacattttgctgagctttgacaaagttatacagttggatcaccaccactgtaatatacaacgttcccatcactacatgaagcccctttatgcccctttgcaatcagctctctcagaccccagcttgtgacaaccactcatttacttcaggtcagtacccttttttttttcttttttgccctttactgtattttgtataaatggaatgatatagtatatataatttttgtgtctaatttattttacttagcataatatatttgatttctgctgttggttattatattattctcattctatttattttgggtttaatttgcctttctttttctagtgtcttaaggtagaatcttgggaaattgattaaacttttctttttttcaaatataagcatttaagatcgtaaaattttcttcaatatattgctttacctgcatcaaaatatgtcctttttttcttgtaaattcttccctgacctctagtctgtctagatgtgtgttgtttaatttccaaatctctgatgatttttccagatacatctttatgtttttgatttataatttaattcctttgcagagagagaacataatttgtataatttcaattattttaaatttatttagacttttttaatgacccaaaatatggactattttggtgaatgttctatatgtgcttgaaaagaatgtgttgcttatagtcaatgaagtattctgcagatgtcagttagcctaacttggttcacagtgttgttcaagtcttctgtattattattattattattttttgagatggagtcttgaactgtctcccaggctgtagtgcggtggtgcgatcttggctccctgcaagctccgcctcccgggttcaagtgattctcttgcctcagcctctcaaatagctgggattacacatgtgcaccaccacgcccagctaatttttgtatttttagtagagaaaggatttcaccatgttggccaggctggtcttgaactcctgacctcaggtgatctgttcaccttggcctcccaaagtgctgggattacaggcatgagccaccgtgccctgccaggattcttaactcttcctgatgttgtgacccttttatcattatgaagtttgcctttttatctctggtttttgttttaaaatctactttgtctgacattaatttagccagacaagctttctttggtttagtgtttttttccccatcatttttctcttaacctgtctttttgtacatgtaagtgggtttcttataaacagaatatatttggatgctatttttttatttattctaacaatctctgccttctacctggagtatttaaactatttacatttgattatctatatggtagagttgaaatctatcatctggctgtytgtcttctatttcttccatctgttctttgtttcttcctgtccccatcttttcctgcattttttagagcagagtaatttttagtaatccattttatctccactgttggtgttttaactatacatatttgttttggttttaatgtttttctcgggtttgcaatatgactacttaacttatctgagactaccttcgaataatataatatccctttgagtatagtgtaataaccttataacagtacacacacttcccttcccatgtcccagcctttgtgccgttattgtcatgccttttacatgcacatatgtaggaggtaaaccctacaatacatagttattatttatgttttaaacagtcaatcatcttttaaaaagaatagaaatgaaaagaagtattttatatatatacccacatatttgccatttctggtgttctttattcttttgcgtattgtgtatctccagatgtctccctagtgtcattttccttctgtctgaagatattcctttagcatttctttttcagcttttgttcgtgtaaaaatgtgtttgtttcatcttcatatttaaaagatgctcatattcagtaggtatagaattctagcctggcagcagacttatgtaaattatgatatggcttgggtttctagagctactggatctatggatttatagtttctaagaaatgtggattttttcagctattatatcttcaaacttttttcctgtcttttgtgctctctctccttttggactttatagagttttagacttcttgttagtgttccacgggtcactgatactgttcgtttttcttctttyagtcttcctttctcttcatgctacattctgtgtagcttcttttgtcatcttcagcttcactgactttttcccctgcattaactaaactgctgttaatcttatctggtttgttttttatttcagatgttgtatttttttaccttagaaagtccactttgatttttttatattttccgttctttcctcattattttcatctttttctctatattaggagtcagcaaactatggcctatagacctgtttttatgaataaaaattttttgtagtacacccattaatttatgttttgtctgtgtttgctatcacagtacattgacagagttgagtagtggcaatagagtccatgtgaccacaaaacttaaaatatttactatctggccttatcctttaagaagatattgctgactccttttccaaatctctgagttcatggtgcttatatttaattgttgttttagtatcctttgttgttattccatcatttctgttatctgttgttttatttatattacctttcacctaataattttcttgcatctaatattttttactcgatgctgaacattgtgaattttatattgtttagtgctggcttttgttatatttctttaaaaagagtgtcagacttttcctggcaggaagatgttgttacttgcagattggtttgagcctttaaagatacgttttaaactcttctatggaagatttagaatactctactttagggctactttagcccctcttctaagttgggatcttctgttatgtctatgaaggtgttatatattcagtgaaatctggctggagagaactcaaaagatccccagctgtgtgtgagttcttggaattgtccatgttacagtttcccaggaattgcttgttcctcagaagctgttcttgtctggggtttcaccctgtatatggtccagttagtatcaacccaaagactcacaggcatatttctggaattctttctctttttttttagyttccttctctggtactctaacccacaaattttagctccattcaattcagcagagttaggtttttcttctctaacctaaccgtaaattaccttcagcctgagaacctgggaacgcagtgctctcgttgtttttcccgccttggggatcacagtcctgtgttgcctattttcgtaggtgtgaaagtagatgcttcctatattttgtccagttttctagttgttttcacaggatgtaattccaatcttacctaatctcttataacacaatgaaattctccctggcatatgtttttgaaacatttggtaatcacatataactaagttaactcttctagtagaagacagtgtttagaacttattttaacactccagaattgttgctttgtttttactgttaggtattttattttatttttcatttgtccatttctctaaaagcagaaagctgtgtgggattgagggttgagagttgggaatagatagtttaattttggctaatcatcatctagttaatttaggatttaccatgtaaatactaatttgcatttatgaattgagtgacttaaaatgagtcatagattattgattattctttttacatggtgtacacagtaaagatacagatacggatattctttatcgttgataacatagtgctgagctgtgcctgagatagctcattattttcagaagatagtattactcatctgaaatatgtagggaaaaggtttattagccagaatctaaagacragtacctgagtttaccaacacttctgcgaagtgcaatcctgaggaccaagcttcagcgctcttcacacagggggaaatctagcccattttagtatcaacataaagtgtctcagctaccttcttattactcctgaaaaattaatcacagaaacaaagctgtaaatacatgatgcaattctgtccgtgttagcttggttatgaaactctgagactatgctgcctagagacatttaaaaaaaggaaaaaaaactctsakagtaaaggctaaaaaagttatggtacatctctctggtggttttataaggcagacaccaatatcttgttttcaaaagcatatttagtaatcatgaaatttaaaagagctttcatataatgccaaatttttaaaaattggaacaggccaggtgcagtggctcacccctgtaatcccagcactttgggaggccgaagtgggtggatcatgaggtcatgagatcgagaccatcctggccaacatggtgaaatcttgtctgtactaaaaatacaaaaaattagctgggtgtagtgctgcgtgcctgtagtcccagctactccggaggctgaggcaagagaatggcttgaacccgggaggtggaggttgcagtgagccaagatcgtgccactgcactccagcctggcaacagagcaagactccgtctcaaaacaaaaaaaaaaaattagaacataaaactgtaaatacattacaataattttatatacacatgcatatatacacacacgtatttcatgtcatatgtatgtaatataaaatgtgtgtatatattatgtaatatgatattatatatgtgtatgtattatrtgatatgtatgtgtatatattatatatcatatatgacatcatatatatcatatacacttatatatcatatatgatatatagaaaaagctagaagaaaattcacctaaaatttaataattattatctctgggtgatgggattactgataatatatactctggatagtcagattccataaatttgacatggtaaataaataatttttataatcagaaaaaagctaattgtccagtgttatagaacatcattgaaataattctattgcttaaaaataaattaaaattctggtttcatttttaaaatgaaagaaggtaatggtgcatacatatgactaaattttgaatgctgaaatctgaactggccaagagtgtatttatttatctttttttcattttagatcagtatcaaggtcatggtacaggatatgctcactggcattgagaagcttgttagtgtggctttctccacatttgtagccaaaccagttggaaaagaaaaggtaaattttgtatgtgaagatgtatctagcrtgtaattcagggacatagtaacaattgcatcagaatgttatagaaaaaaatgacacttcttctttccatgagatatacttccccaagatttgttattcaccaatatttattgcaaaagttatcactctgtggtaacatcagaggaataggaactttacagaaaagtaccttagagaaaagacgatatagaaagtttgtaaaatacaaaaaaaaatccacattgttttaaatgatctgaaggtcatattggtttctttaaaatactgcctactggtttagtgcttttcatttgtggtcatataactcaaaattgacttaaaataaaatctttttttaaaaaagcaagagcaatttagcaagcagttgcatgttatagattaaccactgttaatacctgaaggaaaactgtcaacattgctgagttattgaagtttaaaaataagcttctgggcatgtggggtgaaaacaccctccgaagtgatactttggcctgatgagcttgcctagccggctgcctggacacgatccagatccactcatctggaggctgctggagatttgctccttacaatttcttggcttttttttttcagtgtcagggtgcctggaggagggtcccatttagtctaaacactgtgataattcaatctggaatatgagtctttcactccaaggatcatcccagagctagacacagtggcttctcctagctctactctgaagcaaggaggagtcatgttggtcaggttggtctcaagctcctgaccacaggtgatctgcctgccttgatctcccaaagttctgaggtgtgagctatggagcctggcctgcactctcagtctaacattaaacatgttgcaaggcaaattcatattgcccaagggtgttatttttcaaatggaagttcatatcagctaattctattttttaaaatgcagttttctgggccatatcatggacctactaaattagaatcactagtgtggaatcttggaatctgtactttgccaaagcatcccacggagcctgtgttcactaaaatctgagacactgagatagtcttcccaaccattctgtttttcctggcatccccacaaatctccagactcttggaagtgagagaataggggatgggtgcaggtgcccgtatctgagcgcaagtgacaaaggaatacaccttgcaatcccattccnnnnnnnnnnnnnnnnnnnnnnnnnnnnnnnnnnnnnnnnnnnnnnnnnnnnnnnnnnnnnnnnnnnnnnnnnnnnnnnnnnnnnnnnnnnnnnnnnnnnnnnnnnnnnnnnnnnnnnnnnnnnnnnnnnnnnnnnnnnnnnnnnnnnnnnnnnnnnnnnnnnnnnnnnnnnnnnnnnnnnnnnnnnnnnnnnnnnnnnnnnnnnnnnnnnnnnnnnnnnnnnnnnnnnnnnnnnnnnnnnnnnnnnnnnnnnnatataatagtcacacttcagtccaatctctcttgagactggagaactgggttctgaaagtggaaaatcagatccattatggtgctaacataattggttggttcagataaccttaattgtaaagcacctttccagactaacttatttcctagttgctaatatgctggttcagcagctcatcacaaagagacccatgaaaaatcagtggtttggtttgaacccataggactacttgaatttctgttcacagtgggtttattttaggatgaagttggttcaaagcataatgtacgctgattaaaaaacaaaaaagaaattggcaatgattaaccagacttagttcaacaattgcacaggccagatcattgaagggacttgcaagactccacagggtacactcatgcaaagccttactaagctaaagcagatggtgcggagggagaaagcaagcacaggccagcctcagagagggtggaggtctccaggcacagccatgctgctggggccttagtaacacaagatgtacttctgcagaacagaaatcaccaaaacatatgcgaggtatcttggtttcaggagaaccaacacacaagtttaccaagcagtcttgtataccctgctagtcacacaactaaaacaacactacaaaaattgttaaatcaggctgggtgcagtggctcacacttataatctgagtgctttgggaggctgagaaggaaggattgcttgaggccagaagtttgagaccagcctgggcaacatagtgagccctcatctctacaaaaaataaatataaaaaaattagccaggcatagtgacgtttgcctgcaatcctactgagaggatcccttgagcccaagagtttgaggttacaggaagctatgattacaccactgtgctccagcctgggcaacagagtgagaccctgtttcaaaaaaaaaaaaggagttaaaccagtgcatgccatcaatctacacattcctaaccaaattccacaaggtagtccagggcagttttggactttaagcagcatattataaatcaccagcttatttcttatttctttttttttttttttttttttttgagatggagtctcactctgtctcccaggctggagtgcagtggcatgatcttggctcactgcaacctccttctcctgggttcaagcgattcttgtgcctcagcctcctaagtagctgggattacaggtgtgctccaccatacccggttactttttgtatttttagtacagacagtgtttcaacgtgttggccaggtgcagtggctcacacctataatcttgaacacctgacctcaagtgattcacccacctcagccccacaaagtgctgggattataggtgtgagccaccacacccagggatcactagcttatttcatccttatcttggccaagggtccgtaccagactttgagtatcttggaaacaagcatggagctaccccagtccagcttcaaggtgacccttccttctacacacagggtcagcaaagggcatttatgtaagaatttgagctcttggttctgtnnnnnnnnnnnnnnnnnnnnnnnnnnnnnnnnnnnnnnnnnnnnnnnnnnnnnnnnnnnnnnnnnnnnnnnnnnnaagttggtgaaagctttattcctacatattgattcttttgttttgcttattagataatgttttcaccatgtaatgaaatttccaaattggtatcatggtataagataactttctctagaacatctttattccctctctttgctttcttaattttgcaaaatttattccctctctttgctttcttaattttgcaaagataggaaatgtttagatttcagtggagtcaaagtccatctcctcattcatcaatatgaataatttcttattttgtagttctgttgaaaaattttaaaatcagggaaaataatagagagaatttttaaagcacatatcttattgcatgaagaaataattacgcctatgttgatttttttagtttaaaaataatttaagaaaaaatttagtcataacatgtttagtgaaaacactcataaaagctctatttacttgagttagaaaaccatgtagcatatcatttgttttgcaaaattcatgctgtgcttttataatttaacaaggcaataaaagataaatgcttttctttctctagattcatttaaaaccagtcacacttctaactgaacaagatcatgtggaacataatctggctgctgagagaaggaaagttcgattacaacatgaagatacctttaacaatttaatgaaggaaagtagcaaatttgatggtcagtaaatccrcttataagaattttaattctataactgtgacaggcaaaggagtcttttcttagagcacacttattttcaccttattattaccattcagtcctggtgacactaggtatcctttccaacaaacccggtggctggagaagaaacctggccattgagaatgtaactgctgacacctaaggcctctttaaattggaagatctccaggaaaggagatggggaaaaagggtgacagggaccaggcagtcattagtaagcatgtattcactaatgatggctgaatgaagggttgatgacaatgccatacattgacacggtgcttcgtggcttactaagcagtttctcgtccacggtttcataggagctgcatgtaatctcaacagagcagaaagctgcaactctgagtaggaaagaaatttgctaaagatcatatggggtatgagcagagrcttaagatcctgctcctgttgcctggtgctttccacaatcaccctgcgttttatgagccacacttccttagttctctggcagtgatttcctgggctctttgatgcctcctggagccagactggtagggaaaggcagagccccgcccttgcccctcctctgccctttctttttgtctgaccctatcttctgaagccccaaggggtgccggtggagagcacaatgagggaggggaggaagtgaagtgagcccgcccaggccccacaagctcaccactgccaagagggcagaaggttcagcamcccttggctccaaaggaaggcaccggaagaagaggaaggaaaggagaggacaagaacatgtcagaacaaggatgtcaaaagagaaggagaaagagtgcatggaaaggccagaggaaagggagaggtagcagccagtatggcagaagtgcaaagcctttattctgccccaggggatatcctgggaccaccccacagaagacttacgggttgaaaaagagatttttcaaaggtttctactcattgctgacctttcaaagggcaatacccattaccaacttgatttttttttttttctttgagacagagtttcgctcttgttgcccaggctggagtgcaatggtgcaaactcggctcactgcaacctatgcctcccaggttcaagcaattctcctgcctcagcctccgaagtagctgggattataggcgcgtgccaccacgcccagctaattttgtatttttagtagagatggggtttcaccatgttggccaggctggtctcgaactcccaacctcaggtgatccgcctgcctcggcctcccaaagtgctgggattacaggcatgagccactgtgcccagcccagaccaagttatttttaaggaaatgaagacttcatcattaaatgacggtgttaagaagagcaagtctccgtttataaagctggtctcagcaccaaaatacatttcaaatgcatgttgctcaagtaatgaaatagctgaaccaagagaaccaagagaagctgctgaggcaccctgaggcaggtgagacaaccattaataaaaaacaaaaccctgctgtctcctcatcccttaaatcccaaggaagaaatgaaatgacagataaaatacttactaatgagcaaacccgttctatgcatgacaagtaaatctcttaggacatcttaggaaactcaagcatttaacacagtttttaataggcatatgcatttcccctagtttcattggtcttcctttctgcagttatgtcttttaaaaaagctttctgtcctcaatgaaattacactacctgagttcataaggagaaagtagaaataagccactaaacaaccagaattctgattgacaatgtcaaaatacagttgtttttcttcttcttctttttttttttttttttttttttgggagatggggtctcactctgtcacccaggctggagtgcagtggcgcaatctcagctcactgcaacctctgcctcccaggttcaagcaattctcctgcctcagcctccagagtagctgggactacaggcatgcgccaccacgcccagctaatttttgtgtttttaggggagacgaggtttcaccacattggccaggctggtcttgaactcctgacctcaggtgatccgcccaccttggcctcccaaagtgctggggttacaggtgtgagtcaccgcgcccagcaaggaacagttcttttgaaannnnnnnnnnnnnnnnnnnnnnnnnnnnnnnnnnnnnnnnnnnnnnnnnnnnnnnnnnnnnnnnnnnnnnnnnnnnnnnnnnnnnnnnnnnnnnnnnnnnnnnnnnnnnnctgctttcatcctctccaagtcatcccctcgtctgaatcacatctcaaggtcattctccacccttttgcccggaactctctagatcaagctgctgcccaccaggaagagggtgaccctgtgatgcgtgaggtgctggccagtttgccccggtgcatgctagatggagtgtgtgtgtgtgattgtggataaaatcattgatagtcatataggtggaaggactccttccctctcagcagcaaggaaagacttccacactgactggtagttccttccaacagttctgtatgaaacgcctgtcatgtgccaggaacctgcttgccactagaggtataaagatgaataatgcagggtctttgctcttaagaaacttgtagtttaktgctggagacagacatattaatagtttctaaataatatagtaagtgaatagagagctgtagactctaagtaatgtgggagcccagaggaagggcccttcagggttcacgagagactcgctgcaggaggggctatgagaagaaagttgggaaggcgaggaattgcgtagcagtgagggtgaaggcacggaggcatgaaccagcacactgtgtgctgggaagccaccaacacaagagtattgctagagagaaaatgcaaggtagagggaggcgggagaggaagaaggtaggattgtgtcatggaggctccctgggccatgtcgagaggcttggcctttcttctgttcttgatgggagccattgaaggattttgagcagggttggggcatgactgggtttgcacttaatatggtcactctggctagagggagagagaccaggcgaaaggcgaggggtgcctaaaccaggcagtgatagtggggagagacaggagggaaagagtttaaaaatacacacgagatcacaccaacaaaatagggtcaccgattggctgtggggagaagggcgaggaagaaggagcataggctgactcctgggtgtctgcttggagcagctggttagcagttgtgccatgaactgagatcatggatctgaggggcagggaacggcaatttttgggaggtagatgatgagttcagttttaggcatatggagtctgaagtgcctgtggacatccaaaaggaagagaccacagctggggagatttcatctgagagacaactgcttagagaagtagttcaaatgaagacaacctgcagcccacagggtgctgggccaagaacagaacctgcaaagcacaggcatctaagagaggatccagaaagacaaacctactaaggagacctggagggactaatcagaggggtgcagggagagctggagagagcagtgtcacacaccaaggcagcagagttacaagaagaaatagtaagtggtcaactgcgtcccaggaagtgaggaataaaacctgtctactggactgggaatcaggaaggcattggtgacatcggcaagtgtggggttagaagaagtgtgggagacacttggatgaccttaattacttagaggaataatgggatgagggacagtttaccataacctttatgtcatatacacaggccaaagtaaacactcctatcaccaggcttgtttgaagcacatgtacaaggatgcggggggtggggagggaagtagagctgcgagcctcatggccccaacagcccaagtgtcatctgttgcaggacatgtggacggtgagggacacagtggccattgcagctcttagagcagcttggctagttcagagcctttgcttttgtggaaaactaaggcattgtttcccacagcagcactagcatttagcaggaactcacttctctcaaggtattttccttcactccagccatccaaggtggaacttgctcctctctggcctctggacccagccccacaggaagcaggaggcatccatcggcccactcaacccaaaccatccaccctggagagagctacctcctcccaccggacttactcctaaaggcgaattgctaggagctggccctatgcattggctcatctttttctcatagtcagtggttgccccagcacaaagctgctctttttattttcttatccaacgctttttttatccaggtctgtaaccaagtcctctgacttggcagaaccatccttctgctctctatctttgtgagttcaattgttttgatttttagattccacaaacaggtgagaacatgtgatatttgtctttctgtgccctacttcttttgcttgacataatgacctcagttccatccatgttgttgcaaatgacaggatgtccttctgtgttatgctgaatagtactgtaacaggtctataaccaaaacctctgactttgcttttctcagcttgccgaagcaaggtaaataataaacaaaacgagaactgtaaaatgggaataataaaggtacttacataatgggtttatgggagcattaaatgagttaatatagaaagtgtcaggcatgcagaaagtgctgtcatttctattattgtttgagaggtcccctccacaggaggaattagagccaagagttaaagacagatgcttctcaggaactatgctgtaaaggatgaaagaaatagcctggagctacaggagaccctcaaagtcaaggggcattgtttttcaggctaggagaaatttggtcatggttccaggctgatcaagatgattgatgaggcctggcggtggcttatgcctataatctcagcactttgggaggctgaggcaggcggatcacttgagatcaggagttcgagaccatggtgaaaccctgtctctactaaaaatacaaaaattagccaggcgtggtggtgcactactgtaatcccagctactcaggaggctgaggcaagagaattgcttgaacccaagaggcggagtttacagtgaaccaagattgcaccactgcagtccagcctaggccacagagccagattctgactcaaaaataaaaaaaaaaaagacataattgataaaaataattattgaggaagaagttaattataaaagaaagagataattcatgtcaaatctgtactttagacactgggaaattgttgtcatgtttttatcttggaggaatggggatctctgctaccctgagctcccttgcgagggttcgtctattgggaagggttgctaggatggtgactgaagctgtcttcacacccccctcaaggtaacaagagccaggtaaacatgggtggctgcaccggcttcttctggtgttgtgcaagttgcactaataagtgaaatcagcagcagacaatttgtctgcacaacactaayagtactttgartactggagatagtctaaattagtgacaggcacacatgacagtcattcaaatatagagataaaacgattgcaattgacttgagtttcagtgtgttacaaagttggccagattagatctacatctacatgtctagttcawagttcaatttcaaattatagatttttctcaaagtcttcttttatcatctgctttgtttaatctgccctaacttattctacatcctttcacataaaacaacttttaacctaattccactgatctgattttgtttttggaaattttactaacttccatgccagcaaaggtgccagagaacttawaagcaattcatcttaaagaatgcaagagccagactctgacatttaaagccgctgtgtagtatgtgatttctccacctgctgctccttagatcagatggagttggtttttgataggacattgtgtgttctaaaagaagagaaccaacccatctctgttcttgtaccatgtttttagaaaaccaggggtttgtgttggttataaatatcaaacataaaagattggaatatttttcaagatgttgtatgatggaaatgcatattattagaacagtgagaacattgaatccagatcatatcctttcggaagaaaagaaaagagatgagattagttttgtaaaagcaggatatttctggaatgtgtataagcacgcacatctcagaaatactactggatcattatttgcaagcttgacatataggggaaaaacttaaaatttgaaagcattttaatttaatttttgagtaagaaaatcagatcttaagagcattatcatggttaattttctggatatgcagaaagaaaactagggctagcatgacctcaattcaggtcaaagttcctgatctacaaatgtagagtgaatgtaaagttgtcaaagcaggttgatgacacagtactttaagaacatccaaagtacacgtattgaacttgatcactcaaagccagcagaaagggtgagttctgtttacttaacccaaaccagaactgcgagcctgaattgctctctgaacctgggaaaaccctatttttttcgttggttgtaaattaactccaaataagcaaacttctgcaccaaagtcatctaactcaatatatttctgcatacgtatcatagctgatgctggtgcacgtataatctcacctagcacctccctctacaggttccagtatatactgtatatgtcttcataggaagtatgtggtttctctttaaagttatccctcagaaaagaaggagctgctttatatttgagtctttacaatgtctctcrtaaggccttctcttaattttttatttataattatctaaaaactatttttaaagagatagtacatgcacagggtaaaaaatgcaaaacgcataaaaaggcatatagttaaaaagtaagtctgcctaccgtctcacttcccaccttcagagaccgtcactatcacacacacttcaatttttgtgggtacacagtaggtgtatatatttatgagatacatgaaatactgtgatacaagcatacaaatgtgcaataatcacatcatgtaaaatggggtatccactccttcaagtgtgacaaacaatccaatgatactcgttatttttaaatatataattaaattattattgactgtagtcaccctgttgtgctgtcaaacactaggtcttattcattctttctaactatatttttgtacccattaaccatccccaccctcccactacccttcccagcctctcataagcatgcttctgctatctccatgagttcaattgttttgatttttagctcccacaaataagtgaaaacatgcaatgtttgtcgtttgtctttctgtgccttatttcacttataatgatctccagttccatccatgttgttgcggatgacaggatctcattcttttttatggctgaatagtattctgttgtgtatatgtatcatattttctttattcattcatctgttgatagacacttaggttgcttccaaattttagctattgtgaacagggctgcaacaaacatgggaatgcatatatctcttcagtatcctgatttcctttcttttgggtgtatacccagcaatgggattgctggatctgatgatagttctgtttttagtcttttgaggaacctccaaactgttcttcataggggttgtactaatttacattcccaccaacagtgtatgaaggttcccttttctccacatccttaccagcactggttattgcctgtctttgggataaaaggcattttaactgaggtgagatgatacctcattgtagttttgatttgcatttctctgatgatcagtgatgtcgatacctttttatatgcctgtttgccatttgcatgtcttcttttgagaaatgtctattcaaatctttggcccattttttaatcagattattagatttttttcctatagtgctgtttaagctccttatatattctggttattaatcgcttatcagatggatagctttcaaatattttctcccattctgtgggttgtctcttcactttgttgattgttttctttgctgtgcagatgctttttaacttgatgtgattccgtttgttgatttttgctttggttacctgtgcttgtggggtactgctcaataaatttttgtccagaccaatgtcctagagagtttccctgatgttttcctataatggttttatagtttgaggtcttagatttaagcctttcatccattttgatttgatttttgtgtatggtaagagatagtggtctagtttcattcttctgcatatgagtatccagttttcccagcaccatttattgaagagattgtcctttccccaatgtatgttcttggcacctttgtcaaatatgagttcactgtgggtgtgtgaatctgtttctgggttcccagttctgttccattggtctatgtgtctgtttttatgccagtgcctggctgttttgcttactacractctgtagcataatttgaagtcagataattgtattaatttattttaaacaaaaaatgtgccatttgagtaagtaacattagcctgaaaacaacctcaataaatactagtttgggatatgtataaaacatcttcaaataaaatcaattttagaaagagagagaaattgaaagggattaagattgtgtatttctttcaaagatcactttagaaagtgattccattttgattctagcaatatagtggattcattgttgggtaaaaccaaaaatttctggaaaaatatttacaaacatctttgcaaacacatctcagcaggcagaaaaataagagaaaactttgaagtccagaaatggtgagaaaacacaaatgccgcagtgcaaggaagcatgggggctggcatttgtcctggaggacccagcaggtgggcctgcttgggctcaggagacaaaaccaggcgtccatgtgagggagaaggttggatcagggaaccttccttggtgctggaacctccaaaaggtgattccctcagtgagtcaaccagaaaaattccaccctccagagagccttagccttaggtggaatgggaaaaaaaattctctccctttcagaattcaatcacaagtgcatcctcatgaagatttggatcctcagaagtcacatgacctgtctgggctaaaacagaacaagtaaactttagtgtaaagtggtgctgtgttgtaggaccccaggggatctgcagctgcaaatgcagctcctttgtgaagaaatgactttaaagccagctcccaagaatttycacagaaaaagatccaagcaatatgagatcctagtgaaaaatcataaaagatagaaataaagcaaggcttcaagatctggaagtgacaccaggccccacaaagtctgaacgaggcccacaaagacagcagataatgaatttatcaagtaagatgaagaggcttaatatgttttaagaaataaaagagtatcaagagtataatgcaagaacaacaacaacaaaaaagataacctagaaggtttaacaaagaaacaaagacgatttctataaaaaagaatatataataattaaaatttgaaactcagtgaatgaatgaaacagcagataagacaaggaactggaagatagatctgaaagagttaactagaatgcagccagatagacaaagagatggggaacatgtaagggaggttaggaaacatgaagaatggagagaaatgtctaacatgcaaaaaaattctccggaaatgagacaagcaatatttgaagcaaatgatataaagagacatttcatgaagaggtgacaagaatacttaatatacatgtaaaaagatgttggaactcattagtaatcaggaaaatgcaaattataaccaacgtgagatactcttccacacccaccaaactggaaatagttgagtgtctgatacttctaagcaaaaatggggaccagtggggactctcatcaacagcagacagaagtgtcagtacaactattttattacctaaaaatattctgttgagagtaaggactatgaatgttaaggaaatcagctaagttaagtttattcattcatttcatttaataaatatttattgagcacctatgttcaggaattatatgagaattttaaaaatccatagtccctgcaccaaaaagcttaggatctagtgggtcacataataaaagggcacacaaataacataaaactatagccatgaaaggaaagatccttcaagagaccctggaaggtgggggctggagctgtgggaggtcagagaaggctccactggagggaagtaatgaccaagggggggccacagagtatgagtgaaannnnnnnnnnnnnnnnnnnnnnnnnnnnnnnnnnnnnnnnnnnnnnnnnnnnnnnnnnnnnnnnnnnnnnnnnnnnnnnnnnnnnnnnnnnnnnnnnnnnnnnnnnnnnnnnnnnnnnnnnnnnnnnnnnnnnnnnnnnnnnnnnnnnnnnnnnnnnnnnnnnnnnnnnnnnnnnnnnnnnnnnnnnnnnnnnnnnnnnnnnnnnnnnnnnnnnnnnnnnnnnnnnnnnnnnnnnnnnnnnnnnnnnnnnnnnnnnnnnnnnnnnnnnnnnnnnnnnnnnnnnnnnnnnnnnnnnnnnnnnnnnnnnnnnnnnnnnnnnnnnnnnnnnnnnnnnnnnnnnnnnnnnnnnnnnnnnnnnnnnnnnnnnnnnnnnnnnnnnnnnnnnnnnnnnnnnnnnnnnnnnnnnnnnnnnnnnnnnnnnnnnnnnnnnnnnnnnnnnnnnnnnnnnnnnnnnnnnncaattaattataaatctaaaaattacattaggaagtggaattaagggtttctgtgactacccttctggatcaccagatgtgactatgccgagagcagcaacagttgctgggcatatcttccctctcacactgcaagctcagctctgcctctgacagtacagccacgatggtgtcccagtttgtaaatcctttccccctccttcccaacaatagcatgtgagatggaaacctagccggtggttcacttcgtgatgcaaaaagcataattgaatacattttactgctttgcagccagagtaaatgatttttccattgttaagagtaaaaaccaatttgttagtaaacggagcagatatgattcaaaagaagcagaaagctaggcgcggtggctcacgcctgtattcccagcactttgggaggccgaggcgggcagatcacctgaggtcaggagttcaagaccagcctggccaacatggtgaaaaccatctctactgaaaatacaaaaattagccaggcgtggtggcacgcacctgtaagcccagctactcrggaggccgaggcaggagaattgcttgaacctgggaggctgaggttgcagtgagctgagatcgcaccactgcactccagcctggatgacagagtgagactgtctaaaaaaaaagagagagcagaaggacatgaagaagtataacagattgtgtctttcctgcttgtgactgcaatcattacaaacagtttccgcaggaggccacatttccattctgaaggtagtgtttcaagcttcctggtgtctctggtcctttgtagctcagattcctttatctttaacaactttattgtggtgtaattgacaaacaatgaatggcccatatttaaagcatayaatttgataagttttgaagtaagtttacacctgtgaaaacatcaccacaatcaagataatgacatatccatcacccccaacatttctgccccttcctgtcctgatctgtccctaccccaccacaaacaactcaagtttcagtgtaaccattcttttagtcaaaattccaatagacttattttataggctagaatacaatctctaaaaggccctttctgattatcttaacccaattcattgcaaatattcaccattaagataagagtcactctgtagaacctgtcaattttctcagtcttaaggctttgagaacactttaatttttctataaatccgagttgaatgtactgccgggaaggaaaagctggagccccagggcctatggttcactccaccatcattaatgtttacatccacctttcagatctcatttttgatgaagaggaaggagcggtttccacaaggggcacctccgttcagagcattgaactggtcctcccaccccatgcaaaccatcacggaaatacatttggtggccagattatggcgtggatggagacagtggctactatttctgcaaggttcttggttttgaccttcggcctatgattttgggaccagtgaggagaaagtagaaagggactgagatccagttcttgggatagtcaagaagtcaaggaaaggactgaggaaaatgttgccttttataatgatttctaaatcatttactttcttactttaggattaatctgtccttttgtttgaaggtgaatgtttaaatattttggttcaaaaataaaaatgagatgacagttttaatactttattctgaattatgaatattsatcttatgaaactgcaactcattgtcttgatagcttatgacaaagtaaatgcagaacagaaatagaagacaggcttcacacttaaaaataatcagtctaggttgggcatggtggctcacacctataatcccagcactctgggaggccgagacaggaagattgcttgatgccaggagttcaagaccagcttgggaaacatagcaagaccctgactctacaaaaaaaatttgctggtgtagtggtgtgcacctatagtcctggctagttgggaggcggaggtgggacgatcacttgagcccagggattcaaagctacagtgagctatgatcacaccactgcactccagcctctctataaataagtaagtaaataaataaagtcagttagttacaaacctttttaaagacaatttacagttaggtctgacctttaaaggtgctggttaaaaataattatggccaaagaaataattgaaaaataggaaaagaaagaagagaatatttagaatacttttaaagactcctcaatttcaaaaaggttattttattcttaatggaaagatgtaggtaattgagcagttttagggaacactctgtaccctgtaaatgcatttgaataggatctgcccttctgacaattttcataaccattgaaaatttttaaggttgtatttccctcaaattaaaataattttattattaatatgtctatagttatgactatagttacaaaccagtagttatcctttctaaaaattatgcacaaataagagagcttgtttttaaaatgagattgtcattcttagtgacagtaaagcaattgaacatgttctattgtaaaggcttatggcagcatctgttcgcttggtgttggcacagagtaattgaatgatgactgggaatctaaaatgtagaaaattatggaagtaactttctgaaattaaatattatatataattatttcaaagtgtcatacacacaaaaattataaaatgtgtatctcctagcctttcaggctttatgtagcaatccaggtaatttttctgtgaggggaaaaaacttatcttttgatctgtgggtgaatttgattaactgtaaagctgaggaattgtgtaaggacacctgccttcacttggaccccactccaacctggatcagaacttcttgggactacagtcatgagctatcaggatgactgtaattcagattagaacaaaaagcattggtttgttgttccaagggacttccacaggaaacgagacaagagtaggactgttaccaaaggagtagaagcatcaacatctgggtaaagaccccactgctcggggacatggtatttcccaaaatattggcaggtagcgtgcagacctaccctcaacccacataatccagttatttatttcagtcaamtttaaagaaatgcttatttgaagacttgtctgtgcatttgttcgatgaatgaatgtgtgatcgctttcttctctctccctccctttgtctccccagccgcctgtgttgggctcatccctttctgaagtccrtagatatgtttaagttccggggaccatctacagttggagatcgtcttgtcttcactgccattgtcaacaatacatttcagacctggtaaagtgagcccttaggctgctatgaagaaatttaaacttgcacaaatgtaatttttaatttcagcctggaggtgagtatgggaactactttagtgaaattccatttttttcatgcaattttcaaaatccrtgaacatatttttaaccctttgttctgcttggggccttttcacaattagtaaattgtgaaggactggtttttgtcttataagggtagccgtatgtcccaattggcccaagtaggacctggtttgtacctgtcatccctgcataattattaacttttcctttcagtcccagtgactagatggtcaatcaactcataatggacctggtattaccaccatgaaatccaaaccacttcccagttatttttattattcttgatacacaatgaaaagatttgatttagtattattttctttttaaatgtaaaaatgaatatctgtgtttcctgtctaatttcagtgtttattttttaattacagaattattgtttttagggaagaaaacttaactttggcataatttaagccctcccccacattgccaaaatatgttcttgaatgtatataaagcccttcctggcctttttcccacttgaaagtggggaagtaaaatggaaatgctcttaggggcttgtaaaaagcagcccattgacctgaaaatggattttaatagttgcacaggtttgctgataacaaacaagaaaacccaggcccttatcctcctgttgcttagaggaggtggcagcggtgkgcaaggagggcctgatgggtcaagatcctctttgcccamcgccctgcatcacccttcacagtgttgaagttggagttcgcgtggaggcctttgactgtcaggaatgggccgagggccgagggcgtcacatcaacagtgcttttstcatttacaatgctgctgatgataaggaaaatctcatcacgtttcccagaatccaacccatttcaaaggtcagttattatcacacgaggttcaatagccggacctgtgaatagagagctctacctagaatctcctcccaccggcaacaacctctttggctctttccctttggttttccctcttttcagcatcacaaagtgaagtgggcttttttcttttccttttccccccgatcactctgatcatttgttcaaatgatggaagccctgaagacctcacctctaccgggctacacactgctgtgggtaggatgtcaccttctatgtcctgtttctgggtctcttctctcacttccttaactctagctcttgatgctgtgccacgtgccaggttcatggaaaccatatctttccctcatccctaaattacctgattgccaatgttaattttttctaaaaactctgtagtgagaattaagtataattctggtaacaggaatgttaataatctccacttttgagaaaaggaagaaaatagctgcaaagattgcacctttgtcagtgcaactgccctttgtggattcagcacagagactctgacttgatgaagtcagttcatggagagacaccacatctcagttagcccttttgactgatttaggagaaggatacttaaggattatagcactaagatagtagatattttattttattttattgattttactttgtttttgattaaaggatgatttcagacgctatcggggagctattgcacgcaagcgaattcgcctaggcaggtaaggaacataaggtgtaatgattttatggagtcttcgttaatctgacaaattatataagagcccccctctgggtctctattcccacgtaacggaaaaagagaaggtctgatgtttcctggccgcaaaggctgactactgacttatggaaatagttcttccacgttgttccactgatatccatggctgatagaagttcaagaaagtattatggttattgttgtgtgctaaatgcagagaaaaaaactgtcatttaacactttaatttttttttccagaaaatatgttatttcccacaaagaagaggttccactttgcatacactgggatatcagcaagcaggtgatgttttgtgatttggagctcttcatataaaagtctcatcattacaaaaatggaaatccgcttgcctaactggcctaggctgtgcctacgcaggctatgtgaaaaggtggattatatcagccagtcatgtcaagatgaaacaaaaccaggctatcagttactgcttaccaatcggcagtttagccttgtttgacttcttacagttcccaaactgcagactcaggatgctctgccatcagatatgttccagaagcatggcacagtgccacctggtatctcaccgtgacttgtgcccaccagcttgcatttttataaaaacaataacaaagtagtagtcatttgaatatttttaaccattaaatgtaaagagaaatccaagtttacttattacacattgattatcagtcatactgaaaggtagtctgtctttgctcaggacaccaactaaaatgatactaaaatgatacgcagttgttaagtatacagttactttgtctgaattctgaattaagggttcaagataaaaagtatatgttacctgtagcttagttctttttacttttgtttgtttttttttcgtttttgcttttgtttttgtttttgttgggtttttttttggtatttttttgagacagagtctcactctgtcgcccaggctggagtgcagtggcgcaatcttggctcactgcaacctccgcctcccggtggcgggttcaagcgattcttctgcctcagcctccaagtagctgggattacaagtttgcactacaacacccggctaatttttgtatttttcgtagaaatggggtttcaccatgttggccaggctggtctcaagctcctatcctcaagtgatctgcctgccttggcctcccaaagtgctgggannnnnnnnnnnnnnnnnnnnnnnnnnnnnnnnnnnnnnnnnnnnnnnnnnnnnnnnnnnnnnnnnnnnnnnnnnnnnnnnnnnnnnnnnnnnnnnnnnnnnnnnnnnnnnnnnnnnnnnnnnnnnnnnnnnnnnnnnnnnnnnnnnnnnnnnnnnnnnnnnnnnncatccatgtattgaacacatagctttaaaaatataatatttctattctaggcatccctgagtgacagcaatgtggaggccctcaaaaaactggcagccaaaaggggttgggaggttaccagcactgtggaaaaggtaggacacttccaggtatttgcataatccatcgcccatcacaaacgaaagctgtggtggtggtggttctactgcttctactgaggcttttaagaaggtaacaaaatcttttgaggaaactgtttctaagacgcaaccatcttttcagccctgtctctacaagctggttgatttggagtccttcaaatatacccaacatgctcctacctctgagcttaggttctcacatcccgtctctccctccttctcttctccatctacccaaatcccacctgatctagatcaggacagatgcttctccataaagcctcaactgccacacttgacttaaggacttctttttctagtaactgtcatgacttctttaaaattaatttttttggtcgagtgtgctggctcacgtctgtaatcctagtactttgggaggccaaggcaggaggatcccttgaggccaggagtttgataccagcccaggcaaaacaatgagaccccatctctacaaaaaatttaaaaattagccggctgtggtagcagacacttgtagtcttagctacccaggaggttgaggtgggaggatcacttgagcccaggcatttcagcctccagtgagctatgattgcatcattgcattccagtctgggcaatagagcaagactctgtctctaaaaaaaataaataaataaataattggtcaattaattatacactatcttgtgacatttcttccacagctacctcaaattaatatttaagccttacatggaaatttaactttttacacatggtcttctttccctaagtacattataaacctcttaagaaagaggccttgtctggacttctttgtatctctcttaggacctattacagtgttttgcatgccatcaggtttaaagagacatacatcatttggatcataattttatctattttcagaggttttttaggagaccctcggaagytcatgcccacaataactagactgtaagctccctgagggccgatctgctcaccactacacccagaccataggagcgcctggcacttcagagatgctcactaatgccagcactttggctacattcatatttcagtatgcactgattttcatcatcagtgaagcagcagcctatgaaataggatgaccatatgtcctgattttcctgggacagctctggcttacacctgttgtcccatcataattattaacagtctcttggtgttccagtttggatgataaattatattgttactttacctttaaatctaagtaaattcagatgctacttcattgattcgtttcaactctgactttgacttcttctgaatgttttgtttttggttgtttccttttatgagttctctgtcctcattattaaatcctttagaagtcttccttatcccatttggatccagttaaatttctgtctttgcctggttcagtgatgcagaaacacaggtttaactaatgcatttgtttatctttcataaaagatgcttcactactttgttttcttttactattataaaacttacttctttcatcattgctggcatctgagcattcatgagcagcagtggaaagaacaaattcatgtctggaatgaactgaaagaacatatttagtgaagtcgtagaatatattaaaactgcagttctttgggagggtgtggcccaaagcatacccaaataaatttgctagtgttgtgggagagctatcaatgattaattcttcattcttatacagatagttactagaggatattgtataaagtaatattcttgtgttatttccattgaatttgaatttctcctttaaagattatacttatgataaaaatctgattttaaaaatctgataaaagatgtttttgaagagttttcctcctcttctctcccacgttttacagcttatatgtttttaatttcaaaatatgactctaatttttttctgycaccttttagtggaataattcttacaacacagttgtctgttaagaatcatacttttgggccaggctcagtggctgacgcctgtaatcccaacactttgggaggccgaggcaggtggatcacaaggtcaggggttcaagaccagcctggccaagatggtgaaacactgtctctactaaaactacaaaaattagacaggggcagtggcaggcgcctgtaatcccagctatttgggaggctgagacaggagaattgcttgaacctgggcggcagaggttgcagtgggccgagatcgtgttactgcactcaagcctgggcaacagagtgagactccatctcaaaaaaacaaaacaaaacaaaacaacaaacaatcatactttctgggcaggcgcagtggctcacacctgtaatcccagcagtttgggaggccaaagtgggtggatcacttgaggtcaggagttcaagaccagcctgaccaacatggtgaaaccccatctctactaaaaataaaaaattagctgggtgtcatggcgggcacctgtaatctcagctgcttgggaggcttaggcatgagaatcacttgaacctgrgaggcagaggttgcagtgagccgagattgtgcagctgcactccagcctgggcaacagagtgagaccctatatcaaaaaaaaaaaaagaatcatactttcctcaaagccgggtctgacagcatccacctgtagtcccagctactcgggaatctgaggtagaaggattgtttgagcctaggagtttgaggccagcctgggcaacataaaatgacttcatctctataaaaaaaatcatgttttttccaggttttcaatataaattagatggtaaaaatttaagattgtagtatatgtgatgaaattggatagggcttatggttttaattcrtttcatgtttcatgtataatgatagaattaattgtagtagtaatacaaggagcaaaatgtatattttggaaacatcacacaggtatgtgaaacagctgaagaataattataaggtcgtttattaacaagtgagagattacagtgcttaaaccataaaagtcagctcttataggcaattccaagagaagacagttatatagggagaactttagagaggaggccattcttacctccttgaagacagtgtcaggagtggattgctgagggagaaatagggctttctaggcagtgggtagtttaagccaagttctcctggtggaaattagcattgagtaggagactggcctgacaggagtaactttttatttaaggaagacctggggatgtactgggaaaattatgatgaaagccagaatgacatgaaccacttgaaaacctttacataggacagacccctagtataggaaacagaccagaggggagctattctcatggagccgggggaggggctgggcccagagctccgcccttccgacccccacccgcttggcccccgtggkcatctccagatacctccarggaaaatgaaggctcccctrggcttctgtaaaaaccacttttgccctctttaccacagtgtagtctccataacatatttgtcaatagatggtacaaaaattctcaaatttttagttgtttcctcttgtactgtttgttttttgagatagagtctcactctttgcccaggttggagtgcagtggtgtgatctcggttcactacaactccccctcctgggttccagggattctcgtgcctcagcctcccaagtagctgggactacaggcatgtgccaccacccctggataatttttgtgttttcagtagagacagggtttcaccatgtttccaggttggtctcaaactcctgacctcaggtgatctgcccacctcggcctcccaaagtgttgggattgcaagccctcttatactatttgtataagacattaaattcaaattcaaaaagaatcttattagaatgaaaacaatgatatcactaataaaatgttagcaaggatccagcagattttgannnnnnnnnnnnnnnnnnnncctgcttgctttaagcttcatttcgtagaatgaaattctccaaccatcaaatgataaagaaaacgtttgagttggcgtattagttcatcctcacattgctataaagaactacctgagactgggtaatttataaagaaaagaggtttaattggttcagggttccataggctgcacaggaagcatggctggggaggcctcaggaaacttacaatcgtggcagaaggtgaagaggaagcaggcacgtcctacatggctagagcaggaggaagagagagggggaggtgccacacactttcaaacaaccagatctcatgagaactcactcactatcacaagaacagcaagggggaagtccactcccatgatccagtcacttcccaccaggtccctgctccagcactggggattacaattcgacatgagatttggttgaaatcacaaatccaatccatatcagttggttacaaataaataaataaattgaatctctatattcccaaatgtgaaaggtaattcattttcttggagaattgttcctggaaaattttttcactaagcaaaagctggcctttattagcagggtttaaagagaaccaaaactaactactgcatttccttgtctgctttgtttgcatcaatatcattgatttatacagcagggcaacrgggactttctgctaccctcaccttctaggggaaagatcaaaatcgaatttgctcatccagtactgtacctgacattggataagtcaagtgagctctgtaagggcagaattcagtggtggttacaacttagcttgatgtttggtttggctccaggataggaagcagaagcatgtgactgcaacctggggagcagcacccccagaaaagtgctgtattagtttcctagggctgctataacagaggaccacaaactgggtagtggacacattagaaatctattgtctcacaattctggaagctggtagtctgagaccaagatgtcagcagggttgcttctttctgagcctgtgagggacaatctgttccatgcttgtctcctagcttctggtgattttctgtcagtctttggcattccttggcttatagaaacatcaccagatctccacccttgtcatcacatgtgttctccctataagcatgtctatgtccaatgtccctttttaataaggatgccagtcatattggattaggggcccatcctaccacagcacaacctcatcttgactaattacatctgcaagagccccatttccatataaggtcagattctgaggtacaggaggttggggctacagcatatgaatttgggggtggaagggtagagaaataattcaactcttaataagtgctcagcacaatattgcatcccactccatcttgttccaccagaatggagcatggctgccccaagggcagattaggactggcactatggagttcaccctggccacctgccctcagctcctctgagattgcagagccccagcaggccatcctagagccacttacctaccaaccaccrattggatgactgatgaatctgataatctctctggatatacaccaatgaaactccttcaactccccctgtgctgggggcaaagttaggcatgcccatgctaagtagggtgtgtctcaccagccacctggagccccatccctagttttcttggtgtttgataagtgctcacagcctcagtcatgtcttcctttgcaggctggatttaaagggaggcttggaaccaagttcaattggagaggttaaatggtgtaagcaaataatcacttgtttcctttctgagcagcttgtagttaatttctcattttctcattctcttattgatgatatttatgtttaaataaagccttctcctttacagcctgatttttcccatctgcttgattcctgcagtgaagtcctaaccccatatttgtttgttttctcacagcttgttgccatgggaatggttataaggtagcaaatttcaacactaacttcaaagtatcctgaaagagataaagaaaacgggaaggatagaaatgtgttcttagctgaacacacatctctgattattgtcaaaaacacagtagaagaaaagctcagagtagcaagggatgcattcatgcttaagtatatgtcaaatggctccccaggacaagcctcctcttacctaaggaataatgtgcattaggaaaccaggaactggcctttcagaaggatgatccagccactgtgattcggaaatgaaagggtgcttcgtgctgaggaaatatggtgctccaggggccctgctaagaggctgagatggttctagaagtggttgattcagttcctggatccccttggcccacttaaagacacgcctgacatcctgggaaagtgtcctaagctatagccttgactctgctcttttgagggagatgaggtgctgacctgcctagcagtctggtgatattttctttttttcctcagtagaggcagggaaacatcacaaagagacaaggagagaaaggcctaggtttttacatttttcatgagaaaaaaaaaaactgttgtgcaataattaaatagcccaccctcaagtcacatattgtttagaggacacgagactacagcatcctggacagacctctagacatcccagtatttgaagagaaattgccggggcttcaatttcatccaggaaataagatgccttagttagtgcaattggtctatgactacatatatatgcatatggtttctaaagtaaaagcatcagttttctttcgtaatttaatttttttgttgtcttttagataaaaatatatactctggaagagcatgatgttttatctgtttgggttgaaaagcacgtgggaagtccagcacatttgrcttatcgtctcttgtctgactttacaaagcgacctttgtgggacccccattttgtgtaagaacaaatttaaaaatttttctcaatcaaccttgacataatgtaaaagatgatctccatactgmagtccatctccatcgtccaatgtgtgacccattgtttaaagagtatttttagaagtttgacccagcatagcactttgggaggctgaggcaggtggatagttgagtccgggagttcaagaccagcctgggcaacatggtgaaagcccatctctataaaatacacaaaaattagctggacatggtggtgcatgcctgtartcctagctacccgggagacccaggtgggaggattgcatgagtctgggaggtcaaggctacagtgagccaagatcacaccactgcactctagcctgggtgacacaggagaccctgtcaaaaattaaaataaaaataaagtttgatctggacagaatactgcatcaggtgatattgagagacacaaaacaaaaattatactcacttatcatctatattgagttgacctgctttacacacatctattgtaattctaccagtaacttcaaggtcaatattatttccatttaagaggttctgagacgtgccaagattgcacaggcaataaagtgatggaacccaaactggaacccaagtctgtcatgctctgaattctacactcttctactttaatatgcaacctcattgctcttgaggaagtgattatccaattgtcctgcatactctcaatatttcattggcagttccttacttttctgtgaagcaaccctccctggtgagaagctaagagagcaagctgtgtgagccccgaggtgaaaggcatgccttcctgctccccctcctgatgatgtccctgctcctattagcctacatctcccactcctgccactccctgtctcctgcatccctaatccaatctcctccactccccagccctttcctggaacacagtacagagctgtgcaccctgccaactgcactgacagagaccagctgcactggggcccagccaccttggctatagcaccccgcagggcttcatggcccacyttgttgacacggaagagttgatgagatgggcttcctatgtgttaagcgtttcctaatcttgacaagatagaggctcatcttcaaattttctaaaactcactgtgatagagatttagaaataccatgtaacatatgatttaataccactaaagtgaaacatctctgaggtcacgtgttacattggcacagatgctagagttgaaatgggaggagttcccttatcctcctcatagggcctgcgacaagggtgtggcttgtttcttcsgtgctgctcaaacccctagagggatcatgcagacgcttaagtcgcttaagtcgtggggagtgtttttgagctctgaccccacggcagcatctagggttgactgtttatggcttctgaagccccggtgggtgtgtgttacgatgcgctctttcagttttgctgtctgcaggcagcctgtgttaatcagctcgatcagaccctctgccttattgcaagaacagagggctttctgtatcctggattcttgcgttagtgtactggaaaaaacggctcacgcgtggccttggaggatgggtgcaaggtttattgagtggtggaagttgcttttagcaagatggatggggagccagaaggaggatggagtgggaaggtggtcttcttctggagtcaggctgcccagccaccagactctcctctgaccacccctgactgaattccatgtctttccaccatcgatggtctgccagcgtctgctggtgtctggcagtgtgctcctctgttcctctcaacatccagcccgctagggtctcgggttttttatgggcacaggatgtggggtgcagtgggccaaaaggtaacttttggggtgtgaaaacagaaatgcctgtcctcatttaggtctgtgggcacaggcccgagggtggagccctcaccagggaccctgcccttccctacccaacatttccctgcccacctcctgtatcagaatgatacatcgtggttaatgctatcataataaatcattctgagagaagaggaacacttctcaattttcttgcatcaatttagtagatactctaccagtacaagcttttaggaataacaatgcctaaactttggtgttatgctttaaaaatgtttctcccactatctctatgtcacttgacattccagccaaattgaagttgaacaaattggggagtgaatgaatgaattctaatccaactaacttttcttgtacatgtactatgattcaggtactatgccaggtgttttcactgaatccttgcaataaccccacgtatcattatctaaattttacagatgaaaaaatcaaatgacttgcctaacgcaacttatgtagcgagtaagtggcaatctgggagtcaaaagaaagttgtgtgactccaaagctagtgcggtttccaatataccacatttctttatctatataaacaatccttcttggactgactatatgatttaccagtcctcacaatgtttttacttgatcctggagaaaaataattttgtgtaaaacagctcaatgcctttcactgaagtattgagaattatgaacttgaagtcagatggccaccatcctctatcacttgcagaattattccttctgatcaaagagctcttgcgttttttgtttgtttgttgtggctttttttttttttttaagatctcactgtgtcacctaagctggactgcagtggcacagtcatggatcactgcagcctcaacctctcaggctcaagtgatattcccacctcaacctctcgagtagctgggagtacaggcatgcaccaccacactcaaataattttttaaaaaatttttataaagatagggttttgcaagattttgcccaggttagtcctgaactcctggcctcaagtgatcctcycacctcagactcccaaggtgttaggattgcaggcatgagccactgtgcctaccctcaaagagctcttctaaaggcagacttgagcaataatgctggcttttagggagatgattaggtgagctgaaggggcaaatatggatacaaataatgagattatgtaagcaaataagggaagtgaatgcctgagcaggtagaaagtatacctgcttttcactgttctatatacacaggtcctgtgaagtcatagactgggtgagtgaagatgatcagctgtatcacatcacctgtcctatactgaatgatgacaaacccaaagacttggtagtactcgtatcacgaagaaaacccctcaaagatgggtgagtatatgcagtccaagtgttctattaatatttcatagtataggatagaaattaaaagttgatgtgaaaataatgaagtctgtgtagatatttctgctcttgaattatgtttatttgaattatacctagatgaatctttagctattattttaaaaattaacagtcatctattaagagccagctgtttgcaaaggacaatgcaagaatcctaaagtagttccttttcctacgtaaatgtaaaactggtattcagtaaacctttgaaacataccatgattagtaaaaatgtcgtggaagccaaataagacatcaggaattggtttagaattcaccaaggcttgactatgctagacatccaccatggctggttgtcagctggggctgtcgatcagagtatccagacatagtttttccatgtacattgaacttctcagagcatggcagctagcttctaagagaaactgtcccaaataatcccacacacatatgagtattaacagatgttcagtgttgtatcatttattatgtcaaaagatattagaaacaaatggaaaatccatcttataaattatggtagagccatactacaaagtattgtaccatcattaaaaaggatgaaggagctatagtgggactgatagagaaacaccttcaaagatttattgctaaatgaaaaatcaaattgtagtcaatatttgtaaaatgatatttatgtaaaaaattttgtgtgcatttgcttatataaatgtcattcttatacacttattttaaaaagtctagagggctatacagtaaaatgttaagcgtgttcacttctagggtagaaaatagcatgggagcgcaattggactggaggaagatttttattttgtagcctacagggttctctattgttgagagtttttcttttaacaacaatgggtattgtttttattattattattttagatgatgtgttgcccaggctggagtgcaatggcacaatctcagctcactgcaacttctgcctcccgggttcaaacgattctcctgcctcagcctcccaagtagctgggattacaggcatgcgccaccatggtcagctaattttatatttttagtagagatggagtttctccaygttggtcaggatrgcctcgaactcctgacctcaggtgatctgcctgcctcagcctcccaaagtgctgggattacaggcgtgagccactgcacccggcctgttttttaatttaaaaaggaaaggaggctgaaattacaaccctgtcgggcacaataaaacttcagtttggtggttgactccagtttcatggagttacacaaagcattgtatatgcaattctaaggcagaaaacactatttcctaccttgaaggtagcctgtagagtgttttctgatgagaccactcttctagaagatctgggccttcatagtttcacttctacctgtataagtaaattgggttaactatagggatttattttctaacaactattctttatttctcacaagagcttagaaagtgttttctttcagtaacacttacacagtggcagtgaagtcggtcattttgccatcggtccccccgtctccacagtacatcagaagtgaaatcatatgtgccggatttctcatccatgctattgacagcaattcatgcatcgtaagtttgatgaaacatctgcagattaattggctctgccagatagcgaaaaatctcttaatttacccagatgtcctaattaattgtaatcttgtaatttgtgtccacactatgggaatcctaaggtcatcctttsggatcatctattccagaaggtcccccagaagattagggtcttagcctcccctacaccagcaagactcagatcctttcttgaaaaagctccaagtcaataagaaattaaaatattgtactttctttttgaaacaggtatcttactttaaccatatgtctgctagcatccttccttactttgctggaaatcttggtggctggtcaaaatccattgaagaaacagcagcctcttgtatacagttcttagagaatcctcctgatgatgggtttgtaagcacattttaaaggtcaactttcaattactggtaatttaatttcccacttttaattccaagcacccttagccctgacatctgtcaagctttggggccacaaaataatttaatataaccctaagcaaaatgcagtgacggagttaaaaaacaaaatgcatcttaagtcaaataccagtgatttggattagcattaaaagagctttagaattctgttgtaagtcatctgtggctctgcctcttccaggggcacagatagtggaaaattgcctgtatgcartactatgtgttctataaaatggcatgaatttagtttaaattatcgtaaacatttttaggttacagaggtgaaacatgcattctgtgtgaaattccaaaaaaaaaattataaaatctaaaatgatttgctaagttgactcgttgattaatgtatggcattcttcctcgtgcagcaggtgtctatatgtcaggagcatttgacaagatgtattacatagtctagagatttaaattagggagacattaaaacataatggaatccaatcaattttagtaataagaacaactttacttgtgtcatttaacatatattccaggtggctgaccaatttagtgtctattgctctaatagacacacaaggtacctgtaaaatgtagtattacagagaaagagaatattgaccgtgatctctttcataaccattacattagcactttattccgtagacttcaacattcagtattctcctctgtgatttgtcttaactcatgagacaagccagaatatggcaagctagcctcctctcaaggacacgttttaaaagttgaaggagtctccatttttggtgggagcacttaacagattagatgcatcctgctgttagtttgctaaagttctacctctgctccccctaccaaccctcacccatctattcacacaaggtaagcctggttataattattttcatttttcctgtgccagcaagttttcatttacatgaactttggactgttctgcaatttcatacattaacatttatatacgtaagaagagtggatatgtggattaaaataattatatattatattccagaagtagagatggttttgagaatatttttacattttgaaaaagtcaacaaaattagtaatgaaggagttacattaaactaaaatttcagacctcacctacaattgagacacttccaaatgctgtctgcctagcctaggtctttgagtttacattttttgaaatgttttcctgaacagtaacggaaacattgtgaagttaaaggagtagagtgatgatagctggatcactctgagacataaagatgttgcccactctaattgacaacagaggcatagtctattcctgcattccccaatatgtgtcattaaatagcactaggcacgtgtgctatttaattaaaattaaataaatttcaaaaatcaattctcccaccatactagccccatttcaagtattattagtcacctgtggttagtggctatcaaattggactatacaggtatagaatatttccatgatcacagaagattctttagatagtgctgttctattcagtttgtcccagtcttataataatgcagacaggtcctgttttcccattttcacctatcttagtgccaaacaatcccttctaccccttttttaaatatatttcacttttatgtttctgaacaaaaacataggactcatccacctggcgctttcttggatcattcagcatatcctgaattgaagagctcattttcaggactactggactttagaaatgctaaatgagcatggcaagaagataagatagcaatgcatttaggctctccttagggcatttccaaaagtttgaaatctattgtctaaaacaatgccaaaattaactaaggcattccagttgtaaaagttaacaatagctcttaagtttgcattttcctttttcttaggaatatactcactctttcattcattcagatatttattgagaactttgtgctagacacatcttaggcacggcgggttcagcaagaaacagaagcatactctgttcacatcataaataaaattaatatagaatattagaagatataaggaaaaattaagcagggtaaagatgaagagtgctggggaagggttgggggtggtggttgatattttaagtagggtggtcagtgtaggcttccttgagggacatttgagcaaaagcctgcaggcagacagggagtgggctgaggatctctggatgcagcatgcttcctaccgaaggactaggcgaggcaaagtccctaagcaagggagtgtttctggcacattctaggaaagcaaagaacctggtgagacttcaacagagcgagagaaaattaaagacagctgaattaaagaccatcttcccctactctctttgatgtccaggctttaagcaaacgcgtttgctccaagggtaagcagctaagttagttcatcagcagtcagccccctggaaactaaggacagaggaaacctagaaaaattagtcccactgatttttttctttggagtgtcaaagtatccttaagggacactcaaaatttcatgctgtttttttgatggtaagggttttcaagtgcttctaacaggaccgaaagcttcttgattaagaaaggaatctcagccagccgcggtggctcacgcctgtaatcccagcactttgggaggccaaggcgggtggatcacctgaggtcaggagttcaagaccagcctgaccaacatggtgaaaccccgtctctactaaaaatacaaaaattagctgggtgtggtgctgcgcacctgtaatcccagctactcaggaggctgaggcaggagaattgcttgaacctgggaggcgaaggttgcagtttgcagagatcgtgccactgcactccagcctgcgcaacagagtgagactctgtctcaacaaaaaaaaaggaagctcattcctattaattcttcctggtttcaatgcaatctagttactaatctgcattcggtttctctattatgtttgttttagaaaaaaatctagtgaaagaaatgtgaaaatgaatcagaatatagtttaccctgtactcaaacatctttaggaaatgatcaattttaataaataatggaaagaaactagtatatatatatatgtgtgtatgtatatatatatgtgtgtgtgtatatatattatatatatgtgtgtgtatatatatatacacatatatataatcacatatatataatcacatggttttgtttatatttcttattacacatttcagaaataagcttggacattttactggcatagttataaggatagtcttgaaatatatgttgatactatcatatttgggattaagttaaaaaaagaaaatatatgttgaaaaagacatataaaggaataagtcttgtgatttagagtaaattattaaaataagaactattaagtttgctcataatttatttcccctttccaaagtattaaaactatggggacagacagctcaccatgagccctgggtggtcttgcacattcttgctgagtgtgccaggctacaggactaatctgtctaccaattctgagcaatttctgtagctagtcccatagacaactaaataggtcaaggtgaccacagcatgattcagtgtaactgctcactctctgggcagaggaggcctggcttgtttgctgcctgctacagtgctcgctacttgctcaaaaagttatcggcctttggttcctcagctgtgacacaagcccaatatgtctgcagcattcactaggcccttcttgtcacctctgtgggacttggagggaaaggaaagcaacacaaatatgctgatacttatgctgcttgctgtgtcatgagtaatatagtccttcatctctgaaccaaaagtcttgtgtcttttgtcaacatccacaaaacaataagaggctaacttaatattaagactcttggccaggcgtggtggctcatgaatgtaatcccaacactttgggagggtgaggtgggcagatcacctgagatggggagcttgagaccagcctgaccaacatgaagaaaccccatctgtactaaaaatacaaaattagccagacgtggtggcatgcgcctgtaatcccagctactcacaaggctgaggcaggagaatgcttgaacccaggaggtggaggttgcagtgagccgagatcatgccaatgcactcaagcctggcaacagggcgagacttcgtctcacaaaaaaaaaaaaaaaaaaaaaaaaagaatctcagggctgggtgtgcagtcgctcatgcctataatcccagcacttttgaaggctgaggcacatggatcacttgagcccagtttgagaccagcctgggcaacatagcaagactccatctctatgaaaaatgaaaaaatcaaccaggcatggtggtgcatgcctgtagtcccagccacttgggaggctgaggtgggaggattgcttgagccctggagtcatggctgcagtgagccatgatcatgccactacactccagcctgggagacagagtgagacactgtgagacactgtctctaaaaagagaaagcaagactctcaaacccttcacagttattgacagtaaaccatctccagattcaaaagtcagagaaatctgatattaaaaatgcctttctcattttacacctgcaaggatgaagcaccctataaaaattatatacctgataccacctttcacatccaatttagggatattttggagatactgaaaatagattagaaaaaaagtatttttatcattggacacaactcattcccgctttacatgcccccccgtttccttgtccggcttagattccgtggtccatcattataatcactccctggaaaacactgcacctctgtcctttcattcagcttctctgacaaaaaccccaactatggctaaattaaactattcataatacttcattcctgcacacagcaggtgaaaattgtgtactggtctcactttaagttcgtgaccacaaattttaacagggtgcttaggaggctggtaattctactccatctccctggatgtttgctatttcacactgagtcctcttccctcaagcttctcgtgtctcttaccctgactcaggtcatgaacttcaaaaaatattcattgagaaaatataaaccatcaggcaggagtcttttcctattcccatccatgcgcctttcacytctttgctttttcttctgttataatggatgaaatatctctacccctagcagagaacactttctctcaccttctccaggactcccttccatcagttctcttttttctctgcttcaggagcttctttacctccactggattaattttcacaaccacaggtgtctcttaaaataaaacgatactttttctggatgcatttcctaaatcctgccccatgtctattccagtggtctatagaggtggtcttcacacctttattttatttacctaactatactcccacctccactactccacaatacttctattatcaggatcaactatgtcttttctattgccaaatctaatggccctgttcttgacttacttagtctctgagcagccttcagtgaagttgactccttgcttctttttgcaacattttctcttcttgacttccatgatgtcacactcttagaatccctcctacatcactaattccatttttaaagccttttcttgtggttcttcctgttccatcaggcctctcaatattaggttaccctagggctctggccttggcctcttctcctctatatctattcctcagtgagtctaaccagtatctgggtttaaaagccatctatttaccagaaattcccacatctatgtctctaggcttaatttctcctgaacttcatgcttgtatacttaagtacttatttggtatttccattaggacaatagtcatctcaaagtcagtatttccaaaacagaccacccaaattctgccacctttcccccaacaaattccctttccttcagcaaattctattggctttttgtcaaaaatataatgagaaccttactacttcttatcaactttaccactaaagccctaatccaaaacgctatcttctctcatctggattataacctatcttccctgcctggcacagtggctcacacttgtaatctcagcactttgggaggccaaggcaggcagattaactgaggtcaagagttcgagaccatcctggccaacatggtgaaaccccgtctctattaaaaaacaaaaattagccgggcatggtggcacatgcctgtaatcccagctgcttgggaggctgaggcagaagaattgcttgagcccaggagacagaggttgcagtgagccaagatcgcac

SEQ ID NO: 95704 - DNA, 84023 bp, Homo sapiens
  misc_feature (1)...(84023): n = A,T,C or G
tgtaggctgcatcagtggaagatgcaaccttttattgataataggccagttcatttcaggcctgcccatagctggacacaaagcaatgaatggatcagggagaaaagcctcagatgcctcttttaactagtcttatctgttctatgaaatcaacataaaccccctcagttcctgaatccaagggagacatcaagcagggtacataggcagcttactggcctacgtgttgggtgtagggtaaaactaagctgtgtaaaaaagaggcccccacaacagtggctttaaataaaagtagtttctttttcctctgtaagaggaaagccactgtttgtgggggactcttttttacagagtgtgcaccaaattgcacagtccttttatcttattgctttgccattccctacggcaggggtcagcacatgacagcccacagaccaaatctggcacatcacctgtttttgtaaaaacagtcttaggtaaaaccctgcccattgatttacatattgtctaatggccacttttccactacagtagcagagttgagtagttaccactgagactgtatggcccccaaggctaaaaataattactatctgaccctttacagaaagcgtttgccaacccagccctagggtactgtcctcctcagcatgggggaaactggatcagagtcacgttcatactctgtctcaaacgatgaggaaacagtgtggcaaagctcatcctaaagtttttagctcagacctagaagtgactcatctcattgacatttacatttcctgcgtgagagtttagccacatggctctaccttgctgcaagggaagccaggaagtatcatcagtgaatgtccatgtgtccagctccaacgctaatccttcggaaggagggggaacagattttggagagaaactgcttctgttctagtgtctggcatctgctatttctcctttgcttactccccacacaaagtgacccacccaggtgtcaggagcgagcttccttggataccaaggaacaaagagatcccaaacacattttggccatattgcttgatatactattttcttcaatcttttcccaggaggctggaaggccataaaggcaataaagaataagagggaagctaatttgatcttggttacaggagtctttgtccttagctgggtcaatcctggatctaataaaagcaaccagaaattaaagcagacgtgaggatcttcccacagagcttcccaggacagtcctgttaacagtatggaaccaaacatgagaggtcaaatatggcttgaataatctcttaatctccatcgaatggcatgactagagagggggcttattctagctttctccccatgttcagtttagctgcagaagtacaaaccactctgactaagcagaaaggagtttaatattgagaaatgggtacataaaaaatttacactgggcttccagaaatgacccctagaaaaacatgactgaattggccggctggggctgcaccctctgccacaactaagagaagccactattgaactgctggcttcaggacacagctgtcatatagggagaaggaggctgctccagcgacctcagctgcccctcacgtgaccctggaatgctgcactatggccacatttgctatgcttccaccttcccagactcatactggtgcatctgattggggatgctagttcttatccagatcctagctgcaaaggagtctggcaaagtggttagttttctttcctctgcagtgcaagaaggtccatcagaaggggtttaactagaggtaaataccaggtcactctacctacagcatctttttactgtgcacttggagggcaggcaaatggagcccagctgtgtgaactatgttaaacataaacactattttggcagagagagctctcaactctggttatttttccatattttatatctaaagctgaattttagctgaatgcagaagaaatgttaatatttactgattctcatctctttctttctcctccctgcatcaaatgcaattcactcttttcaatttgtacttttgaaatataaaaaaggtcttaaattttggacgtttattgagaccttccacatgtcaggtatagttgtgggcaagtgggataaacatcagaataagacaaggtctctgccctccacaagctcaaagtctggctactttggggaaggccaataaatcaacaaataatcacagcagaatgtgaccaataaatgctacacaggaatacagaagagaaagtcagaggtacagttactgtgtacaaactgttttcctgaaaatcccatacacttcattaggttcaccatgttaagaatcaaatttaggccaggcgcggtggctcacgcctgtaatcccagcactttgggaggctgaggcaggcagatcacttgaggtcaggagtttgagactagcttggccaacatggtgaaactccatctctactaaaaatacaaaaattaactgggcatggtggcaggtgcctgtaatcccagctacttgtgaggtggaggcaggagaatagcttgaacctgggagttggaagttacagtgagttgagattgtgccactgcattccagcctgggcaacagagtgagactctgtctcaaaaaaaaaaaaaaaaaagaatcaaatttactcaaacaattgtcgagggaaaacattggcacagaattcagatgttgtaggttagcttctcacctcccacatccaacctatcacagggttatgccaagtgtattacacatttctcaaatgccccaccatcctcactgcatttgattattgaaatggtctccagttctctccagccctactctgaactgtcttccattgctaccagagcacaggctcactgacccagtctcacctgtgattataccccttttgtgtcctgcttaacttcacagatccttcattcatgcatccccctgtacagcagtatctggttacttacttgtcacctcagtttgactgtaagaggcttgggggcaggtgacatatcttattggtctatatccctaccaccacatataacaactaaaatgagtagacacttaagaaactatgccaagaattagcaaataaacaggactgttttgaaaatgtcagatgtattgcacatgctagaatttttgtcctgaagaagaaaaaatgttactctttagcagacaattaggtaggttttaagaaaattgtagtatatattttgactgtgtctttatgaaaccaagtaaagggaggacattttcatttgttatctggatgtttgtccaccattttaaatttgccatttttcttttcttttctttctttttttttttgagacagagtttcactcttgtcgcccaggctggagtgcagtagcgcgatctcagctcactgcaacctccacctccagggttcaagcaattctcctgcctcagcctcgcaagtagctgggattataggtgcatgccaccatgcccagctaattttgtattttttagtagagacagggtttcaccatgttgtccagtgtggtctcgaactcctgaccttagatgatctgcctgcctcggcctcccaaagtgctaggattacaggtgtgagccactgtgcccggccaatttgccatttttctacatagccattagcaaaataactaagttatcaagatttgagatcagagcatcttttagcccttccttcactgctattctaactacctcaattaattactataccagtatgatcccttctttagattttttttttttttttttttttacttttaagttcaggggtacatgtgcaggatgtgcaggtttgttacacaggtaaatgtgcatcattggaggtttgctatatgggttatttcctcacccaggtattaagcctagtatccattagttatttttcctgatcctctccctccttccaccctccacccttcgataggccccagtgtctgttgttcctcaccattatactagtacgatctaaagtcagctgtaaaattataaagacaggaacatgtaaaataaggaaccctgtaaattaattttgcagtacatttatattttcattccctcctccccatcagtttggcagtgaacctgccttgcatctgacagcgagctctagggtgcatttatgccccctttttgcagatatcactacgtaagacctctgggtttaagatctggcttcaagacatctctattcatactcagtggggatcaacttcactgtgtatgtagtaggaggtgatcagaaaaacccagtctgtctaaaataccttccccttttcctagatttgccagcagaactgctcttttggatttgagacctaattggaggtcttgtctgtggcaattaaatgaattcttaaaatgtacctgctagctgaggagagaggtgagattagttccttcccattaacaccttaactcccaggtacacattcacatggattagtgtgtgataatcttggtgttgtaacagtagaggccccaaagacactgaacaaaaacagggcattttaaaaacgtttaaaaatatgaactgtaaagatgaacatagcattagagaaagttgagagaaaaaagcacaatgttctttgattatttttattaactgtattctttcaatgctcacattttgcttttataacctgaaaaaatatcctaaaacatgctttttaaaccaatattccacatcttgtgtaactactaccattattgtgtccttccttacagtgtgtatataaatatttgtatatggttgggatcagtttgtgatatatttccttttgcaacttaacattgccaaggcacttagctggttctcatactaagttatttaactgtctaataacttaagtagatgaaccttaatttatttagaatcccgtattgcagagtatcttggtcgtttctaactttttagtataaatagctcggtggtgcacatttccacgcataaactgcccctcctcccttcctcccattctgaatgacagggctggagcgggtgggggtctctgaagggtcctggggatgtctttcgtccaagctcatgcccttcctaattttgcttagtcactccttcctcccacccccacacatactcgacgtagaaatggctgggcataaagccaacatctggtgaccagaccaggaaaggggccaggagctggggaccaccgggtgagaggaggttgaggggtgctagcgaatcccacctaccctccaccctgcaccgcagctctgggggcgtccttgcccaggactagtttcagaccagccggcgactcgcaaggccaggctgcttggccaggctgctgacttttccaaaacgcgaggggacagtccgaagagttcccggacggattagcccaaagagctgcgggcgagggtcggttgagggaagaaaatgtgtgcgcgacatgcgtccgaaagctagacttctgatcctcgctccccgcggggctggacccgtgaccctgagctagtcgcctgactcgccgagcctcagtttcctcacctgtgaaatggggataattgtgaagatgaggagataacttgagcacagcactctgtgcagcgccaggcaccgagtaagggctccataaacgctaaccaacccgtgacaggggaaaattgaggctcagggccatcccgtccaagtgttttgccgaggccccagggcttggctagggatggacgccgggtgtgaacggagtcgctcgcagcccagcggccaggagctccgcgaggatcgaggggacgaaactcaccttcttggcccccgggcgtccagcaggtgccatggtgccgcggctctgtgggcgccgggttcccgggcgcgcggccgtctaggagcccgcccccagcccggggggaggatccgacccccgccccgccggccccgcggcctcaggctgcccgctggcctcggagcaggcgcctgcgccctcggcctcggcctagtcatgctccgtcccggcgcgcagctgctgcggggcctcctgctgcggagctgcccgctgcagggctcccccgggcgcccgcgctctgtctgcggccgggaagggtgagtggggccccgtcctgctcagaggcgacggggcggctgcgggggtgggagccagaggctgaggcaggctcaggggttaggagcgctctggcctccaagaaataggccttgatatatcttctcgaattatcttttaattataaagtgaaacagtatccaaaggttccccgtgtaaagtctctcctgccccaatccccttggccagtgaacaattgttaatagtgtcttctgaatctaaccagagacagtctangcataggcaaacacaggtcagtataggttttcctttggctttttgacatcttgctttttacaattatcaatatatcttggagattgttccatatcaacacgctgacttgccttgttccttttaatggctgcatagttttccatcctgtcaatattctacactatcgttagtctattcattaacatttaaatggtttttggttgtttattactgcaaataacgtgcatgtgaaaattcttakgcatctatctttgagtacatatgggagtcggtagcaacagtttttaaaggtgaacttgttagggaaaaggttacgtgcatctgaaagattgaaagacagcaacacattctccaagtgggtggcaagagtttgcatgcggcacaccagtgtgtgtctktttcccacatcttccctggttcccagaatagcccattttgtwatctttgctaaatctgataggtaaaaatggcatgtccttgttttgattggtctgtatttaaatatgagcaatgctgaacatctttcgacttcttatatttgtagattattcctggttgccaggaaaggcttgtttatcagcatcactcaacattattatgagttgattcgaattttattttatgtcctatgacctgaaattctggaatcagaagacctgcttttgagttccatctatccattcaacaaatatttactgggtgttgtgatgtgctaggtttgtctccagtactgggaatgcagtagccaccaactcacagttcctgcgccatctgttacacagaatgtgaccttacacttctgaggttcagtttcctcatctataaaatgaggatactaattttgctctatataactcacaggattgctgtgaatattaaataagagaatgcatgtgaaagtgctttgtaaattgtaaagcaatgcaaaaatatttataataatgatgtttttaatccagtgcaaaataaaatggaaatttaacaaacaaactgattagataaataagatacaaatttcaagactatccaaaaaattcatattttggctgagtgtggtggctcatgcctgtaatctcagcactttgggaagctgaggtgggcagattacttgaggccaggagtttgagaccagcctgatcaacatggtgaaactctgtctctaataaaaatgcaaaaattaactgggtgtcatggtgtgcacctgtagtccaagctgcttgggaggctgaggcgggagaatcgcttgaacctgggaggcggagactgcagtgagaaccgagattgcaccactgcactccagcctgggcgacagggattccatctcacaaacaaaaacaaaaacacccaaaagttgagttatttcaattgcatattctttatatacccaatttcaaactatcaaaaaatgttttattttggaaagcagttgaacaagcatacagtttgtgcttatcatttctaatacagaagataactgacctgggttttttgcatggctcctaagttttatttcaaatactcttataaacatcctcgactacattcagaaggattttaagatagttatccacataatcaaaaacactatacctagtctgaaacctattatggcatgctgggccgaggaaatactatatatttgataatgctttatcatatgttgccaaacagaaccttcacagctccgttttgcaaatgagaaaactttgagacccttgtgtaaatttctctaaaatagctgttcagttggattggggactcaaacccaggtttcctgatcttaagttctcttttgttgttgttgtttcaactgaccactgtcctgaaagaaataattctttcttttgaacacacaaaaaagaacctttaagattattatttttgtcaccactataatggtttcaactaaagtacaagatatgcccagtctgtttaaaaatggatttccgtccaaagtagttgggtcatatgtacattatttttttctcacacagcatacaaagagacattaatagtcatctaaaaaccggtgaaacaaaactgctgaaacatgttgtggcaccaggaaataaggacatgctctaagaattatgtagccatgtcaaaagcatacaggagtcaactgaaagaacctcctgctggccaaatctaggacaatttggtattcaaataaatgatgactagtaatggattagaaaccactgaaaacaataaatatccataaattcatgttaatataaacaaccaacaaacaagggtgaaagaaaattacttccttacagtagaatgccaactattaaatataataggaatgatggggttaggaaataatcaatagatgttaaagccactcagtaaaagtttgataaggaccaggatatttacatggtctcaaagtaacacttcacattattacttatacaaaggaaaaaatggtagctttactagacaaatcagacagacaccaccttaagcaagtcatcagacagaaacaacaccaatatcaggacaaaccaacatcatacgcttcttaatcatatacactgggaaggagtcaacatcagtttcatgatgtttttgccaaaaatgcataacataagtctcatcatgaggaaacaccagacaaactcacagtaagaactgttctataaaataactggctagtactggccgggcgtggtggctcacacctgtaatcacagcactttgggaggctgaggcaggcggatcacgaggtcaggagatcaagaccatcccggttagcatggagaaaccccgtctctactaaaaatacaaaaaaaaaaaaaaattagccgggcgtggtggtgggcgcctgcagtcccagctacttgggaggctgaggcaggagaatggcrtgaacctgggaggtggagcttgcagtgagccgagatcgtgccactgcactccagcctgggcaacagagcaagactccatctaaaaaaaaaataaaatagaataactggctagtactcttcgaaaatgtgaaggtcataaaacacaaaggaagtattaggaactgttccaaattaaaggggattaaagagacagaatcctggatttgatctctgactggaaaaaagtagctataaattgattggaataattgattaaatttaaatatggactatagataatagtatatcaatgttaaatttcttgactttgaaaaccgtactgttgttatgtaagagaatgtcctttttcttaccaaactagcaaaagaatatttagaagtaactgggtatgatacctacaatttactctaaaatgtgtacacacatagaatatacatattataatatacatatatgtatagtcatgtgccttataatgatgtttcggtcaatgatggaccacatatacaatggtggtcccgtaagattataatggagctgaaaaattcctatcacccaatgatgtcatagctgtcataatgtcatatgcaacacattgctcacgtgtttgtagtgatgctggttaaacaaacctactgtgctgccggtcacataaagctatagcacatgcaattacatacagtacataatgcttgacaatgataataaatcactgtgctactggtttatgtatttactacactatactttaaatcatcattttagagtatactcctacttataaaataaaaagttaacagtaaaattggctcagacaggtccttcaggaggtattcctgaagaaggcattgttatcataagacatgacagctctggccgggcatggtggctcatgcctgtaatcccagcactctgggaggccaaggcaggtagatcacttgaggtcaggagtttaagaccagcctggccaacatggtgaaaccccgtctccactaaaaatacaaaaattagctgggcgtggtggtacgtgtctgtaatcccagctactcgggaggctaaggcacaagaatcgcttcaaccttgggggtggaatttgcaaagatggcgccactgcactccagcctgggtgacagagtgagacgctgtctcaaaaaaaaaaaaaaaaggaaaagaaaagaaaaagagatgacagctgtgtatgtgttattgcccctgaagaccttccagtgggacaagatttggaggtgtgaagacagtgatattgatgatcctgaccctgtgtatgcctaggctaatgtgtgtgtttgtgtcttagtttttaataaaaaagtttgaggccagacacagtggctcatgcctgtaatcccagcactctgggaggccaaggctggaggatcacttgaggtcaggagttcaagaccagcctggccaacatggtgaaacctcatctctaccaaaaacacaaaaattagctgggtgtggtggtgcacacctgtaatcccagctacatgggaggctgaggcaggagaattgcttgaacccagtagktggaggttgcagtgagccaagatcaagccactgtactctaggctgggcaaaagagtaatactctgtcttggaaaaaaaaaagtttgaaaagttaaaaaarwatatatattttgtaatagaaaaaaggttccagaataaggatataaagaaataaaatatttctatatagctgtagaatgtgtttgcatttaaactgttattacaaaaatcaaaaaaatttaaaagtttataaaataatgaagttacagtaagctgttaatttattattgaaaaaagaaaaatacatttaaaaataaacttagagtagcctaaatgtacagtgttgataaagtctacagtagtgtacagtaatgtcctaggccttcacattcactcacctctcactcagactcatctagagcaacttccagtcctacaagcttgattcatggtaaagtaccctagacagctgtacmattttaaatctttttttttttttccttttgagacagggcctcactctgtctgctaggtctgagtggagtggcgcagtcatggttcactgcagcttcaacctcctaggctcaagcagtcctcttacctcagcctcccaagtagctgggactataggcatgtgccaccaagcctggataatttttgtattttttatagagacggggcttcgtcatgttgcccagggttgtcttgaactcctgggctcaagcaatcttcccatctcggccttccaaagtgctgggattacaggtgtgcatcaccaaacctgacctgttctctagattctttgaaaaaaagaagctacttgttcatttctttggctatagtagctacaatggaccagaatcattatatggaatggggctcaaacacccctcccccaaccaggttgcctaaatcacagtttagatgctccaaattattaaatcagtatcatgcaaatctcagtcagtgggtgttaagtactagagaaacgggtaaggggaagtgctttaggccagaactatagctaccattgccgattgaagttcccattttaactttccctcttccagagaggaaaaaccacccttatctgcagaaacacaatggaaagacagagcagaaacagtgataattggaggtggctgtgttggtgtgagtctggcttatcacctggccaaagcagggatgaaagatgtggtcctgctggagaaatcagagctcacggctggatctacctggcacgcagtaagaaaagcaccccaaactgtcataagcgtggaattgtgcatgagtaaagtccatttccttcccgttcacaactcccaactgtgagctctttagagtgcgttccccttcaatagcgttggaagtgcagttgtagtttaactggtgtacttccagatgacaactaatatttatgatgtctttatcttgaacagatggcttctggattcgaatcctggctttgcaattttctacccttgtgtgacttttggcaagttacataagtttccattttctgatgtcttaataggaatattaatagtacttacctaataggattgtgatgaagattgagttaacatgtgcaaaattattaaacgcaaggtattggataataaatgtcagctttatatggaaggayactgtctgggtgagcctggatatgggcccaagatctttacctatactcccctcacctgcatttggtggtccttttatttacttatggttttatttatttttattttttattttttattttttttgaaatggagtctcgctgttaccaggctggagtgcaatggcgcgatctcggctcactgcaacttccgcctcccaggttcaagcgattctcttgcctcagccttccgagtagctgtgactacaggtgcacaccaccacacccagctaatttttgtatttttagtagagacggggtttcaccgtgttggtcaggctggtctctatctcttgacctcatgatccgcctgccttggcctcccaaagtgctgagattacaggagtgaaccactgcgcctggccttatggttttaattttatgctgtgagatgacagtttggccccctgaggacttgaatatgaggactgcaaaagtgtagcacagcttttgtgttacatgagacacaggccaagtcagtcttgcattcttcatggtatgcataattgttccagggctgcgccataattgactaggcttacctggaaagctgcccaggtagatgaasggattgacactgctgtcatattgccaaaccagggatttctgacatcatttagggatgggagaggaagtttttaggactgctggtgcagttttcttttgggcagcgttagcccctgctcatcatcccatttcatcattagccttccttggctgagaagagggaacctcactttgaggggctttttgacatctagtatgtgctcaaagtatagggtggagagtctagcatgaaaaggattgcctgcttccagctgaatctgggggagagtgctgcccagacataaaagcccaaagaccttgcccttgtggaactcacattctggtggggcagacagaaaacacctatcaatgctagagagtaatcaccatgaagaaaagtaaagtacagtcaaggatgcaaaatgatggaggaggagaagaaggaggtgctagggaggatgtttcaaagaggcgacctgccaacagagaccagggagcagtgagccagggggccatgaggctattctggaaagatcatttaggcagggaaatgtaggcaagtggaaatacccttcgagggagggcttacaccctctcaccacttctgaattgttactgagggcatacgctttaatgtttgaattacttatttgctcacttatatactgatttaatgtgacctgcattggattttattactattattattatcattattttttgagacagggtctttctctgttgcccaggctggagtgcagtggtgcaatcatagctcactataagcacaaactcctgggctcaagcaatcctcccagttagctaggattatacaggtgtgcgctamcatgcccagctattttcttaatttttttagaaatgggggtctcactatgttgcccgggctggtcttgaactcctggcctcaaatgatcctccagcctcaacctcccaagactttagaattacaggcatgagccatcgcacctggcctggcctgcattttagaagaggttacgggattccttgaaattttatttcttagatgtcccatgaataaaaagcaacatacccttaatctaaaagttaactacgcaaaatatttttttcttaaacacaaagataccaaagtgagtggggaaaggcattatcctgctttgcatacaaggtattaggctatggtttacaaaataaggatccatgcaatgtgagttcaaggtggaatcaggcatyagaagccaggttatttggcccccttggaataaaagacagttgtcctaggaagttgattctagggttttttgcaagtcaaagatgcctccctctgagcagcagcatgaagaaatccaacatattaggtgtttgtgtgtgtgtgtgtgtgtgtgtgtgtgtgtgtgtgtatgtgtgtttgagacagagtttcactctgtcacccaggctggagtgcagtggcgtgatcatgactcactgcagcctcaacctacgggctcaagcaatgctctcacatcagcacctgtagctgggaccacagctgtgcacgaccacgccttgctaatttttaaagttttttgtagagatgaggtctccctacgttgtccaggctggtctcaaactcctgggctcaagcagtcctcccacttaagcctcccaaaktgctgggattataggcttgagccactaagcctggccgcattgattttttttttttttttgagacagagtctcactctgttgccaggctggagtacagtggcatgatctcagctcactgcaacctccatctcctgggttcaagtgattctctgcctcagcctcccaagtagctgggactacaggtgcgcaccaccacacccagctaatttttgtatttttagtagagatgaggtttcaccatgttggccaggatggtctcaatctcttgacctcgtgatctgccctgctcggcctyccaaagtgctgggattacaggcgtgagccaccgcgccaggctgatattaagaatttttaacaccgagrtatttgtggagtagatctgagaataaggaaggttgcagagccagctaacaagaggcagactataaaaataaaggcagtttccctgaagcacgatatgtgctccatgagagaagtgtctggagagtgtgggaatcaaatgcttggagaggaaagcacagcttgcaaagtgaatcttctaaatggaatcacaaatccataaatcctaaggttttaacaagactgctttgtcagctcatgatatacctaataggatagagcatttcatgtggatgcagggaaacaagagaggatggagtaagaaggaagttttgagcttgggatcccgagaaggggctgcccttggggatggtaccaaagtagatgttttgagagctgaggactaaagattcaggatgatccatttggggtgtaggaggtgatataagaactttccatttgtttttgtctgcaaatgtaagaaagaagttaagctttactgatatttataaataaccctcacatttgatgtggatgatgtgttgtgtatgatttcaaggttgactacgcgggaggttggcacttcatggtgggagtgtcctcattctttctcttgtcttccgtataccatgacatggtgcagattgcgtgctataggatatcaccattgtgattagctttatagaaatagggctttaaataatatcatgtgtgatgaaagggagaggggtgaactttggagtgttgtattacatacaggtttcctggttatctactagcagtagctaaaaagttgtgaatgcaaatggctgccagtgatttctacatagcagattatatatttaaaaaaatagatgcagcctgtcccttcacagaaaaagtgatgctttcagtaggtgagaaataattgccttttgcaaaatagtcctgttgggaaarcagcattttgaaaagggatgtttggaaatgttggtattattattaggttttctgccccaaaatgatatgtatcacatagaaaaactctcatatatgtgagaaataaacttttaatccatttcaawttttttctaaatgaggagtttcaacaggatttgttcccatttacttaaaatacaaaaaatgcaataccttccaactagtttgtaacaacaggcagacacaagaacatgaaatgtcatagtcaaatgtgaagagaaaccttcatatgggtgttgactgaggtagaggaaggggtgtcaggatgcagagacacagccaatcgtgcacttctctcacttgggtgtgtgcctcactgagcggtgtcttctgcagctataccaccattgaaagcagtctcaaaataacgtaaagccagaaccaggccttcacatcgctgtattacaaacgttaaggtagcacagatattttaatagtgaaatgtattaatcacatagctcttgctaaaatgttcttaataagcttcatattcaaaagcttttctacacagtatataaaataaaaagtgtttttgagtacttcacttattctcagttgttttgtgtgtttatgatctctattaatatttacatatcacatgtaaggaaagaaatacacgtattttagtggttatattccaaactttgtattgggtgtaaatgtatgagtgaaagatttggagccactggaatataggatggtttgacatcagtcactggactttttgaggtagtagaggctcctgagagagggagaggtttgttaaggagacaggggaagcactagttagcatccgttatgcyatccattatttagcatccaggaatgaattttctaactccatcattccttctatcttattaattgtcagtctaaggaagacctttacattctcctgtacttatttgtttatttatctcaagaaagatttacaaattcttaatttatttgaagggttgtaattcttaatgattatatctccgtttcatcttcccttccttatcttctctaccagctacaatcactttttccaaaygacagctaaactcctttcctatgacttctgtgacctttctggcatcttctctttccctagtttcatagttactatgtgtctaggactcaatcatttacccttgatttaattgtttcctgtatgaaagtttcataacctcagactataaaatcctgagtgataagaacaatgttttctccttctttcaggcttctcatttaatatgtcctcgttgaagtcacagaagattaaaacattgtgccatcttcatattcaagcctggcacttacattaacaaaagataccatgtgcaatatcactttcaaataatttaaatggaagcgctaatatgggtagccccaaattttaaacacagattttaaaagccaatatataaaagaaagggtataaaaattaaataatttctatgtctgagtgagaaaattgagtccatatcttacttctgactatcgtagcagcaaggaaaagagggtagtgtaaattgtttagtagaactgggtatactgttgcggtaagggagactaacttttccttgacaacgaatttctaaaataatttgttacctacacaaagtacattgggctaaatgtcttcagtaagagtttttgaaaaaatgaaccaatgtgaccttttcacatgaaagagaattaacttaaaatttctggagtgagggagaagaggattgcgtagtgtagatagataattttccagtggtctagcttaacccaggtataaagcttacaggatcttgaggagtggatggtgatcagtaccctaggccagtgcttgtgatgaccagatttctcaactgaaaatatatattgtcagttttatataggacatatatataggagatatgtttaagacaaaatgggggtcactagcagatacctgaaggccagagattctctattattgaaccaggaaagtttgcatgcacactggataccaacatgttaaagcagcagggcatgtttggccatgaagttgaagagtttggcttacaggtgcattgtaatggaatcccttctctacttccacatggagctgtgctactggatgacctataagctgggccaggatttttcttaaaaaaaaaaaaatcagccatggatatgtccagatgtttgaacaagtactggatggaagcctcagggttttggttataaaggatgattgacaaactttaatggcatatttgagtgcaggaggatgaaatgcccaccactaccatagaagtaccttataaatactcctaagtagattttactgtgaacagattgtgttctgatgagctttccaggataaattagctgcccagtgaggccccagatatttgagagaacctgcttcaaataattgcttagaattctttttctggattccacattacatctgccagatttgagaaaaggagttttagtgtagctaatatttagatacttttttctgagaataatcaatcaatatttattcaacaaagatttgcagtgtaccacctatgtgctcatcaaacaggttaaactttgacaaaagtctgttcacctattcttcaggctccagtgataaggaattttctaattcttaaattttgcaatttcaggaaagggccaggagggctgctccatttaagagaagggtggagactgggtcaaagaagatcctgtgctagtccatggtccttctgcttaagggaacacacacatggtttgctggcttgaatccacattgtatgccattcccccattacttttttctgttcttttttgagacagagtctcactctgtcacccaggctggagtgcaatggcgtgatcttggctcactgcaacctatgcctcccgggttcaagctattctcctgcctcagcctcccaagtagctgggactgcaggcttgcaccaccatgcctggctaattttttgtatttttagtagagaaggggtttctccatattggccaggctggtctcgaactcctgacctcaggtaatccacccacctcggcctcccaaagtgctgggattacaggcatgagccaccacgcctggcctcccccatagttttatttatttatttattgagatggagttttgctcttttgcccaggctggagtgcagaggcgtgatcttggctcactgcaagctccgccttttagtttcaagcaattctgctgcctcagcctcccgagtagctgggattacaggtgcccgccaccacgcccagctaatttttgtatttttaatagagacggggtttcaccatttgtatttttaatagagacggggtttcaccatgttggccaggctggtctcgaactcttgacctcatgatctgcccaccttggcctcccaasatacttttctatatagtcatayataggactatatagcacatagtcctaaaccttccatctaaatcatcccatttctgaatctctgtacaacgctatccatgttaacttgtagggacttaacatgtatgtttattggctggctctcactttactcacatagttcacattgcttcttaaaacctgtcatgagccttatgctctggtgtgctcaaactggtgctgatgtgttctcatcccaaaggactggctggtgcttctcagtttctttccagcattaaattattgcttaacagataaactgtcaacattttgagaatgttaattttttttcagtatttcttttcctctctgcttttaaggcaggtttaacaacttactttcatcctggaataaacttgaagaaaatacrttatgatagcatcaaactttatgagaaactggaagaagaaactggkcaggtaaaggcatttaacttgaaactgtstgttaggtcggcttctcagaaacatgtaagatttctgaaggattttgatgcatcattgtgtatgaccgtgtggagtgcttaatgtagtagaggaatatgatgagagtttaaggtaagaacctctagagtctgctttaaaatcaacttaatttctcaaagtatattattcatgtcatgaaccattctttattttttaaatgaagaaagaataaaaagcagctttcaaaagtatctttagccagttactatatctagaaactaagaaattggagtctttcagcaattgcattgcaaaggatctgacgatagaatgtaccagattgtcccatgactctgaacagtacttcattaagagcccctcactttcatgtttatcccttctcatatttactcaaactctcaaaataaaatggcaggcaaaagagtatccataggctaagactgaggtctcaaattttccatgtcacttcccttgcctaaaccatccaatggctccccacagtctaccagacaaagccaaaggattagcatggccttaggaacatgacctttgtcagctgacctctgcctgctgtcccaactgtttctttttccattcttccctctgcttatctgcttcagctactctcaataacatatagttttggaatgtgctgagctctctcaaatcactgctttttgtttttgttgtgttctgttttctgctgcttcccctggccccatcttcggcatccaccttccctggggtcaccacctttgagaagccttccttgacttttcctgcctgctaggcaagtcaaagctggaggtcccatctcttggttctcagagcatttgtgcacacctcttttataacttgaatctctctctattgtaattgttgatttacttgttggtcctccctacaagtaacttgagggcaagggctatatcttttatctctgtaactgagtgcttggcaaactgaaggactttaataaatgtcaaatgaatgtttacttcaattcagacaatctaagcattgcaacattttgattctacatgatctctccttaaattttttgtctttctcyttttcatacagtttttgttcacgctgtacattaacactcattccatgctactgtgattttgcatttagctgtctgtcttcaactgtggggtataaattccacttaggcagagtctttacctttcttgttcacccctacacctgyggggcttagaatagtgcctggctccgaacaggcacttagtaaatatggtagttgctgaataagtgtcttttaataagatgcaaatattttaatagttatttctttcactcgtaataaatctttttgtacagctgcattttcattatactggagcagaaccatgtttgagtaccaaacaatgacttatttatatgctctcactggaattattgtcacaggtggtgggattccatcagccaggtagtatcagacttgctaccacccctgtaagggtagatgaatttaaatatcaaatgactcggactggctggcatgcaacagaacagtatctcattgaacctgaaaaaattcaagagatgttccctttactcaacatgaataaggtatttatcttaagggcatttttaccatttgttgacttaagtaaaaattagaaaaagttattaagaagttaactaaaaacagaaaacttggtacacacattttaaatgtgacaaaatcatatgattaattttggaatttgggtaacttacaagataggctgttatatacagtaaatgatatataaaaaggtaatgacaaatcttgttagtttttcacctttgacaattgattaaacattttcaatacctttccattattgtgtcccccagatctaagggtttccatacacaaaccttctgtttgagaactgcagagagaatgataacctgatatgataaatgtctagaaagactgtggtattaaaatgttttaaaaatcaaattaagaaatgccatggtacgttgctctacaaatatcacctagcttatagctgtactccccttacagactctgtgctaggtacggatctagatttataccacatttgcctgagagaacctacttgacatgaaatttagtgttttttcctagtgggtaataattccttttgaataataataacaatggctaacacttactgtagcacatatttatgtaccagttagtatgctaagtccttacatgcataatttcatggcacgtatttatgtaccagttagtatgttaagtccttacatgcataatttcatgtaatcttcacaataatagtatggggcaggctggatgccatggctcactcctgtaatcccagcatgtggtaaggccaaggtggggggattgcttgaggcgaggagttcaagattagcctaggcaacatactgagacctcgtctcacacactcacacacacacacaaaattaactgagtgtggggtagtaggattccgtctgtagtcctagctacttgggaggctgaggcaagaggatctcttgagcccaggtgtttgaggttatagtgagctatgattacactactgcactccagcctgagcaacgaagtgagagcctgtctctaaaatttcagaaataaaaaaaaagtttatatctatatctatgttatgcggtatatattattgttaaacaggaaattttagctcagacagtttacatagtgagcccaagctcattcactagaaagagctggagtagagatttaaacccatgctctctgactcccttgcattatacatcttgcccaagtgtatcagatggggctgttggggaaacacatgcttatttccctgctggtgaccactgcagcagttcccatctctgagggtttgtatcattgacttgggtgctagggttgtttgcctttgcgagtcttcacaggctgctggcactcccttgtctatagttgtgtgtgataccagtgtgatggcagattggtgttgcactgcattgtctgcattgaaattttacctccactaccagtaaggatatacttacatttgtttatatgtcaatcctgaatgctttgctggaactcctcactatcatgaatttttctcaagggcattcattaagcaatgggaatatgtgtgaagggtattctctgcatctgggagaaggtaccaaaccaaacagatgtgggattactacaacgaggtcctatccattataaaacacctgtgtgacatttggaagtctttagaaatgtgaattcccttaaaatagaaagtcccttgcacaagacctataataaatgaaaggattgaattcgtaatcaaaaacttcccacaaagaaaaccccaggcctggatgacttcactagttaatttgaccagatatgtagagwagacttaatgccaatctctctcaaactcttccaaaatagaagagtgaatgcctctcaactcattctatgaggccagtattgccctgataacaaaatcagacaaaggcatccccccaaaaagaaagactggtatcccttttgaacatagatacaaaaatcctcaacaaaatactagcaaactgaattcagtaacatataaaacagattatgcagtatgaccaaatrgaatgtattccaggaatgcagggttggtttaacatctaaaaattaatcaatgtaacaataccacattaatagaataaaggacaaaactacacagttatttcaatagatacagaaaagacatttgacaaaagctccttgcttgtatttggtgctcagccaatttttgttgaatagatgagacccatatataatatttcactgatcattctatcaacgtatcccatctgagtttcattcttctttgttttccccacagtaccttgcctgaaggcctaaaacaaagtagatatgcaagaattaattgttgaatgattgaatcaaacataaatttcctgacaccagatatattatttaaygtgaatttattaacagtattaaaaattaaatataaattataattgatatatcagttggaattagatttgtcttcaaatgtcagaaaccaaaataagaaggtgtaaacaagatagaggtttatttctctttcttttcagcagtccaggacttgaatggtggctttttcatgaagtcttcagggacccagtcactttccagatcaagaaacacttttgaagtccagttttactaaacgtttactagcaggatatatttttactgagtaataagtatatatatatttgagtattgactctggtatgattgatttaggttttagctggattgtataatcctggagatggtcacattgatccttattctctaactatggcactggctgctggggctaggaaatgtggtgcccttttaaaatatcctgcaccagtaacttctctgaaagccaggtcagatggaacatgggacgttgaaacaccacaggggtctatgagagcaaatagaattgtgaatgctgcaggtaagcatatcatttttttgaaattagtgttttttaagtgccaaagaaagaagatatttagccgtaatgtttcgtacgatggacattgtcatgaagcactgtgatgctcccaagttaaacattttgtctgtttctaagtgacaaagccctccctctatcactttgctcttggtggatgcgctatcactctgtccttggttatccaaaaaaagttgcttattttctccattctgcattttattttgctccagattgtgtttttccaaattatgtttatttttccttcctgtattcactgtttctctatatgaataaccagattctagtgttgaagttcataagcatcctctttgtgtccaatttgctttttagggcagatttgatcatttgggttctctctcatccatttctgatgacttttgactctagttgaaaaagtttttaaatgcttttccttctagaacattattaaacatatttcataatcttctctttttgttgttctgttacgtttggactcagagtagtgaagccaaaagggatatttgggataatccaacaacacactcattttcatttgcagaggcaaggtccaaaagggtcatgttacttggccaagcggccactgatcgttatgtcagagccaggactgggatctggccttttgattcttgagttaatacactttctaataggtggattgcatgtcaagtcattttcaagtatcacacatgcaaaataaattacagtgaaaatgcttgtgcagtctaaactgggataatagtctatattttcctatggtttataatgtttcctttaaaacctaaaataagcatgaggcagtgactgattttctttgagctcttgcttaaattataaaatgaaaacaatctttattatttatcagatcaaatgatatcccatgaggacaagccagaaacccatacccttatgattctttcctctgtattgtaacttttgaggtatatatatatatatatatwtttttttttttttttttgagacaaagttttgctcttgtgccccaggctggagtgcaatggcgcgatctcggctcactgcaacccggtttcaagcgattctcctgcctcggcctcctgagtggcaggaataacaggcgcctgccaccacacccagctaatttttgtatttttagtagagacggggtttcaccatgttgcccaggctcctctcgaactcctgacctcaggtgatctacccgcctcggcctcccaaagtgctaggattacaggcgtgcgccactgcgtccagccgattgatattatttttaacaaagcatttttagtggtcctagagaaaaagtcatgtcttcaatatttaagtgtctaaattagttatttccgaatttctctcacccatgcctcctatttgaaaagccataaagtctcatgctttctttaatataatttgaaatttgcaataatataaaataacttgcctaaaaaataagagcagtggtacaatacaacgttgcattgtttttaaggctcactttccctccagtctccatctgacactatcctctcttaatgtccttaggaatctctggtctaaattctgtcagaaaacttagggcaatgaaataattcagacttttttctaagtagcaaggattctttgtaattttgcaactttttctatagtctcatgaattcaggccctaaaaacatttgactgttttcatcattatagcaaatactaaagtaacatactgagacttccacatccagcacctgtggcagacattgctaattaatcgctgcactcatttcagatggacttggacaaagccccaccatttttctcaacacagtactttaggcaatcatacattcctgattgacattttgagaaataacatagaagaccttaatttaacacatttatgcattgttttcctaaaatggataaacatatgtacataatgaattgtcattgtaatacattttttttctaaactacatactgtaacaaaaaggaatcactgaagaggaagatagaatgatctccaaagagatctgacctaaacccgtaacactagttaccagatgaagctttctctgcagctgtgaaatcttgtggggtgatggggtgcaggagggcagggaaaggaggtccttgagaacagcttgtctcgtacgagcctggaaaacaagtccctggtattaggacagtgtggccctgcatggagtggtaatgcctccctttttcccttgttcttgtgctttttgcccagccacttccaatcccttttcctagtaactccaggcatttctttgctgaaacttgtgggaagtagcttatctcaattctttatctcatttagaccagatctctgctccctaatcttttttttttctttttctcttccatcgggcaaaattaccaagaaaatctaactgattacatattagtagtccacaggaggtgtggaggggtgtgtgtgtgtgtgtgtgtgtatgtgtgtttttaattatctgtaagtctgttttcaaaacatctgtatttaaaagatagaagattccccaaagggtaagcctcagtaattgggaacaaaagtttggatatgctcccttttagaactgaagctagcaaagaccagttttatgaacaaaagcaactatctgcagaagtcatcatgctataataaaatgagtggagagtgtgtggctggtggaatgtttcccacagtttctcagtgtgaccagggtatctcccaaattcaggcaaggccctcagaccagcactgaaatatgattaaaggaaccaggatatggacttggaaatacaaccaaaatgaaaaagatgtaaaggctgctggggtctgcagggtatccataaaaagaaaagtctaagagtaaaaatttgtcagctgatgtgttttcggcattgtccatggcagtggcactctgtggcccagagacatagacattgccaactgagtgacttgggtaagttacttatttgtaaaatagggataatagtccccatcttgaaaagttattatgggtagtaaataagctaataatgtaaagtacccagaacggggctcaccaggtagaaagcagtaaaaaaaaaggtataataattattatgatcattgcaattatttccttgatattccatgccgtagtctgggagacactagcatcaggttatgatagcttcttggtaccagacttaagactgctcaactcctttcttttccaatttactagcagagtgggtgcagaatccagcaccgattctgctggtaagttgacttcccaaagagcttggtaatcaagctagtgtgagtaagaatcaccttgggaagtttcccaagcttcaaaaagattctaattcaggtgttctgggtgggttctcagaagctgcattttaaataactactccaggtactgtactgtctgtaccagatgatttgcaagaaaaatctttgaagaaacactattgtgtaggtgtttctaggagagagaatataatgactgtattcggagctagcagaactggggaagtttctgatgcttccgacctcttgatgggcagtagtctaacttgcctttagttaccaaagctttccaaattggcytcactctaccctttccctcaggtacagctcagggacgcgggcaggtactagttattatgatgcaggctttttctccgcatggtgttgaacgtttttctttacctcatttccaattgactcattaaatctgagataactttgtaaaatttacttaagaattttcctaacatggcaaatcagaaatgtgattgggttgtgctcacctgaagctcagtgttcagccaaaaagaattgcttaattttgcctgatactctgcgtcaaagcatgaggccatcattgtcatcatataaaccatctagtagaagtaaacttgtccatgaaccttcagcctgcattttaacctcatttttattaatcactgcatttttaaaaaatggaagccatttccagtagtcatttttaattgactcttctctttagttgtttttcaggtgataatggtagattttagaatgagtcttccacacttgtctctcttcccttgaacttaatgggtgggtgatcaggcaggagttgaagtgtaactctagctagatttaggttaatttgattgacatatggaagaagagaatgctaaaggacaccagccccatagatatctatgggtaaaacagcttgctatgggatttgaagtaatatagtgataagatatttctgcatacatttccactttgtattcatgatgaagtgcattagtaagcaagcagttggactcagaaattcataaatatgtttgaatagggcagaacttatttttttcaatttatgtttttaattgaaacaaatatattggggatactatagcagtttgaattgcttagctaaaaattttgatttttgtatatttaaaaattgtcctagtgtatataactagaatatgtggctttactatatttttgtacacagtcctgacattggtaattcacatcttcctactagcaagagtaaattaagtctcaaaattactaaaagaccaaaacgcctgtacttggggaggctgagttgggcagattgcttgagcccaggagttcaagaccagcctgggcaacatggcaaaaccctgtctacataaaagatacaaaattagccaggcatggtgatatgtgcctatagtcccatctactcaggaggctgagatgagaggatcacctgagcctgggaggtcgaggctgcagtgagttatgattgcgccactacactccattacagcctgggcaacagagtgagaccatgtctcaaaaacaaaacaaaacaggccaagcattgtggctcacacctatgatcccagcactttgggagccccaggcagcggattacctgaggtcaggagttcaagatcagcctggtcaaaatggtgaaatctcgtctactaaaaatacaaaaattagttgggcatggcggcggatacctgtaatcccagctactcaggaggctgagacaggagaatggcttgaaccctggaggcagacgttgcagtgagccgagatcgtgccactgcactccagcctgtgcaacagagcgagactctgtctcaaaaaacaaaacaaaacaaaacaaaacaaaacaaaacaaaacaccggcaaatagctctgatgcccacagttagatttctggtttgcaaatgggtacccgtttctggattcattatacaagtgtgaccaacttagccattgcaacaaacaaaacaatagaatgcaaaggaaaggtttagatggttacatggaaataaacttacacacacaagtacataatctaggttcccagactgactcataattgatgattctctgtctagcttggaacctcataatgatagagacttcagaactccttattagattcagaaaaacagcagagacagtactggttaaaaacttattgtgtaacccctaaagaaataaataggatcatgtaatcatttcaatgatcactcaaaattattatgaaacaaacaagcaaatagaactccctgcccccaaatcatctaatggtggtcagtcaacaccatgtccttgccaaataataagcatttttattattttagattctaaaatccctttatacagtgaaggtgccttggatttttaaaataaagtctgcagcaagaaaaaccaataagatgtgatgattacaggatgtccagtgtggcctggggcatgtcttaccctactagcctttagctcccacatctatgtactgaagggtcagcctgggaaagaatcaagggtcctttcagccacaaattatccagttctatcttttgcaaatgaaaaaaataacattcacctccgcaaataaaacaatctctgtgctaacggtgaagtgggaaacattcgtctggggaactccctgcctacttatgagaccaatctcccctttcctgtggcttctctttctccctggttttgacttctggtgcttttgtgcctttacaataaaggatcttacaaacttattcaaactaaacttttaaaacaacagataaaacttaatgtgctttctctcccgaagtatgcaccattttcaattttagcttaacagaacaatcttgtacttttggaattttaggcatcaacaatttggggagaatagggcttagaggatagaggagttggcttgtagggctttcttaggtatatcattatgtattatgttggtcacagcaacacaggggcctcttcctttgcctgacygtccctgtccacaaatatgggcagtcttgttacggtacttcttactaacatttgtgccttttgtatatttgggttgttcgttttttctttcaaataaatttttttgtttttttcctgcctacctttgcttatgggcaataacattttcaggaatggagttcccctagatcacagatatcttcaaatctctgggtaatgcaaaatattgtcttctcttcccccattcagttttgcaatgacaaaagwttagattgttatgacatttattagactttgccatgagtacttaagccttctaaacattttattctaatataaattgctatatgagtgtcagttatgtgtttatatrtgggctgacacttttaaatgatttttttgtttaaggattttgggctcgtgaagtaggtaaaatgattggactagaacatcctctcattccggttcaacatcaatatgttgttacatcgactatayctgaagtgaaagctttgaaacgagaactscctgtgctccgtgacctggaaggatcatattatctccgacaggaaagggatgggcttttgtttggtccatatgaaagtcaagagaaaatgaaagttcaggactcctgggtcaccaatggagttcctccaggtgggttcagcaaatgaaagtgtgtgctagtcagacatgaatggttcatcctctccatggctggrggatggctgtagaataagacaacaacataatactagactttcagatacctgggacattggaggtgacaggtttgaggtgagctctgttctcgtatccctttgaacaatcacagcagggagtaggggaaaagaaagatgtagttgatggtagagaagctgaagtaacatttccagctgctttgaaaggttccagatacatttttacctgcccacacaacctcctgcctccccgttttttcctcaatccactgccagcttggtctgctttcaagatttgaatatagatgctattgtgcttttacagctrgaaacacaactgatatcagaggccagatatccatcctaataagaaggaaaacccaagagtctataacagagcagggtttttggtactgtaaatggagtacttcccatgctacataagtggatatggaaaaggcttgtgcctctatgccaaagcaggggatactatagtttctctttcaagttctttaagggagatggttctgtttttgcttttcatgaaatacttccacagagccagattgaagattgggtcatctaaggaggtacctcagcttttaatctataaaaagagctaaaaaatcactggggcattgaaatattacagggaatacaaagaaatgtaggaaatggtacttcctaaaattatactttgataagcttcttgagataggaaatgaatccctccactctactcctcaaagagtaggcccaaataatagcamatgatcactaaattgccttctacagaagttaggccagctggtttcagggctttggttgtgctgagtgggctctgcacatttgggcctgagcagaattgctcctgatcccacagggagggttgaaatgccactgagagcctccctctctgctgttcccccatgctggcagcttctccttcaaataaatcttgaacaaatatttaaataatgccatttggagggagagctggattgttagctgtctgtgagcatgggtacccgtgtgtgctagtccaccctgatggtctgcaggcctccatgagactgaccctacctgtagtccccaggaagggcaagaagctggctggctgctgtgtggaaaaatcactagtgttggtagagacattcttttagaagctcatcacaatgacttttaggacaagaggaggattgcacttcaagaccctgcctgttttcagaactctagcccttggatgtgtatgggggcaggctggaggaaggaggcctccacaccattcctttcttgctgaaaggagagttaaaaggggtctaaaatccatcatcttagatcttggaggagtgttccactttttccagtattctgccatgactttgtaaactcccatttgccctcatctcaggggatgaaacaggttcttatggttaattgaagcataacgatcttcttgacaaaccaaattatagtttttttaaaaaaaractgattggattaaatatcagaaactatattattcatacatttaaattttatattaattaaaggttaacttttatgattttgtttcaagaacaataccattgttttcagtaatataaatggatactcatctgttgatagggaatatgaaatttagactttaacaaaaaatggcagtactttcctaacaggccatctttaaatgtaggccatgtcagaggcttaaatcactttacaggacttgtcagctcagctacggcatcctgaccacaagggcaaatctttttaggttttggaaaggaactctttgagtctgatctagatcgaatcatggaacacatcaaagctgccatggaaatggttcctgtcttgaaaaaggctgacatcatcaatgttgtcaatggtcctatcacgtattctcctgacattctgcctatggtggggccccatcagggggtcagaaactactgggtggctataggctttgggtaagtatcttcatgtaattcaacatttattgtagaatcacttattttagctaaatctagttccatattctcaggatgcaaaagggaaatgtgggaggctgagagagagagaaagagaaacagagagagacccagagagttttctccctttcatgaccaaggattcatacaatgaataaaaaatactggttcaatcacttgtatatgttttaaagaagggcaactatttcctggaacacagaagggcaatgatttcctggagctttctctcttttattttttcagatggagttttgctctcgttgcccaggctagagtacagtggcgtgatcttgactcactgcgacttctgcctcctgggttcaagcgattctcctgcctcagcctcctcagtagctgggattataggcacccggcatcacgccggctaattttttgtaatttttttttagtagagacagggttttaccatgttgcccaggctggtctcaaactcctgacctcaggcaatctgcccacctcagcctcccaaagtgctgggattacaggtgtgaaccaccgcacccggcctcctggagctttctctttgcatatttcctgccatttctattaactgtttctggttttatgctgtgtatcttcagatagtcaatttgccccagttttacaaggatgttttcataacacgatgtgacaaagataattcaaaatatcaaatgtataacatgtctgctgcatttttcaccataattcatgtttgtccaacatgatttgtttctttataagtcctcaggttgctttctatttatgactccattgcctctttgatgtttcatttctgatgtttgttccattaatttggtgaatattgatgtcaagcycactcaactatcatatcacatcttctaatattctatttttcttccccattttatttggccatttattcaactaatgtataataactgctagctctgtgccaggcctagggctaggcattggaatacagctgacaacaaagcagtgaggtctgattggagctggagggctgcctgaggcacagctctgctgatccaatagagaagctggggtctctaccaaggtagcagcagtgaagactgagagatgggagataaaatcatctagatttggtgatcaatttcataagatattgaagggaaagagaaaaatggcaaatgatggcaacctttctaacttgaccaccgtctatatgttggagacatggagagagagacaagaaaataatgagttccatttttgatgggttgggcttgaagtgttaagtttaggtatgtgggacatccagagggagaaagtcagatggagatttgggatggaagttataatgtaattgagggttttatagtcacctatagagtccatatgcaggcatgtggaagtaggagtgcttctcctgcacatcactcatgtatcttctttggarmaatgtctattcatatcctttgccattttcataattgggtaatttgtctttttattgtttagctatggaagttctttatatattctagatataagaaccttatcaggtacatgatttgcagaacttttctcccattctgtgggttgtttttttactttcttgatggtgtccattgaaatacaaaastttttaattttgatgaagtccagaatatgtatttttccttggttcacatgtacttttggtgtcatatacaagtaaccattgtctaatccaagttcgtgaagatttaaacctatgttttcttctaagagttttatagttttagcttttgcatttagttctgtaatcagtcatgagttaattcttgcatatgacgtgaggtaggtgtccaactttagtcttttcatatgtatagccagttgtcccagaactattcattgaaaagactattctgtcctcattgaattatgctggcatctgtaatgtcttttttctgattccttttcttacaccaaatgtgtggtattttccagcaccaacaaccarttctccaattctctagtactaactgggtgtccaacaattccattcaattctgacaccaactcctggaattaacatagaccccacaggttaagggatccgttccacaagactgctctcacttcggacamcagtctcaagtctcgggagacacccatacttctgaccaactgggtgttcccacaaccctctcctcagatttgataatttgctagaaccaatcacaaaactcaggaaaatacttatgtttactcttttattataaaggattcagctcaggagtagccaaatggaagagatacataggacaaaatgtgaggggttaggggtgggtggggcagcaccaccaggccctttccaggtgccttcctagcccatcactgtgttcaccaacccagaagctctctgaaccccatgcctaggtctttatggaggtttcattgcataggcatgattgattacattattggtgactgcactcaatatctcttctccactccctggaggttggagtagggagtgagactgaaagttctttattattattattatttattattattattatactttaagttttagggtacatgtgcacaatgtgcaggttagttacatatgtatacatgtgccttgctggtgtgctgcacccattaactcgtcatttagcattaggtgtatctcctaatgttatccctccccactcccctgaccccacaacagtccccagagtgtgatgttccccttcctgtgtccatgtgttctcattgttcaattccgacctacgagtgagaatatgtggtgtttggttttttgtcgttgcgatagtttactgagaatgatgatttccaatttcatccatgtccctacaaaggacatgaactcatcatttttatggctgcatagtattccatggtgtatatgtgccacattttcttaatccagtctatcattgttgcacatttgggttggttccaagtctttgctattgtgaatagtgccacaataaacatacgtgtgcatgtatctttatagcagcatgatttatagtcctttgggtatatacccagtaatgggatggctgggtcaaatggtatttctagttctagatccctgaggaatcaccacactgacttccacaatggttgaactagtttayagtcccaccaacagtgtaaaagtgttcctatttctccacatcctctccagcacctgttgtttcctgactttttaatgattgccattctaactggtgtgagatggtatctcattgtggttttgatttgcatttctctgatggccagtgatgatgagcattttttcatgtgtctttttgctgcataaatgtcttcttttgagaagtgtctgttcayatccttcgcccactttttgatggggttgtttgtttttttcttgcaaatttgtttgagttctttgtagattctggatattagccctttgtcagatgagtagactgaaagttctaactctctaatcacatggttggtttttctggctaccagcccccatcctgaagctacctaggactgctctcctctccacaagagtcatctcattaacattcaaaaaatagtaaatctcaaatgttttatgaattctgtgtcaggaactgggaataaagaccaaatatttaatttttattataccacagcatctttataaaaaataaattgaccatagatgtatgggttgatttctagactctcaattctgttccttcatctgtgtctattcttatgcgactactatactgtcttttatttatttatttatttttgagacagagtcttactctgctgcccagggaatggcacgatcttgtctgactgcaacctccacctcccgggttcaagcrattctcttgcttcagcctcccraatagctgggattacaagcacgctccaccatacctggataatttttgtatttttagtagagatggggttttcccattttggccaggctggtctcaaactcctgacctcaagtgatccacccacctcgaccccccaaagtgctgggatttcaggtatcagccaccacacccagctgacactctcttaattactgttactagaagttactagctttgtagtaatttctgaaatcaggaagtatgaatcctccaactttgttctttttcaaaattgttttggctggaagtcccataaattttaggactagtttgtcaatttatgcaaagaagccagctgagattttgatagagattgcattgaatctgtagatcattttggggagtattgacatctgaacaatattaagtattctgatccatgaacatgaaatgtctttccatttacttaggtcttttaaaatgtctttgaacaatgatttgtagttttcagagtaaaagttttgcacgtcttttgttaaatttattcctaagtattttattctctttgatattccaattgaattttagtattaaataatagaaattgaggatcattgactgtaaggcatgttctgagcagatagagtcactgatctcatgtggaacacctattaactaattgctaaagaaagtaggaagttgcttcctctagaacaagttacttataacctagaaatcacatctgtttgcatgtgactgatgtcagactcctcccctgattgctctggctaattttctcaggtcatagatactgggaggtgggtggagaagacaacaggtgggagtgggggtgggcaaagtgcctccctgtctttgacaggtttggtctaaaccaaaaaagccttcccgttacctaaagttgaggtttctaagatatttcttatgtaatataatggaatacccccattagctgcccctcctggcttatatcagtgcactcattccatggctctggaggccagtggttcccatacctgggtgaggagcagaatcatctgaggagcaygttaaaaagcagagtcttgaccatgtggttagtcacatgcacattttttatctcctatacctctcatctgtgaaattcctattatttgtcactagaacccatgtggcttagtctgcttgggctgccataataaagtaccatagactaggtgatttaaacaacagaaatttactttctcacagttctggaggctggaggtctgagatcacagagccgtcatggcagagttctggtgagggctctcttcctgggttgcagatggccaccttctggctgtgtgctcatgtggcttttccttggtgggtgggtgtgtgtggagagaaagcaagctctctggtgtctcctcatagaaggacactaaccctatcatgagggccccaccctcatgacctcatttaaccctaagtacttcccaaagtatttagagtaccatctctaaataccgtgacattgaggattagggcttcaacagatgcattatgggaggacacaaacattcagtccatagcaccatgaaagatgtattgaattgcaacaaacaagcaaacaaacagatttccagacactactcctatagattctgatttagtggtcyggagaggggcccaggaatctgtattttattataataatatctgtaattcttggtacagccagttcagggaataggtgtttgcaaactgcttacatatgtgccagtgcccatttaccttactcgcagaatatcctcagccacagctattttactttggacatttgttttgtcacaattccaacaagtttttctgcttctaggtaactaacacaatgcccaaaaaagtcttatgaattgtatttaattgaatctgattttcttggcttagaacggattataaacagcaaatttaaagaggggagagtgctataagatgtaacatccagtcatttaacagagttataaaaagcagatacaaacactcaaaaagcatataggcctagggtcattgagaagaatctagaattctgcagattaatgctagagacagaagaagaacctaattgtcctctcctctttaagttcccttctactttcacttcacaccttacttccttattaaaatcctttcaactggtcatacaagggcccaatagccaccatgtattccttgcccactatgtgccatgcagtatactaagtgcttttaaatgccttggcaattaattctccaccagcaccataaagtgtgcacaggagaagaatgaagcgcagggtggttacataacttgcccaaggtcacccagctaacagtggaagaataagaatcatacccagatcttttccccatacttttrtacttttagctgctaagccagggattctccagagatgttttctattttcctaagatgatactttaaaatcaagaacatgatrtggaaaataaaggggttttgacatcagaaaagggattggttttacattggccatgtgtagttcataacactcagttgtatggaattttatgtaaagcttgttaatggttggataacttgtttgtaaaatatttactttttagaaataaattagatttgattcaggattccccccccgcccaccactcccacccaaataacagcactctgcccatttatttgctcatgtgcatggttgaaagggaaagaacatgatggtatagcagccaggccataggaaatcaaagcacccctggctctgccctggragtctgtcaaaaatatagacagtgctgtatctgctatgtgtgtcttggctgaacaaagactgagaactactgaagataggaaagtccgataacaaggagcatgcgttccagggtcagataaatgaatttgtatcctgaatctactctttactgctgtgtgactttatttagcctctgtgtgggggctgatctttctccttaaaatagacttgctaaagcataaatcagcttctatgtgttagacggaaactatgcctggtaaatgggaggcactcagtgttggtagaacttcataagccttcaagtcttatcaacaatatagctctcaaaaatggtacttgatctatatgggcattgggcctggttaagtgaatgtgctaagtttaataaacattttaagcatatatttaataatttttcttgctttcttaaaatttagagaggttgtttgtggataacttggatgccccatgtctattaaaatgcccaaaggaatgtaaattgctgggtttttattctctttgagaaagtctttttttttttttttttttttgagatggagtctcgctgtgtctcccaggttggagtgcagtggcgcgatctcggctcactgcaagctccgcctcccaggttcatgccattctcctgcctcagcctcccaagtagctgggactacaggcgcccgccaacacgcccggctaattttttgtatttttagtagaaacggggtttcaccgtgttagccaagatggtctcgatctcctgacctcgtgatccgcccgtctcggcctcccaaagtgctgggattacaggcgtgagacatcgcgcccggcctgagaaagtcttttataaaatgtaggcactcatttttatgaaagcaaaacaggtgtcttgttgtgggaaaagttagytaacattttcagcatttgctaaagttcctcccatgctcttagaagctgtggttctggctaagttgttgttgttggggatactagcatttctgtgtcttgatgtctgctttgtatccccttttcttgcttctctccccatgactctctgctcattcagttccttggaagctcctgacttaaaccacacataaacccacagtagaggccttcattagacaagactgagtgggtagaactacacatggccaatgtaaaacccatccattttctgatgtcaaaacccctttattttcckcatcgtgttcttgattttaaagtatcatcttaagaaaatagaaaacaagcccaccttccccatcaagtggcctattagttgcaaaatacaagagacagtgttcctttctacctctttccacaagtcctcaggtgagggcctctttgcctgaatgtttctaagataatggctcaagttccttgcgcacaggtcattgtctaaggaggtcagaactaacttgagtctgagaagasatggatgggacaccacagtacatatgtttctcccaccgtgtttcctaccagtcaggataatcatagctcaggagggctgttagggtaccagccacatctgtctgtttgcattctggctccaacccctagttttcctaaagcaaaattcttattagttaggagtcaaggatcaccgagccttttccccataaagagctattttgtttgttgttgttggtttttgttttgttttgttttttgagagagggtcttgctttgttacccaggccggagtgcagtggtgcgaatatggctcactgcagcctctaccgcctaggctcaagttatcctcctgcctcagccacccgtgtacctgggaccacagtctcgtgccaccatgccgagataattttttaatttttttgtagcgatgagttctcactttgttggccaggccgttctcgaactcctggtctcaaacgatccttccaaagtgctgggattacaggtgtgagttagtgtgccctgcccaataaggagctatttcgcaggtgtacatctcttgaaactgtaaataaactagctatcaagtcaggcacatttaatttggatgcctaaacatgtcacttttaaggaaaaaattgttccatagagattatgttacttgtgtgttctgattagcacagaacagtccaactttgaagccctataaaatagtttgattatgtttcatttgaaaactacatgtgttagtaatgggttttctatccctgtatttgaaagatatggcataatccacgctggtggggtagggaaatatctcagtgactggatcctgcatggagaacctccttttgatctgatagaattggatcctaatcgctatggcaaatggacaacaacccagtacactgaggccaaagcaagagaatcatatggattcaacaatattggtaaggtacaaatgtactgttgtctacaaagtgttgacggaattgaattgtagcatctctgactttagatggtctttattctattcactgggatggcggtagttagggactccaaaaagcattgtgcccctgagacataacaaggaatatatatggatgtatatatttaacacgtggaatgcctcactggttttaaattttaaatatatttttactttactctttgatgagtcatataaatgacagctctgttttctacatgaatcattcatatatatgtatgtatgtatgtttatgcatctggattttaagtactgtatttccatatttggaatcccatgtaagtatcttgttgttttggctatatgtgatttaaagtaccaatttttccttttcagttggttatcctaaagaagaacggtttgctgggaggccgactcaacgagtcagtgggctctatcaaaggctggagtctaagtgttccatggggttccatgctggytgggagcagccgcactggttctacaaaccaggccaggacactcagtacaggtgggagaaggactttacctgcctgtggttctgaccgaggggtgaaacaacgggacagcaaaaagcgctgattctgccttacactccattgctccaccctgttccaaggagcactgagctttgtcctacaaaaattactctctggcagtggtggcattagtctagcccacgagacactggcccacatctaggactcacgtgaccctgagagtcctatagccagccttggtgaagcctcttggcatttaccagatgctcggaagaaacttgcgaccgccctccaaattcccacstggcttcagttggctcctaaaggtttgctgtactttagggtgctcagtggaatcacatcgtgtataaccacaaaatgtacctggagttttggattttctgttcatcctgaaattgctcaaagcaactgctttctagagtgtgtgcactgagtcatgcaaattatatgtgcagttgataaggtcatttgcatagcattccaggttaagcgaaaacataaagtatgccactgaaacagttctctgaatttgggtaaagtgctacctgccattgttgtactttggattaatagtgattatatatttttttctcaagagaatccacagatcaagggaaaacaagttgcaaatttagaagttacattatccttatttttatgctgtcattttgctttttacaataggttttgctattttaagactagatctaattcatacaaagtatagcagagaacccgttkttgatgaatgaatttgggctttataagcagccaatctagattatttggtggccaaatactgatttggtttttcctaaattactctaacacatcacttttactcttcacttagtgctgattggatctggcctaagtttwttctaccatttaataattaaactattgaaaattcatgttacagacatagcatcctgctctgaagttaaaataccacattagaagtccacttcataaagcagaaaggacctttagtaatgagtcaagagacctttgttccaggtctggctctgtcattaatgtgaaggccttggagatcattttgtgccttttctctgaaaaatgaagatttgggaccagatccttatgtaccccaggtgtggaccaacagcataggcatctcctgcgagcctggcagaatgcagactatggggtcccaccccatacctgctgcttcagaatgtggaatttaacaagtgcaagtgatttgtattcccattaatgtttgagaagcactggaccagacagctccaccccgcctcccaacccagacactctgatttaattagggccattttaaaatgctctccagatgattctaatatgcgtctagagttgaaaaccaccagactggttgacttataaactctcttccagatctgagagcccatgaattatatcttattttccagttaatcagcactttactcactgagaaataggtcaaagggataaatgagtaactttaaagggtcagattccaacatacatgaatgatttgcagaacagaatttcaggttgcatggtctcgcctcccatagtcccactccccgctgcccgtaggattttctagatgagtagggcttattaaaatatcgtattctgtaatttttgaaaaatgaacgggagttgttttatgacactaaatgttgtgtttcaggccaagttttcgccgcacaaactggtttgagcctgtgggctcggagtataaacaggttatgcaaagagtagsggtaactgacctatcaccatttggcaagtttaacatcaaaggccaagattccattagactactggaccatctctttgcaaatgtcattccaaaggtaaatagccttgtagggatacaaggtccaggattctgacctatttaattcttcatcccatatgttattttagttcacctaatgatttctggatgaacactagaactcttcaactgaccaaaagtatacaagtatacaagcttatttactttctttttttcttttctttttttttttttttttttgagagacagagtcttgctttgtcacccaggctggagtgcagtggtgtgatctcggctcactgcaaccttcgcctcccaggttcaagcaattctcctgcctcagtttcccaagtagctgggactacaggcatgtgccaccatgcccagctaatttttgtattctttagcagagacagggtttcactatatgttggtctcgaactcctgacctcaggtgatccacccgcctcagcctcccaaagtgctgggattacaggtatgagccaccacacccagcctacaagctaattttcaaatttaaatttttgttgagtgaattctcatccaaggaccttatgactttgcttaattgtttcgatgggaacttaaaattgagttctgcagttaaatgaagaagagctttttaatggcaaatagttttaaatgattgtttaaatggagaacttcaaattactgttgggtttaggtttacagataattcatacgattgacacaaacagtaagattcagatacttttcattcttaacacccacattgttatttcaataggtgttaaaaggatgcatgtgatttttagttcatcctaaggtaatttttaatttttttatgtaggtgggttttacaaatataagtcacatgttaacacccaagggtcgagtgtatgctgagctgactgtttctcaccaatctcctggggagtttcttttaattactggctctggatcagaacttcatgatcttaggtaagtgcacacctagtaagaaaattttgtacacattatatattgactcaatcttacattaagtttttctttttaccagtactcgaaagtacaactttatttcttcttaaacctgattgtttcaaataaactttattttttttaatacaaaaatatttgaagtgagggcccctgcccctcccaaaggtaattcatccataggttactkgttctaataatattaatccatttattaggcatcatcaatgtgccagaaccttttttagatattaccttaatgaattctcttaatattttgcaaggtatatattattcccatgatcagatgaggaaactgaggtttgggwtaagggaacttactcacacgagctttttgattctgatgcccgcatttggtccacttctgtaagctgtcttcctaaattatctttgtcctttgtgatgctttgtgctttctggcccacagctggatctaagttgctgacctgccaagtccagcctttacatgaatcttcattctattataaagtctttartctaatattccaaatatttttggaatattattatttaatacatgtcttactctgacagattctcatcttagttgtacagtgatgcaaattatatgctccaatccaagatgtactgggaccatcttaatagcttagctttgtgtaaatccagatgaacattttgtgatagacttagatagctcaaggactgctcaataaattagaaaccagccctrtagctgggtcccaataactcatcaagccatagaaattgaaactagagtttctgtcttttccttgtgattctcagagcaattacgtgtcttgtggcaggcacattattaacctttagcaacataagtgtgcctcctgtgtacaggtattagagaaaatttgggtttaaattaattttkcaaggctgaatcattagtttaaatgcaaaagkgctgtgtcactatttaaaagaattgtgtggcagagctcattaaattgaaggatccttctgtactgtgaaaaattaccccccaaatttataagtgggtgatttaaagagaatcatcacttaacatctcaggggcttggtttcctcaactttaaaaatcagtgtgatttcatgaaatgacactctggggactttctgataactctagacacaaagcatgtcttcagagagataatttattaccaaagtacattattcaagcaatatttaacaccatgttcatgactraaacgcagatggattgaagaagaagcagtcaaaggtggatatgatgttgaaattaaaaacataactgatgagcttggagttcttggagttgctgggccacaggcaagaaaggtccttcagaaactgaccyctgaagatcttagtgatgatgttttcaagtttcttcaaaccaagtccttaaaggtttccaacattcctgtcactgctattaggatatcttatactggtaagattggaaaacaacctggactaagtctctgaaatttaaaaggtcaatttaaaatttaaaatttaaaattaaaaggtcatgtcacaagaaatgtgtgagtgtgtatgcatgtgcacactcacactcacttttgtccatgcgactttggaggaagatttttgttctgcccagctcttakgtctagtctgtctattcactcctcatcttgaaagtggttccacagatttctagttgttgctccagtcccatmgctgcctaccatctggaagggcagataaaaaaaaagtgggggctgggtgcagtggctcacacctgtaatcccagcactttgggaggctgaggcgggctgatcacctgaggtcgggagttcgagacaagcctgaccaacatggagaaaccccgtttctactgaaaatacaaaattagctgggcgtggtggcacatgcctgtaatcccagctgctctggaggctgaggcaggagatttgcttgaactcgggaggcggaggttgtatgagccaagatgacaccactgtactccagcctgggcaacaagagtgaaactgcatctcaaaaaaaaaaaaaaaaaagaaaagtggggaagaggattggctgaaatagtcgggccagccaactctatttgtgaacattcaagatggtctcctggagatagaatctcccatagagaccattttgaaggtatcaggtacctctcctagagcattgccaacaatccttctttccttccagactgtaagttcactgagatgtcttcctctagcacctaaccttgcacatggtaggtatttgatacagagatgaatgaatgctcttcagttccccagtggtgctctgggctcccttctaagtttttctagacctccttgtctctcacaggagtactgcatgcccaggcattcattcaattatatgttgctcctattctgtggtatcccataaaaacaccttaccatgagccctccaccttgggaaacaggagaacacagagattaaagaccatagctctttctctgggctgctgctataccttttccctgcccttcttccacccaacgttggcaaattctagaataaaaaatgagcagggctggatgcagtggctcatacctgtaatcccagcactttgggaggccagagtgggaggactgattgattgtcccaggagttcaggaccagcctgggcaacatagtgagaccctgtctcaacaaaaaaacaagacaaaaaaacaaaacaagaacacaaaaataagcaggattttttgggttacatttaatttcttttgatttttgcccacagctctgttggtgaaggaaatgactagggaagaagtgggagggggagaagtcagagactatggctttctcactatgaggataacttgaataattcttagttaactatatttttaagcttgtgatttttgggcaaggggttggtttaaaccttgaactcgttgccctgataaactgtgccatgctaactattcacctaacgtcattgtcccagaaaacagtcaagcctcattagaaagctggggtccagggtggagattaattcctgyattatagtctttctgtgtcaygacaagaggtgtcctgcataccaccatctacatgggagtcaggatcrgcacaaatgcatctgtgatatggtgggcttctttgcagtggggtcttgtaactttttgtgagctggtctttttagagactgacaatgtctgtgttgcataagtggaatttctcctgcttatatgtgttctagctaatgcacattagatctagtgatcattgttcttgccctgctgtggcacctgtgggtttatttcaggtgagctgggttgggagctgtatcacagaagagaagattctgtggcgctgtatgacgctatcatgaatgcaggccaggaggagggaatcgacaattttggaacctatgccatgaatgccttacgcctggagaaagccttcagagcctgggggttagaggtttgaaatgctagcatctttattaacattttatgtttatttatctcatttttatataagggctggtttgaactgcaataacattggttttggctgtaagagaaattacatatcattagataactttatttcattaggggaagaggtttttctccttaatttctcaagtgaaagttcagtggaattctgacatatgtttattctgccttaattcatcctagttggctgacagccctagataactgtcttggactttggggagccggcttgcctcatgggattagagtaacacttttcaaaatctctcctcctctgtcattttgcccgtcttcattttcttcttatcttataccttttggtgaattaacactcctttctgaggggcagggttgatggtccagaatgtggtggtccagccttcctccaccattaataatggttattaagagtttctatttgtatagtgctttaaccatttacatattttcatatgcatgatttcattttccttctcaactctccattacctctattttacgcataataacactgagacttagagaaccacttggtccagattacctagtaagtggccagcctgtggtttaaactctgttctcctactttatttccaatatggcaggctatccctggacccagtcactatttcagattcagtagttgtttctttggaagacactgaggttttagacctgaaaggtaagataagggatagtggtaaaagatgaactcagagcggggactcttgggtttgaatttttcctccaccacgcaccagctatctggcttaaccctccagaacttctgtttacttttctaaaaaatggattttttatgctacagaattatcatagatagtagagagagtctaggaagtgccaagcacataataaagtgcatttgattgaaggggagagtgtgtttcaaagcccaggcagagacccaagggcatttagagtgcgcagaagcaagtgggcaagctctccacgagagatcccctattaggggattctctagctacaactggggactgaggcgaggctaggcgcagggacagaaacggaggacagcgcggtccccacactctccgaggaatgaagcagcaggagcagccctytgggagtcagacatttctccattctcctgccttttattttctcagatttcctctcccggcgacctcctctggagagcttttctccttctcccgtccctccgatttcccagcagtgccagagcgccctctagtgttggcactgcaatcctctgtgcttcatttttatttttttctttgaagaaattctgaaattttgaacagataaatataattttagaatagctcaaattgattaagaaatatgaggcaacgttttacgtcatataaaacaagcgtactttcatttagtttatgcaggtgctgtgttgctttaaaagtttgactgcttgtagggggtttagactagttctctcactgcgaagaaaacaacaaaacgaagaaagaaacaaaaaccattaacttcaggtctattaccaaatattggcgttagccctgacttggtagctattacagtgacttggccacatttgaagagatacagattcaaactccgcttattcctttctcctctcctgaactctatcagccaccttcctactatctgctttccctccaccttaccctgattcttggtgaattgtaagataagtaaattgtttaataacttttcaaaacgtagttatgtaaaattattgcagaaaaacatgtgaaaatcttgtttctagaagaaacatcacgtacattccctcagatgtttattaaaatgggagagctgtggaaacacagtgaattttagtttctatatttgttatattcaaatgaccagttttgctgaaaggctacatcgaattttggattaaaaaattgttttcaaaaccggtctatagtttgcctttctttagaatctgtgttgaaaaatcaaaaagggttctttctcctaaaaacaaatatgaaagtgatgttaccaaaatgacttgcactcatctaagatttaaaatgtgtgtttcctttttagatgaactgtgatacaaatcctttggaagctggactggaatattttgtgaagttaaataaggtatgtttrcattccaaagtgtgcttgaagtaaatcttaacattatgatgctattttgtgacagagccattctttaaaatttaaccaagtatggattataggagaaacaaggtgaacataaatactagcattgctcaattgtgtcatattactcttttgtcaacatttgcttagttcaaactattggagtgtgcttacagatttaagatagcagaatccagcatctttaagggctaaatctaaattctaagataaaaattagtaaggataagaagattatctgtcagattctagtagacatttatgttggaagtgcgccatgttgtgtattttgcagtaactcctggtgacttgggaaattgcacattagctgatcaaacatagtgcattcattgatccttctggatactcacagtgtggagcagcctcacttcagcatatctgtccatctgcttrtcaagcatctttgtgkgtaactgcaacatctgaatataagcaaataacacgtttcaaacgttttcggcataaaatgggtattaactgagaagctaatataagcccaaataatcataaccgataagacactccaaagggaactcctacatcagtggttcttaaaatgtagccttcagactaacagcatcagcctcattgggagcttgtttgaaatgctaattctcaggtcccaccctagaactactaaatcagaatctctgggagtcaggccaacaaatctgttttaacaacccctgcaggggattctgatgcatctaaggtttgagaagcattactctaaataattatagtggaaaagcatatcatgaggccaatttattacagccaagctcatctgtacaagccttacaaatataaatgaggttactccattgagcagtgcctaagagttataataaaacaacttaatagagctggggtgagtggtagtattgaagaataagggcagcagcggctactgtttaggatatttgttagaactccaaaaataaaatgtcctgccctagatggttgtaaactaaagactgatttcccatcctgtggaaatacgtgaatacatgtatatgactcaatcaggccaaggaaacctttttcatgaccctgtgtcagttcccaaattctgagctataatattaaaataaaacatgtgtatttatagtatgagattttaggaaaacgaacctcctaaagggttttaaagggaatatctttctgtacattctccccatggcttttatttttatgatgtaccatctgcctccagaccagagaaagcaggtgcttggaatttgggcagaccctagcagcagattgctccctctgatagcagaagccttactttagctgtttcaaataaggttaaaaatggcccaactcttgaaagtgctaaatttctgttattggtcaccagtaggtagatagataactgattcttttgcttcagtgttcggatattattgtttggggataaggcatagataaataatcccttcgtattgaaatgggattttcaaatatcttttatgattattagcaggggtggattgtgtctttgttagttaagttatacagccaaataaccaaagctcatctcagaacgtagttagttgtttagaagatactaattttgatttctggcatgtttttataatttctgaattgttgtttctcattcaagtgtcacaaagttaattcctaatgattttatagggtaaaggtccttgtagcccaaggacctggcccccaactgagccagtctttttcaattatgtcaattcaagtggctagttggtattaacctactcataatgatgcttgctaatctccaagacaggtgaatagattagatcaactttggtggttttgtagcagtctataatgtgaaacggatgcctggaaaccttattaacattacaaactaagctttgtaacttgaccattcaagtcctgtgcctaaaaaccaaaatgttacccaaactagcttcatacaacattttaaatactgtaagcctataattgcttcggaaaatcgatgctataggagaacagaagcaacagctaatacagagagatatttatatttgataccaaaacaaacacagcaaaaaccctggcattttacaattgtttgaaatcagttatttctttcccttcagagcaaacatttagaattctctggttggcccttaggcatttacactatgatcgtttaagccataatgtgaagaaaaggtagaagctgactgtatcagagctagatgggtccctggggatcagctggtactcccctcccccatctgaagcagaggaaactgaagcacagagagggaaagtgacctgggggaggccaytgctttagcttaggtcgaacgccaccctctgacctcatcgtggagctttcccacccaccactttcccccacaaagtccttttccacagtgggcttatcagacttgaaagactgcccaagaatttctctctctggtaacatatattgtttgtatggactaccttttattaatagacacttcccccacatgtttttgctgtaactaattttgtgttttatgataggatcagaatagctgctttgcccattttaaggaggaaaatggctgggtgagcagatgggccatcaggccttattagggtgaatcgtgttcttrtcaaaacctgtcagcaagtagggaaaagaacaatggagtactgaagaactctttcatcacaaagggagacggcgcagtggcccttgcttccttccgtcttggagttgttccagcctccttcccctgctgttggcttatgtgaagttgatacacatgtatcattcattcatccgttcatctagtagacatttattaagtaccgctgattagacaccttgctaacccatagatctaaatgttaaagatatactcctgatggctctcagatctcatgaacctggaaacaaataatatttcaggaactaaagctgtagggatacgttcttagccgtaattgtgaagataacccttccgcaagtggagggctctccagccgcatacaacactgccatcttgtgggaagtgctccgtagagccacttcaggaagccttgaccaaagctgcggtaaaaataattgaatctgtacttttaaaatcttcttaactaaaaacgcttcacctgaaacgactcatatcattgttctcaatggtatttttggtatgttccaaaggaagtaacttttgggaggaaaatcagtagcctttgtttagttggagatggaagaaatgcattaatcaagagcaaaaggaaaatcagctgcctttggatggagtcataggcattcctggaattttcatggtggaaatattgaatttttgtccatttctggagaacctccacgaagattcacagagactcaagtattaaacgtaatgtgttgaagcacatcagaagaatttgttttctataatatgtttctccctctttttctcactctctccttctccctctctttccctttttctctctccttcccctctctccccgtgtagagcttctaactagtagaaacagaataaaatgtaatctctattaaacataagttataagacaatrttgattctagaaaatgcagggtctcttttggaagaaatatttaaagcataactgttcgataaccaaaaacaaaacaacccaaaaaagctggtaaagaggcaaagcgcttagtaccaagccttccacaccccaggtgttcagtaaatattagctattattaaaacatcagagtgctaaaaacaaaaaaatccaagtggaatcaaaccattgttcacagacaacaagctagaaagaaattgttaatatagkggtcaaagcatccaattctctttgggaaatttgaggtamatggtaataagaattgaggaggcagaaaattttcagtgatacttagccctggctggacattagaatcatctggggtatgattcttttaaataatatttcgctgtttaaaatcccaaggcccaggctacacccaagatcaatttaaaaagaagctcttgtagggactcaggcatcagttgtttttaattccccaggtgattctgcagagatggagaattactgtyttcaaccaaagattttcaactggctgaacatattatcctgaagaactaaaaattacctgaactgaaagaactaaaaactactcaagtagttctcaaggtgtggtccacagaccagcagcatcactgtcacctgggacctgctagaaaattcaaattgttgagtaccatcccagacccccaaaatcagaagctgccagggtggagcccaactatctatctatckatcgatctatctgtctatctaactatttttattgagacggagtcttgccctattgcccaggctggagtgcagtggtgcaattttggctcactacaaccttcgcctcccaggttcaagcaattttcttgcctcagcctccccagtagctggtattacaagcacccgccaccatgcccagttgatttttgtatttttagtagagacgaggtttcaccttgttggccaggttggtcttgaactcctgacctcaggtgatccacctgcctcagcctctcaaagtgctaggattacaggcatgagtcaccgcacttggcccaacaatctattctaataagccctccaggtagtttcaatgcagtttatttaagtacatggacctaccccaaatcaattagattttctctaggtgtaaggtccatggttcctttttaaagctccacaggtgattttttttttttaatgcagtgaatattgagaaccactgttttagttcttataacttcataccaacttcagtcttgaaagtacataggaaagtagaaaaacatgtggattggtcagaggatggtgctatagaactgtggtggaaaggatgtaaattaatagatctagagcctattccagctaggctacaggttcgtattctgccccatatctttgttttttcttttagaactgggtagtaagtgaattttttttaagtcaccaaattctaactgcgtggcccaggaaagccatttaacttgattttcatgctgagatttttaatctgtaaaagaaggctacttttgcaagtctaaaatcctatggaatgcctccaacacagtggttgaagacattggtgccatgttatctttatgagccacataattgtgtcatctgaattaagctatccttattctgttacccattttcattgctgagtgataaggggaaggagaggagaaaggaggggaggggaagagaaggaaaggaagaggaaagaagtaaaacctagctgaagtgtagttgaccattcctgaaacacctgtcaggatacattaaactaaagccattgaatcattattttcatatatatccaatttctgttatgaaacagtactttgtttctaccctaagagctgaaatgtgaagtttagctgactgctttcaaatttggatatccatggaaacccaggtctaggaatgaattgaaataatttttaagattgcttttatttttattattattttaagtgtatttgaacatgcaataattgacatatttaaagtaagcaatttgataagttttagtacatgatacagcagtgaaaccatcaccgcagtgaagatagtaaacctatccctcatccccggggtgtccatgcccctttgtgatccctacccgccaccctccccacagcctcacctaccccccaggcaacaatttatgtctgagactataggttattttgcaatttttaaaataaatgcaaaatctataaaaatggaatcatagagtatatactttttttgtgtgttaattctttccctcggcataacttgagagtcatttgtgttgttatgtttattaatagatcattcccagtggcatctcatacctgtaatcccagcactttgggaggtggaggtggaagggttgcctcaacccaggtttgaaaccagactgggcaacatagtgagacttccatctccacaaaaaattagccgggcatggtgacacatgcctgtagtcctagctacttgagaggctgaggaaggaggactgcttgagcctgggaggtcaaggctgcagtgagtcatgtttgtgccactgcactccagccagggcaactgagcaaggctctgcctcaaaaaaataataataattcccttttatagcaggtagtattccattgtatggatatactacaatttgtttgtgtactcactcattgataaatatttgggatgtttccagtttagggctattacaaataaaactccagtagtctcttggtatacctggaggattggttctatgactgcccaagggtaccaaaatttgcttgaagtccggcagtttgtctgtggaaactgcctatagaaaaagttgggttttgcatcctgcaaatactgtctttttgatctgcttggttgaaaaaaatgcacatataagtggatccgtgcagttcaaacctgagttgttcaacagtcagctgacactgtgaacatttgtgtacaagtatttgtatgaacataggctttcttttccctaggtaaatacctaggagtgaaatgactgaataaaatgaaagtgtatggtaactttgtaagaaaccgttttgccaagctgtgtgccattttatatattatagtcctaccagcagtatgtgaagttccagctcctctacatccttgtcaaatacttttcatggtcagtctttttaactttagctattctaagagatatgtagtgatgtctcatgatggttttaatttatttccttaatgtcaaatgatgttggacattttttgatgtgcctccctgccatttctatatctttttttgtgaaatgtctggttaaatctcttacctagggtttgttttttttaattgagtttttaaagtgctttctgtattctttatcagatacatgctttgcaaatttttttcagakgtcttgacttttcatttgtctcatggtgtctttcaaagagccatttttaatttttgaattttaaagttcttatcaattgttcttttatgaatcatgcttttggttcatatctaggaaatctttgcctaatccaaagtcataaagattttctgctatgttttcttctagaagttttattattttactttttacatttaggtctatgatccatttttagttgatcttgtatctggtatgaggtatggactgaagttttatttatttgtacttggataaccaattgctttcagcaccatttgttgaaaagactatatattctgaatttcattgcctttatatcttcgtcagtatgtttatatctttgtccatttgtttgtaggtctatttctggactctgttgtattctgtatatctgtttatctttccaaatgccaatactacagtgtcttgattactgttgctcaaataaggttgtgatagccctgcaactttgttctcttttttaaagctgttttggctattctaggtcctttgaatttcattaattttagaatcagcttgtcaatgtgtaccaaaaaacctgctagactttattggaattgcattttatctacaggtcaattcaagtattacaattcatgaacaagttccatctctccatttattcaggtcatcttttatttctgtcaggaatcttttatagttttcagtatacaggtcttacatatcttttaacatatttatccttaagtatttcatgttttgatactgttgtagatggtatttttaatttcaattttcagttgtttattgccaaattatagaaatacaattggtcttatatgttgatcttatattttggaactttgctcaatctgcttagtggttctagtagcatttttgtagattccatcrgattgtcacatggacaatcatgttgtataaaaataaagcttttctttgtcttttctaatttggatatcttttttttctttttcttgccttatattcctttttttttttgatggagtctcactctgtctccaggctggagtgcagtggcgcgatcttggctcactgcaacttctgcctcccgggttcaagcgattctcctgcctcagcctcccaagtagctgggactacagacatgcaccaccacacccagctaattttttttgtatttttttagtagagacggggtttcaccatgttggccaagatgggcttgccttatattcttgcctggaagttctttatcaagttgaagacatttgcttctattcctagtgttaacatttttaaaaaagatcaggaatagatactggatttttagcaaatgattttccacatctactgagataatcattttgtttgttttactttgttatatggtttattacatttattaattttctaacattatgccagcctttcgtttttaggataaaacccacttggtgatgatatgtcaccttttaaaacatcattggattttactggataatttttaaaaattttgcagctgtattctccttacagcacttagagcttgccattattttgtttatttttcctgtttttcttttgaacagaatgtaagcttcctgagtacaggtgctggccatacaacatatgttttgtttattatttttatccccaacacccagctcagggctggcacatagcagatgcccagtaaatattttgttgttgaaagtaatgtcaaaagatgatacttgaaaagtcctgggccctcattatgaagagtctcatgtgccaagctaaggaatttggagtgtatcctggagaacctggggagtgacccaagaattttgagtaaggagtgacactctagtgatgggaaacagattaaaagtgagttcgtctgatgactgggagatcattctcctaattatcaaataaatccagtggagagaaggcgaagacttcaactaaagcagtggccataggatggagaagaaagagcaatgagtgctatttagaaggaagggtggataccacatgagggactgcatgtgaaggggtgagaggaggatgttaatgaactgtggattaactaggaaacacaggtggaggggtgtgggtgggaaattgtcaggacttgggttggaggactctggggtagccaagcagagagtcccagaaggcatctgagcatgtgggtttggagagcttagctctgcaagtatggctttggacccttcagatataggtggtcattgaggcaggtgagtgttgagaatccgttttctatagcactctgcacttgcctctgccctggtactgaccacgccttatattcctgaccacctcctcaactttgaggacagaggccaagaatccttagcctcacccctgtgtctgatcactagtgagggctctgtaaatatttgttgaagggtttgaattgtgactctgacatttactgattctgactagatgtattgcttaatctatgagcatttcagttttctcatctgtaaaatgaagaaaatgttcactccataaatttgtcataagtattagatgagataaagaacatttggtacctcactaagtgttagttcctttccatattattgatttgaatctaaataagtcatttagagtaaaggaactatacatgaaatcctttttctttttttaagatcccagtaaggaagatcttgggtccctattgaggcctcatttcttcatgcttttaaaatttcctttgattattatttactttgcatttaggcttaagtgctatgcttaaaatatcaaatgggcaattgttcttcactctactctagagagatgaaatctattatgaaaactctatattatagttgttggccaaagcagttaaacataaatctgataaagccacaggtccatttcacagttttcctttgaatcatcagattaaaaaaccgaaaaattaagtgttctctttaacatcaaatctagtaagatttaatattaaagacatgtaatgggggctttagttttgaaaatctggtttgatttgaaygctaattagcctgattacttgcctggcttaggaactatattttagttattttcccaggtttctattttatcccccttttttagtgactatggttcctgttctagtaatattaaacatttttgagaaggaattttaactggtcagtaattttggttagaaaaatgctatatgagtgctttcttttaaattgctaagggcagagaatgaaaactacctgtgtgtgggagtgatatgatttggatctgtgtctgcaccaaatctcatgccaaattgtaatccccattgttggaggtggagcctggtgggaggtgattggatcatgggggtggtttctcatgaatgatttagcaacatcccctttggtactgtcctcacaatagtgagtgggttctcatgagatctagttgtttaaaagtatgtagcacctccctcctgtctcttgctcctgctcctgccatgtaagacatgccagctccccctttgccttctgccatgattgtaagttccctgagacctccccagaagcmaagcagatgcccacatcttgcttcctgtatagtctacagaactgtgagccaattaaatctattttctttataaattacccagtctcaggcatttctttatagcagtgagagaacaaactaatacataaaaatggtacagaggagtgggatattgctataaagatatctgaaaatgtggaagcagctttggaactgggtaatgggcagaggttagaaggatgtggagggctcagaagaagacaggaagatgagagaaggtttgaaactccctagagatgtgttgaatcgttgtgacctaaatgctgataatgatatggacagagatggccaagctgaggaggtctcagatggaaatgaagaacttattgggaatgggaataaaggtcacttttgttatgcattagcaaataacatggctgcattgtgctcctgccctagggatctatggatcttagaaactgagactgatgatttagagtatctagtggaagaaatttytaagcagcaaagcattcaagatgtggcctggctacttctgacagtcaatgctcatgtgtgtgaacaaagaaatgacctgaagttggaacttatatttaaaggggaagcagagtgtaaaagtttggaaaatgtgcaacctgaccatgtagtagaaaaraaaagcccattttctggggaggaattcaagcaggctggagacatttgcataagtaaaaaggagccaagtgctgataaccaaaacactggggaaaaaggtcttgaaggcatttcagagaccttcacaacaayccctatcatcacagccccagaggcctaagaggaatgaatgttttgtgggccaggcccaaggccccactgccttgcatggcattgggacactgctccctgcatcccagctgctccagctctagctgtgactcaaatgagccctagtaaagcttgggctgctgctacagagggtgcaagccataagccttggcagcttccacatgatattaagcctgtgggtgcacaaagtgcaagagttgaggcttgggagcctccacctaaatttcagaagatgtatggaaatgcctggatgggcaagtagaagcctgctgcaagggtggagccctcatggagaacatctacctaagacagtgtagaggggaaatgtggggttggagcccccacacagagtccccactggggcactgcctagtggagctgtgagaagagagccaccatcatctagaccctagaatggtagacccaccagcagcttgcaccctcagcctgcaaaagctgcaggcattcaacaccagcccatgagagcagttacggtggctgaaccctgcaaagccacagaagcataattgcccaaagcttttgggcacaccagtgtgccctggatgtgagatatggagtcaaaggagattattttggagccttaagatttaatgacttccctgctgggtttttgacttctgtggggcttatagctcctttcttttggctgatgtttcctttttggaatgggaatgtttacccagtgcttgtatccccattgtatcttagaggtaactaacttgtttttgattttacaggctcataggcagaagggactagccttgtctcagatgagactttggactttggacttttgagttaatggtgaaatgagctaagactttggggaactctgggaaggcatgattatagttttcaatataagaaggatgtgagattttggggtcagaggtgtaatcatatggtttgtatctgtttccccaccaaatctcatgttgaattgtaatccccaatgttggaggtggggcctgatgagaggtgattggatcatgggggcagatttctcatgactggtttagcacaatcccccttggtactgtcctcgcaatagtgagtgagttctcatgagatctggtcatataaaagtgagtagtatctttctgcactctatctcttgctccttctctggccatgtgaagtactgctccccctttgccttccaccatgattctaactttgcttgctaaggtctcctcagaagccaagcagatgccagcatcatgcttcctgtacagcctgcagaactatgagccaattaaatctcttttctttatatattacccagtctcaggtatttctttatagcaatgcaagagcagactaatacagggaatattcattttctagccaataataaccaayttagttgctaaactaataatttaacattttgctatcaaggagaygttgaaattgtggttattgttaacttatgtggaatgttaagaagctctgaatagtggaaaaggaaccaagagttgagaagcttgggtttaaggtttggtgctaactcactttgttgctgctggcaagatccataattttgtagggctttagttttctcatatggaaaatgagtttggactaagttttctgcttgctttaagactcctgtgattctaagtctgtaaatatgaaatgaataatgctgtaatttgtctattatgggggttggggatgttaaatgaattcattcccccaaatgaatgaatccagtttatggctttattataagtttcctgaggcataaacagtgtcacaggtgcacagggtactgcacaactgagtgaagaaagttcagattgtcatagactgtaggtgagtgatggccataggctttgcaacgggattcccacccagattgctttaaatgatgatccaaaatccattctaaatgagaagcttttcaggaaaatattgaaggatagtggcacagcctgtcatctggatttccatctccactctgccacttacagtasctgatgatcacagtctctgcagcccttccccgcctataagacacagtagcctgattccacaaccagtgctgtgcctgattcccaaggaagctttactgggacagaggatgttacacggattcccttatgtctctagaactttctatgagggtgtaaaaagtcacaaaagttttataaatttaaaacaaagaataacatgtggaggcagaaatgcaaacaaacagaagctatgatagaggtatggacagtgggggctcaaggaagaatatgactcaattctacctggggtggcagagtggggctggggacagcattccatcatcaccaattgtatagagaagttgcttgagctgagttttgaaagatgagtagattttgactgatacaaaatcaatcaaaaaattgatgacttctttggattttctgatgggtttttgactccatatagatggaaaagaaaaggtccaagactgtattttcataatctctacccagtgtcttatagcccactaccctgactctccatatcagaccctgcctaccgtgctgctgtcaaatttgattttaactacatatctcagagctctccattgccctaagaatcacaaccaaaaatatactgrtttactttctttcatttacatgtgcttttaggtaatatggttcctttaatagagctaatgagagatgagtaattatatttcacttaaaaatctacttaatgttttcatataggtagatattatatttagtatgtattacaggtggatgttttaatgactcatattgctatttaaaattaataaattttaaaaacagaagccaagactatttttaggctacagtctcagtgttccagaaatttatacatttttcaaagatattaatagctatttatatagttaatttggcaatgacttattaaagaaatatacttctgttcttgggtcatcctgaaagcacctattttaattacagcattaaccttcagacacattttcctctcatttataattaataattatatagtagagtaaaatctataatcttgggagcaaagccaagtaaaatgaaaatgaaatgccctcattttacttaaatcttcctaagtcaggagccttgttggtttgagacagggggattgtgccaatgggcaggtgcagcctcctgtctgtacttatggcacttattgaagtgttccagctgggtgcggtggctcacacctgtaaacctgtaatcccagcactttgggaggctgaggtaagcagattatctgaggtcaggagttcaagaccagcctggccaacatggcaaaaccccatctctatccaaaatacagaaattagcaaggcctggtggtgtgtgcctggtcccagctagtcaggaggctgaggcaagagagttgcttgaacccaggaggtggaggttgcagtgagccaagattgtgaccactgcactccagcctgggtgacagagagagattctgtctcaaaaaaaaaaaagaaaagaaaagaaaagaaaagaagaaagaaagtaagtgtttcttactttcaatragatttttgctgttgtttttgttagaatatgttttatttcatgtctgaggatgaaattactgaaaagacctaattcctaatttagggatatacaaatacagatatcaaattgcattaatattaacattctgaatgttttcagatacttttacatagtacacaaatattattttatagtaaattcattcaaaataggttccggccacctaaaagaaatttaaaagaaacattctttatttagagtatttaaagcactttatttagagtgctttctaatgatagactccaggcacaggcatttaaaaaaatatggataaaatctaaaggtgcaggtttatctcgtcatgtaactgagcctcagtttagtctttcataaactggggattaaaatatccatcttaaagtgttgtcatgaggattaaatgagctcttgaatgtgaagccatcattttagtatgtgacacagcaagggcataagaaattgtaaatgttactgattaatattttattattttttaaactgaatttactactctatttttttttctagagaaagtttttgcccactctccccccacctttcctgtttccctcatggttagctaatacctgatgttccttcttagcctttggtaaaattgtgaatttgacaaaggtagagttagtctccttttccagcacatctcaaccctcrcctagctctgccccaatagctctcatccagcacccccagctggtcatggccagcttccaccacatcgcctccagaggtgtagcagatattgatttaagtggctccattagggctgttcagagtaggygaaatgaacagggctaggcctcctgagatcttggttcttaaccagtttgttgattgcctgtctttgactgagttaatgcactgctcttggactccaaatccagtatctgtggggtgtttttgtgtagatcagattataatgtaagtacagacacttttgggaaaggctgtacagacagtagttttatgaaacctactcgtctttcaaaactcaactcaaagaatgccccgatccccgctctcccatcccaggcggaactgggtcattttcttccttgggcccccactgtccatacctctatcaaagcttctatttgtttgcatttctgcctccacatattagatattctttgttttagatttacaaaacttttgtgatttttacaccctagaacacaaggaaccaaccatgagtcatatttcaaaatttgtattgctaattgatatgctactgtgtgtcatgttctgctatgtttccaataatctcaaattgttctttttttctgttaaaacattgaggaaaaacattttcctgttaaaacattgttttctgttaaaacattgaggagatgtagtaatttcaggactgggcccaagatcatgttctctgaagctctgaatacccgctgcctaacacagtatctgatattcagcaggggcttaacaatagttgaataaataattgaaagaaaattatttaataggggactcaggaagattaagaaccttcaagctgtaaatgaatctctaatggtaaagattcagattccatgatggtaggtgaggaaataatttcagatctgctggcattccataaatcacaccgtgtaagtcaatttggtcactgactattgtttaagtgcttctctgcacaataaagcataaaattttttcagtatagttattgattccaacatagacaagaactctgaaaagcaccccttgtcatcattattctatgattgcaagtctcctttttaaaagatagcaaaaaaaaaatgttgctgttatagaattctttcttagatatagtcatcyctctgtgtatgtgggggattggttccagaacccccacatataccaaaatctgagtttactcaagaaccaccaacccatatatacaaaaagtcagcccctccatatacatgggtttcaaatcccacgaatactgtattttctatttgtgtttagttgaaaaaaatccacatgtaagtggacctccacagcttaaagtggtattgttcaagggtcaactctgcctgttttaactatagtgaactttggtttgttatgacttgttatcatgaatttatcctatatatgaattcaaatgaatcaagctcttcctgtgactccccacccccatttgtcctatattaaataacacgggttccaatcttctttaaattttcatgatctggcttcataataaagctttatagttggttcttaccakttgtatcaccctggggaaggagaaagaattggatgttcattttgcacattattttaacctcggctaatggaaactttctctaacttcctgtgtaggtcagcaatttaaagttggattatccatagaaatcatatttcattgtaggttcatcctagaggttctaaactaggaaaggaatggacbggcgggggggggggtctcaggtgagggtgtgtgaggacccctgctgctgcttctctggaggttaaggggatttattacactcagtcctaaatgtttcaagtgcagaaagarctgtgtaagtcctaaatgttagyggtggaggacatcttaggcatgaaatactctttcttattgccaataaagaaattaaagcttttggttgtttcctttctttgcgttcagagagtagtctgtctgtgggaactgtttggagaatcttgttttccacattgtgatctctgattaaatcttattcaccatagatacgatttatatatcacaaatttcctttccttcacataagagatgcttgtctaggcagagtatgcagaagtctcatactaacctcccacggatgtcagccctccctccagggcgctcactctcagtgctctctcttcacctctgactagtttatcacacttatcatgtgtctcctggcatttgrttgagtagaattctatctcccttattagctaagtgtctctgctgaggagtcattgctcacttgtgtgtcctactcacaggtaaggtgtattaaggtgtattaccagtaagtgcgaagtcttccagtttgcctgattcctactttttttttttttttgtaacacataagaatgaattcaaggttatccctataacaatgtcgctgtcattcccttgcattgattgcattgggaatggccctgagtgtgcccatgggagtgtattaggaataggaatgtcatctgtcatgtgttgcacggaagaagtaaaaaaaaaaaaaaaggttgaaaagcacagtattagagaataaactctttgataaaaatgtctgtgtctaactcattttgttacccacacagggcctagcattatgcctcacacatagtaggggctcaataaatggtttcagaatgaactaatgaatgcaatccaataggtaaatacattccagagacattattctgaagaagcaaaagaaaaaaaatactgcattttgggtttgttttagcaccatgtttcaaaaaagtgaattttcttcaggtaaaagactttctataggtagaaattgagttgcacattgcttaccgacagcccgtaccactgtccagacccattagacacaagggtcactttcataatccaccattgcaacatgccttatgtttttctgcctaggtttctgcctggttctggtaaattgtcatcacaagttattacccttaagtctaacatattctgaaggaataggtggctgatactctcatttgaggactaagaaatatttgtctagacatatgatccgatctgtatttttatttaatgtgtaattggtgagaaaataggaaagacaaatttaaatgcttgcatctctaaccttgtcacagtgtctgagcattcattcatcatcattatcttggattcctgcagccagcagacttcataggaaagcaagcactgaaacagattaaagccaaggggctgaaacgaagactggtctgcctcaccttggcaacggatgatgttgatccagagggaaatgaaagcatctggtacaatggcaaggtgagtgctgaggacctcactgccaggggctgtggcatcttctgcaacagaaactccccttgttcctatttcctcttaaacccttttgctattaattatttgttggagggatgacacgcttttgatttctgagctgacattcaaaagacagaacgcaattgactgaaaggaaaatgcaatgttgctcatttttgaaaacataaaattctatatattctgtttaaagaaaacaaacccaargacttgaaacacactggacaatgagaaggatatgatttagagggtaaatgatctatttgctcaccacatccatgtctgtaaatgcaaaagatggattttataaaaaatttggcattctgatttaactttttatggatctttcagaaggaggcaattagcatattaacagagaaaaaatccagatgaaaacatttatgacaatagagggtaaaaccttagaaaataaagtgaaaagtggaaaccatttggttcttcaggaagagtaaaatcaccttctcattttggaatgttactttttattctttctatttgtgttcagtaaaaccagagttagtcagataatgtatcaatgggactttattttctccattttttctcccaagctttctgcattcagttactttctccatttttttattactatttgtaaaacccaattttgttgaaactgagtgtgggtgtgtttttcctggtgttagcaggcatatgtgggacacccagcttagaccatggggagggaatggagccttcaaagctcatctaagcagctgttccacaatgaacagggtcagcttggtcattacccaagactcagagcttctgtgcctgggtttttttcgtattcactgcagcctacttgatatttgtttccattttctctatctcatcagtaacacaaagagtgctagaagtggagaaagccagtggtgtcaaatcacagcctttggggctaaagcatgggtcaatttgacaaagaactaacatctactgagttcttactgtataccagatatttttcatgtgctctcccatttaactttgcagcacacctgtcagatatatatgatcatttccattttaaagatgaggctttgaggggctcagaagtaacttgcttgaggttacgtggccagtgattgatagaactgatctccaacccaggtctagtttccaactttgaatttctggtcctttcttctaagacatgttgaacacttcaatttgatctcttttctgtctctgttgatgtccccctgtagtttcttaagaatttattttatttttatttatttatttatttattttgagacagagccttactctgttgcccaagctggagtgcagtggcgtgatctcagctcactgcaacctccgcttcccgggttcaagtgattctcctgcctcagcctccccagtagctgggtttacaggtgcgtgccaccatgcttggctaatttttgtatttttagtagagatggggtttctccacgttgcccaggctggtgttgatcaccagccaggtgatacacccaccttggcctcccgaagtgctgggattacaggaataagccactgcccctggccttaagaatttaattctatgcccacattcttgtgcatctgagtatcaggtggatgttattagagcctgtgaagccaactgacttttctcagatctcaagtgccttcgcctgtctgtaagcctggatgggctgacctccacttccttcttaaattgggctgagtttgctcttctgtttgaactgttgctacctttctccctatctcttctttctctttctgttctgtatctctggttcagccctcttttctcaatatgtattcttcctccaattcatatttgcccacaattcacatgatttatacttataaccagctctgccattaattaactatttgacctgatcctgagctgatctctgggcctcagctttctcatctgtaaaatgaagccattggatgagataacgtcttcttgtcactacatttcctcccacctcatcttccctttgttttatatttttcactctattcccattcagttttctcagtacttcttaatacagtctacacttacccttccaccaaccttctgttttactcagcatggaatgaaagagatattatgctatattattctgtattcccacgtcatccacaatcaactgatttttagccaccttaaatatgatgataacaaaattagttttaaaaccctgaaaacccaaggtctaatctaaaggttttttcctttgccctatgcatatactgcatttacatgctatattccttgccatctgcttataaagctgctaatccaattataggattctatctcttagatttcctaatatgagtttgcctgctctttgatgcttagtaaggtcatcattttacatacagatagtcttctttttgatcctttttcagaggccctccttggatcctctttactctggactgatatgaaataatttttgctttttcttttcagactttgtcttgacttgtgttgcttttggtatttagtattttattcttgcaagcatttccaatgctggagatagggtacaaatgtatttgtttattgacttttttgtgtgtgtgtgtgtctaccatatgccagcgatattctaggcactgggaatacagcagtgaacaaaacacaagaatctctgacctcatggagtttacattccagaggagggagagacagacaatggacaaaataaataaagtatattgcatgtcagatggtctttagtgccttggggaaaggtcaagtccaacagggagctgggcagtgctggagaaagggattataaccttaaatgaggtttaatttttttgaaatcaaggcataaagatggtcatgagaaaggctttctttatattsggtggctcagttattaaaagatgcttagcttggaaggaagttttgaaaaagaggtttgtggagaggtttggagagcttagaaggttttttaaaattattatttgtaaactaaaacacacggggacagtcaaagaaaaacacaatagaacatcaaacttaaattatgttaacttccttcaaaggccatttgccatgttatcttctggaagtcagatagagacttctcataatttgcgagagaaatgagaaaaggctaaaaataaatgagaattattcacattggtaaaaagaaggtcaatgtttgttttaacaaagaatgagaatttgccaggcagagggtggggacagattgttctcacagttcactgaactaaaaggcagaatggatctaattgaacctggaagattttaggtagaactatttaaaatttatgcaagggaaaacatttccctggagatttagtaataaggtaaaaggaaaagccagatttctgaaatatcctgggcttctaaacctggattagagagaaattcaagtagaaatgaaagtaaattctagcagaaagcaaggcaaattttaaaaatagcactcataaataaggactctatttttttaggttactaatgcagaatgactgcaagacaaatcactgctgggatgttaggagatgagaagggctgaggattgtgtgcttttgacccagtgagtcaggggatcacaccctgagactggcctaggtctcttcctgttttctgaagatgctcaagcaaaccagcttaactcttccagggctccaaacccaaatctctttcttacagatggggaaatgaaaacaaggttatcaagaaagtctttcaaaaagcaatgattaagccaggcatgctagctcatacctgtaatcccagcactttgggaggccaaggcgggctgatcacttgagttcaggagttygagaccagcctggccaacatggtgaaaccccgtctctactaaaaatacaaaaattggccaggcatggtggtgtacacctgtagtcccagctactcaggaggctgaggcaagagaatagcttgaacctggaaggcagatgttgcagagagccaagattgcgcctctgcactccagctggggcaacagagcaagactccatctcaaaaaacaagcaaacaaaagcaatgattaggtgcagccgcagagctgcttccagggctacatggctgagggggaygcagggagtaaccaaaggcaggatgaggaaattgaagcaatggtagccattgatggcgaggaatggtgtgtcattgatgactgtgccaaaatattttgtattagaattagctacgatatagatgaccccaaatggacactttgcttgcaagtgatgctgccaaatgaggacccmggtacagctccacctgtctatcagttgaatgctcattggcttaaagggcaagaacttgtccatttattgaatagcctgaggaaatatatatgtggccaccccatctggttcggtgagagtacctgctttgtgtccctgggatccaggctaagtttcttttcctcccaaaatatttaatgagaaaatgacagaatattggtgaaagtattctttacctgtgagtggagaaaataagagatgttccaatacaaaaacctcagatgacagaaccaggcccagaggyaaagaaagaaactgaagaggaagatgttgaatgtgaagatgatctcatttttgcatgtcagccagaaagttcggtgamagcactggattttgatatcagtgaaaatcaaagagaaatagaattatctctgattgatcatggcatttctgttacagaccgaataagtacttttcaggcagactttgatccagyagtttgtcccaaacaggtgaaaatggttctttccaacttgtatgagaataagaaaatagctagtaccacccacagcatctatgcytacagagtatattgtgagaataaacagaccttcttacaggattgtgaggatgatggggaaagagcagctggtgggcatcttcttcatctcatggagattttaaatgtgaggaatatcatggtggtggtatcacgctggtatggagggattctgtaggaccagatcactttaaacataactgtgccagaaacatactagtggagaagaacaacacacattcacctgaaaatcatctaaggctttggaaaaaaaacaaaaaatgttcatcactgagtaatggagtaagtgaaaatccaggagtatccacttgcagttatgggctgaggtgacaattcttccamcatatttgttagcgtaaatattatgcctccatttctgttgcaaattggtgattgtgaaatttccaaaagtgattttctagtctctgcttctttaattcttataatataaagcaataaatatggagtgtcagtagtcttactccacaccagaaaaaaaaaaaaaaagcaatgattaaaattctaacctctctgaccctaatccctgcctgtatcactgaactatgatctaaaggagaaaagcaattttaaagcatgtgttataccttggcagttattaatcagccagagataaacttttactaatgaatgtattcacattttatttttcacagtcaaaaagttttcttttttcacggtcaaccarttttcacagtaagtttagaaatcatatggagaacagccrggcgtggtggctcatgcctgtaatcccagcactttgggaggccaaggcaggctgatcacgaggtcaggagttcgagacyatcctggctaacacggtgaaaccccgcctctactaaaaaaatacaaaaaaattagccgggcgtggtggtgggtgcctgtagtcccagccactcgggaggctggggcaggagaatggcatgaacctgggaggcggagcttgcagtgagctgagatggagccactgcactccagcctgggtgacacagagagactctgtctcaaacaaaagaaaaaaaagagagagagaaatcatatggagagcttctgatttggggtttcaaagagagaattaaaaactgggactacagagataggagtctgcaattaaagtcatgaatgtgttagcatctaaaatactagaagtgctatagtaagattgttgtttgtaatgtgctctttgctgaggcagctgaatgatcaccaggctgatttccatccatgaatgtcttgagctccagctgtaagcagtccactgtgycagacggtaggactttaaggattagtgcaatgttgtgtggccaggagaagccattttgagcagggctatatatcgtgttttacttttgttgtcttccttttatttttgttccatgtaatgttttgatgtaatgtaatgtttctgtattttctgcttttccttctttttcattctttcctttagacctgatttccagtaacctttttatcttttaatcaagcttgttatatagacttttttttcgagacagtctcactctgtcatccaggctggagtgcagtggccagatctcagctcactgcaacctccacctcccgggttcaagcaattctcatgcttcagccttctgattagctgagagtataggcgcccgccatcatgcccagctaatttttgtatttttagtagagacggggtttcaccattttggccaggctgttcttgaactcctgacctcaaatgatccgcctgcctcagcctccccaagtgctgggattacaggcacgagccaccactcctggcctaaaccaagtattactattttaaaaatgagaaatttcagagtaatacagatgtgtaccttgataattacttttcataatttgtaaactttcattcatcttctcaaaatgtgaagttttcctcctgtgtctctggcgttgtccccccagacagcacttcataaaacttccattttgtaagttgaatctgtattttagttttttttcacccagagatgaggagcacagagctgtgaccaagatgctgaggactgttgggtcttgttttccaggtggttggcaacacgacatctggaagctatagctacagcatccagaagagtctggctttcgcatatgtccctgtacaactaagtgaagtgggacagcaagtggaagttgaactattaggcaaaaattacccagcagtcatcatacaagarcctttggtattgaccgaaccaaccagaaaccggcttcagaaaaaaggtggaaaggacaaaacttgaaaaaagaccttcagcagtcaactgaattagagttgctaatgactgtccttgaaattattataactggctcccaggggaatagaggaaaccaggaattcatttcaaaatcatcaaagtctaaatttagaatcttaatgaaacctttctgttaagtgttttctaagcaagacagaataatagataaatgatttacattgttcttttaaatgaagaaatttgaaatgaatgtttttttatttaccccacattacccaatcagtaaaacatttaggtgtttgctaatatacacaatcattactataacctaattaagggacattttataattttagtaacaaatgcattcggttcttgacagctgaaaacaaattaataaattatcttttacataaaaacatgtacaatattgtttatggatttacttctttgagaaatctttccttagatgaataaatgaaagttttaatttttcatgatatatctgtgatgaaaatagtaaaacttaacattgacatatagccaacattttaattcaattctgtgaaatatttatcattttcttaatgacttccctgaaaggagctttataggacattattattgtcctttcaaaggttgttttagaagagaaattgcaagaaagaacagagtcttccaaaggaagaggtacttgtaaactttcagaaatgaagctgacacataaatagattgtgccagtataaacacagtttgaatactgaacacctctctttgggaaagaattaatgcaagttgacatcacatggtgctgttctgaatatcatttcacaaagcatttgacaaagcaggtcaaacaaaagcttaagagctgacaggttttccttagcgctacgtacagcaagaaaaaaatcaatttagaaataattctttgatatactttttgaaattatttgggtgtagttgatggaataaataaattttttttgtaaagggtggtttctcatttataattaatttatacatacatacatttgttacacatttatagaagttttcttaagtattcaaaaaacagaatgtgaagcatgataagattctgtcatttgaataaactttaaaatgatttcttaatgtgtaagttttgaaaaggtgccaattttacattttaaatgttttataacagtagttacatattagaactcttcacatgttcatttctctttggcatatcctcttagatgagaaaagaaggaaatccctttggtaacaaactaatttcctaattattgggaatattatctaggttctttaatccagttcatgttagtgctgggaatttgggatatccgcttttttgactgggaattgggatatctgcttctcattctctgcctttctataaccccatgactttaggatagttacataccatctctgggttcctcctctgtgaaataggtctagactcttttttggatactatattatcaagaagcaataatgaaagtataacattaaattcatatcatatagttaatatagcgctaaaactaatgaataaaagaatagactattcagatgaatgttaaagttttaaagaaatcctacccacaatataaaagacgtctactctgatttccttaagaagttgccctcattctctcttttgttgtatgttaggtgctattaggttttgtaggttaccccagcacccccactcatacccagccagtcatcctggcctcagcaccggggttggcatcagccaattcatgggctgacaatgaccttcaacacaacttggccatggagaattgagatgagttaaccagatttcttccatgggaatttggattgtgaactatcagaggaaaaactggttagtactaaaagctgaagctgaaaagatggatagaaatagaagccataaagccaagggggcaatgagagctcccaataaggagggagacattgagagagaatgaaagaccagttcccaaagctctcagctcctgatggtttgctggccagttcttgggtgagaaccttaacttaaaagggtccaactaaaaccactagcttctgaaaagtggaacatacacagagagaggcctcaaaggaatgggtccagggaggcctcaaaggaatgggtccagggttagcgtcagacatgaacagcaaacagccagcatacttgaaaacactctggtgatgtgcagaagtccgtatctacagctcagaaaaacattctcaagaatgtgatgatgaatgataggcactttcttcccttgagtgaagaaagctttttagaattgcaaaaacagtttctagttaacacattaccaaaacatgaatgtgtggtgttatgttgctaatgttcacatcctaactaatctgtgtctttcttcttttctactgataaggaaggataacagaaaaaaacattttaaagtataccatgtgggacattaaatagcagacagatgagattctggaattttactgagaagattttgtgcatattttacttgaacaaaaggaaaggttgatattatcaggaaacacagcagttgtgaaaggaagaaagttttggctatgcaaacagcattctttagccaaagtcccaggaaagcagagcaccaaatatcaaattaattatatccttcttcagatgaatcttcatataaaaaatataaattattgtcctatttttatttatccccctgccactaatgaattagaatagtagtagtgtatttagtttgttttctgctgctataacaaaatgcctgggtctggataatttataaaggaaagagctttatttagctcatggttctggaggctgggaagttcaagacctggtggttgcatctgatgagggccttgtgctgcttcatagcatggcagaaaagcagaagaggtgagagggcatgcttgtgagagagaaaagggggctgaaatcctgcaatagctaacccattcctgagagaaaggtaataatgagaaaggccatgacctagatacctcttactaggccccacctcccaacactgccacactgaggaatgaagtctccaacaaatgaagttgtggggaaaaattcaaaccataacatgtatggaaagctgcattatgaatgataaaatacattatttaattgtattttctccaggaaaagattttggaaatattagcatgccatgaagcacagaggtggtggggtgggtgatacaagagctactgggctaaaaaatcacaagacctgcttttcccaggtctgccaccaaccaagcacagtctacataacatctactaatgcctctcctgtattttaagttctatgagtaattgcttttcttagtattcattagtctacacatgtttgtggagtacttactataggctaggcactgaaagagcagtgataaacaagacagacatggccctgccttcatgaagtttatagactagagagatcaagcatttaactaaaaaaaacagggaggtgtttaattacaaatcatgatgtcatgaaggccaaggggagagaacattttgagaaggaggggatggctaacagtgtcagaagataaaaagatgtcaaataagactaaaggctgaaaagcatccctcaggtgaagcagagtggtcatgggtgctactggcatgaacaatttcaggataccagtgaaggcaaaaaccagactgtattgaaaaatgaataagaggtaagggtaagagacaggaaacatgtgatcttaccatccaggagcagtttgctaataagacaggttatagtgggcatcagaaagcatttagctgcaagtaaaaaaaaaaaatcctattaacagtaatttaagcaattatttattttatgaattcatgtaacaagaagtctggtggtaggcttgatgacatcattaagtatttcagttcttttttatttaccctaccaagtcctcccctcccccaattttaatcatctcatatatacatgtatatgattaaactggctttaaattagcacattttaattgcctatgcttcggcaaacattgtattctacaagtaagttaattcggagaactcgcagctacaccaataggcctccaacactcatagactcagctacatgcattcattttgagagttcttaacttctagaatcattcagacttacctcctttgtctaacttttagaaattaatggtatattaatggagattattccatatcatcctttttttgtcatacaatatgactattttaatttttttaatacaagtgctcacattggttttagatacttatgcatggttagaaggaattggcttagagctgatgcttaagaaatggacatacaatggactgggcatggtagctcacacctgtaatcccagcactttgggaggctgaggcggatggattgcttgagctcaggagtccgagaccagcctggacaacatagtgaaacccctgtctctattaaaaaaaattaaaaaaagaaatgggtattcaatgtaaaatgtcccatacagaaaaaacagatgcaattcagtagtatattttgagtactgtgccaactctaaggctcaggctgtatgaaaggtaaagaaaggaaaaaagcaataagataaaaggccaacatcctgtttcttgatctgactggtggttacatggtggttactttgtgatgattccttgacctatgtacactttcatgcaattgtcttatgcacaaaaaagtgctatgccagaatatttttataagaatggcactattttgccctgtcttctctctctagttagttgtcttttaaggaagtaggaggtggtaagcaatgggtgggatgaagtggtcaagggagtttcagtttgaattggccatagtggttcttattcagactatcaagttcataaatttggagaatctcagaactaaagtaaatctttctttttctttctctgacccttttcctcccaatgctcacacatacactaactcaagaacaaaaccaacaataaattgaagattcttcttacacacaatttttttttctttttccttttttttttgagatggagtctcgctctgtcacccaggctggagtgcagtggcgcgatcttgcctcactgcaacctccacctcccaggttcaagcaattctcctgcctcagcctcccaagtagctgggattacaggtgcgtgccaccatgcccagctaatttttgttttttttagtatggacggggtttcactatgttggccaggctggtctcaaactcctgacctcaggtgatccgcctgccttggcttcccaaagtgctgggattacaggtgtgagccaccacacctggccagagaattacctttctatatgcttagaatcttgatggttcttaatgcattgacagtagttaacactaatgaataacttatatttgttagctaaaagaaggataaaaggacctcaaaaacacctctataagtttggtttatgatcttaaaggcttttaagaagactctctgctcctcacttagataaggtagtaataaatccattcctatctgtttctaaaactaaatagatcataaaaatatttaatagctggcatctaaattaacaaagtttaatctcctttctgatgttcaagtctatctccttctggacagttcagggtagtaatgaagcaataagtaacactaaccacaatttgccacatgtagttagtgaacttcaagttttctctctgaagaaagacctcttaccacgcttatctctccagcaaggaagctcttgttactctaccccaacagttaatcatttagagataaagtatttaaaattgtttagtctttgtatgtcatatttatcatattcaaagacattgcaacaaaaacagttagaagaaacaccgagatgcaggaatcatgacttcttaatgtagcttataaccagtcagcacaagccaagaacgttgcaaactgcagaaatcaagaggcacagccctagcatctatatgattctcttagtgcatggcctgcaggctttacaaaggtgttcactggggaagacttattcttggtcctctgttctcaattatgatgaactttactttttgttgaaatgtaaactatgttattacattattattattatttgaaatagatgatatatgcacagagtttaacatttagaagatataaaagggtatatggtgaaaagttattctctttcccatccctgtccccagttaaccagtctatccagagacaactaatgttattatttcttccgtacattcttgaaatactgtataaacatgcatgcacctctctctctatatatctatatacatgcatatatatatacacacatctatgtttaagcaaacgagagcataccaaccatagtgtcctttgcctaacttttagaaattaacagtatattggagattatccatatcatcctttttaatgattgcttagcattccataattaatttaaccagaccctattattgg

SEQ ID NO: 95705 - DNA, 218638 bp, Homo sapiens
  misc_feature (1)...(218638): n = A,T,C or G
ccattcctatctgtttctaaaactaaatagatcataaaaatatttaatagctggcatctaaattaacaaagtttaatctcctttctgatgttcaagtctatctccttctggacagttcagggtagtaatgaagcaataagtaacactaaccacaatttgccacatgtagttagtgaacttcaagttttctctctgaagaaagacctcttaccacgcttatctctccagcaaggaagctcttgttactctaccccaacagttaatcatttagagataaagtatttaaaattgtttagtctttgtatgtcatatttatcatattcaaagacattgcaacaaaaacagttagaagaaacaccgagatgcaggaatcatgacttcttaatgtagcttataaccagtcagcacaagccaagaacgttgcaaactgcagaaatcaagaggcacagccctagcatctatatgattctcttagtgcatggcctgcaggctttacaaaggtgttcactggggaagacttattcttggtcctctgttctcaattatgatgaactttactttttgttgaaatgtaaactatgttattacattattattattatttgaaatagatgatatatgcacagagtttaacatttagaagatataaaagggtatatggtgaaaagttattctctttcccatccctgtccccagttaaccagtctatccagagacaactaatgttattatttcttccgtacattcttgaaatactgtataaacatgcatgcacctctctctctatatatctatatacatgcatatatatatacacacatctatgtttaagcaaacgagagcataccaaccatagtgtcctttgcctaacttttagaaattaacagtatattggagattatccatatcatcctttttaatgattgcttagcattccataattaatttaaccagaccctattattggcctttttctattacaaataaggctaaaattattatcttgttgtatatttctcacattgagtatctctataggataaattcctagaactgggattgctgaattaaagtgtatgtgcattttgatggatgtgcaaagttgttccccttagaggttatgccaaatttcatttctttgatgaatgtataagagggcttgtttctttacactctccccaaagcattgggttatcactggtatattattgatgtttctgtttgaatttctctttttgagtgagattgagcatctgttcatatacttaatggccacttgtatttcctcttctgtaaacaattatgttcctatactttacccatttaaaaattggtttgttggtctttttcttactgacttcaggagctgcttttatttctgtcccaatttttgcaccttctaactggctggaatagtttttactgatatgactatgtactgggaaaaccctaaaagaaactaatgattaaaccaactcaaacaataaagagttcagtaattggtagatgcaaattggtagatacagtagccttcatgtccacaaataatagacagttaaaagttatgatggtagagaaagccccatttcaatagcaaaagagaagataaaaatatttagaaataagttcaagaaaagtgcaaaactgatatgaggaaaacagttctaaaaggtgcaaaaatagaccttaaatggaaagggactccttattcttagatatgacaactgaatattataaagactttggggccaggtgtggtggctcacgcctgtgatcccagtactttgggaggccagagcaggaagatcacgtgtgctcaggacttcaagaccagcctgggtaacatagtgagaccccatctctacagaaaagttttaaaaattagctgagtgtggtggctcacacctgtagtccccagctcctcgggaggctgaggcaaaaggatcacttgagcccaggaggtcgaggctacagtgagccatgattgtaccactgtgctccagcctgggcaacagagggagacactgtcaaaaaaaaaaaaaaaaaaaaagagagagagagagggaaagaaagaaaaagaaaaggaagaagacatgcaggaacagccaggaaaacactgaaagtgaaaagctatgaagagtcattagccctaccatacatgaaaacatactgtaaagcctataatctgagacagtctggtgctatgagtaaacagacaggcaagtagaatctaactaactgaaaacctagaaatagagccaagtatatgtggaaattaagcatattataaatgtggcatctcatatcattggtacaaaaatggaattccctatgaatggtgctgagacaactggccagccatttggaaaaagaaaaggagatccatattccacactgtacacaaaataaatgcccatggatcagggatctaaatataaaaatgcaactatacaattactagtagaaaaaatgggtaaattttactttaactttggtataaggattgtttaactgtgactcagaatccagatgtaatcacagaaaatattgataaatttgtctaacattaaaaaataactttttcatgttaaaaacaccaatttgacaagtgacaaactggaagaaaatatttgtgataaatatcacaatcaaaggggtaacctgtgtaatatataaagaattcttaaaattgaatgggaaaagaccaaaaaaccaattgaaaataatacagacaattcacaaaagtgacattaaaaaggcccttcatcacatgaaaaaatattcagttttattcataacagaaaagcaaaacgaaaatactatactgatatatcatctcatatcagattagaaaaaaagtacagtgctttttaaaaaagacttagttcttttagagcagttttagattcatagcaaaattgagaagaaggtacagagatttcccatataaccctkgtccccacacatgcttacatcccccattatcaacatccccaccagagtggtacatctgtacagctggtgaacctacattgacaacataatcatgtaaagttcaatttagttttgggtttattcttggtgttgtacattctatgggtttggatgaatgtataatgacatgtatccaccattgtagtatcactggtctaaaacaggggtgacactggtctaaaacaggggtccccaacccccgggccatggatggtactgtccgtggcccattcggaattgggccgcacagcaggaggtgaacagtgggcgagcgagcagagcttcatctatacttacagctgctccccatcacttgcattaccgcctgagctccgcctcctgccaggtcagcagaggcattagattctcctaggagcacaaaccctatcatgaactgcgtgtgtgagggatctaggctgcgtgctccttacgagaatctgatgcctgacgatctgtcactgtctcccatcaccctcagatgggactatctagttgcaggaaaacaaactcagagctcccactgattctacattatggtgagttgtataattatttcattatatattataatgtaataatcatagaaataaagtgcacaataaatgtaatgtgcttgaatcatcctgaaaccatccccacacccctgctgcccggtcagtggaaaaactgctttccacaaaaccagttcctggtgccagaaaggttggtgactgctgccctaaaaaaatcccccatgctacgtctacttatccccacttcccaaacctagcaaccactgatcttttttactgtctccatagttttgcctttttcaaaatgtcatagctggaattatatagtatgtagctatttcagattggcttctttcacttcataatatgcatttaaagttccaccatgtattttcatggcttgatagctcctatctttttaccactgaatactattccattgtctggatgtaccaccgtttatcctttcacctaccgaaggatatcttcattgcttccaagtttttgaaactatgaataaagctactataaacatgtgtgcaggttcttgtgtggatataagttttcacctccttcagatagataccaaggagtgtgactgctggattgtaggctaagaataggtctagttttgtaagaaattgccaaactgttttcactatactactcagttgctagtgatgaaaactggtacaacccatacacatatagaaacgaggggaaatagaattagaggtactcattataaactcatggttttatacatatgtttagatatagtatgtgggtgtggtgtatgtataaacacttatatatgtatgtgtgagtgtgtgtgtatatatatatatatagttcctgtctttgtcttgagagagatcccagaagtgatgacagcccagtagcaatgagcacatctaaaacacagagattggtttctcaatgtcatccctaaaaagaataagcgttctggccaggcgtggtggcttacacctgtaatcccagcactatggaaggccgatgggggtggatcacctgaggtcaggagctcgagggcatccttgccaacatggtgaaaccctgtctctactaaaaatacaaaaattagccgggcaaggtggcatgtgcctgtagtcccagctactcgggaggctgaggcaaaagaatctcttgaaccctggaggccgagattgtagtaagctgagatcgcgccactccactccagcctgggcgacaggatgagactccgtctaaaaaaaaaagaatcagtgttgcttggagaaatgtctgattccaggattgggagaggaaaagtgcaagttgaggctagaaaatctcattgtatcaaaatgtgtggacatgctcaaagattcaagaggacatgccaaaaggatatgagccagattgtaggggctcccactggccaaaacagagaaaatttgagcattgaaataactatagcaaaggattatagcatattgattaaaacaagaattcatgaattcatagtgaaataaataaatgagaagggaaagttcttccttacagtagaaaggcaactcataaatatagaggaaatgaaggaattagaaaatcagcatttggtagccatcctaattataactaattgaagcaagaagcaagatactaaaactggtaagcaaaataatgtgtgtgaggcataataggatatttacatattctcaaattatctctccataaaatatttattaattacaagaagaaaatattaaccttacaatgaggaaatgtttaccttaacaaagttatcccataagaaagcaattcagcatcatgtgcctcttaataggaagcaccgagaaacatacaacatcactttttgtggtattcctgcacaaatccataacctctatctaattgtgaagaaacatcaaactccaattgagagattttataaaataactagcttgtactgcacattatgtgttcaatacatagatggaaaatagaattaactcttcaatttgcacatttccagagcactattaacatatgcttttattttaaaaacataggacgtaagaatctgtgcaagtttagctagtttcaggggaagttggttaaaggaggaattgttcctgcagattagcacccatcaattatttcttcttaatttttatcaaggagaataggaaggattatgggggagaaagacacaaaaccacagcggaaattctcagtccttcaaggtcttctacagggtgtttaaatgaaaagttcaacccttgacataatgagtcaaacagttctctcaaaagttattctttgaatttaatgctaaaattttcacttttttctgctaaatttcattgattccactagagattaaagtgcatacaacataaactaatctacttcatgcaaagaaaaaaagtgtatgtaagaggcaaacatttcatgtgttaaaggattcttggggaaaaaaaggtaaaatcatgaccctcatacaaatataaaagtgaatacatgattttatttaactcattaataaggaaattggtaaggtgttaaaaccaattcaaaggacaatccaaagaacagatcaggaatactaaaataaatrtgcaagcggaggtgaaactgttttccttggtagtggtggaggggaaggattgctactccgctggataaagttcatttgtgtatatataaataagaattattttccattgttatttatctataacttataaagttgtaaacaacttccacggaatcagactcaacctggaagggtatggtctctaggcaatgcaaaaattttcccctacacctgttaacaactataatatctccagacagagtagacagaaagtctggatggcaacgggaatctactggtcatacggctaacttcctaattcaataagcacgtgactaaaggattttttccttccactcacagatatttcaggctaactagatactgtgtgcttcttagtgtcactgcttagtgggggagccagctctgagtggggtcatatccggacaagcgaatgagctatttattcaatgaccacgcaacactccaaatcctcccagggcaacttgaaagtaaccgcaccttccaaagggcaccgtgcaatcagactgtgtgtttggcctcctgtttgctagtggggaggaagcggcttcatgggtgtacactacgcataaatgaatgtgaaaggctatttagacctctgccttttcaccgtcctcccacctgccacaggctgggctcttgtgctagaaatgacttgctagctagacatcatggttcaggatctgagtcagaggtttaaccatttataagcttttttcttatgaaaaattggcactaattataatgtctaactgtcagagttgttgcaggctttacaggagacgcgggctgtgaagatgctttgtaaattgtgaagcgttattaaagaacacatcttttttttttaggaaaccacrgtgcaaatttaattgccggggaagataacgggccttggtgccctccaagcgtcagctgagtttccaagaagccgggcagcgggcgcccgcgggttcgtctctggctcctcctccgccacagcagccgggggcccgggtcggaggcggcgggggccgagcgcccggcctcgcaagcccacggcccgctgggggtgccgtcccgcgccggggcggagcaggccccggcagcccagttcctcattctatcagcggtacaaggggctggtggcgccacaggcgctgggaccgcgggcggacaaggatgggtccgcgcggcgcggcgagcttgccccgaggccccggacctcggcggctgctcctccccgtcgtcctcccgctgctgctgctgctgttgttggcgccgccgggctcgggcgccggggccagccggccgccccacctggtcttcttgctggcagacgacctaggctggaacgacgtcggcttccacggstyccgcatccgcacgccgcaccwggacgcgctggcggccggcggggtgctcctggacaactactacacgcagccgctgtgcacgccgtcgcggagccagctgctcactggccgctaccaggtacgcggcgcccccgccgcccgcgccgcccccgccccgcctttcgccggcgccctgccgctcctacccggcccttgaggccgcgggcgctggcaggcggggctcggaccgccgacccagttatgggtcccggcggcttctcgccccaacctcgctcttccaggccrgcagcccgccgcggcctctgcgcatgcccggctctggcgccccgcggacccgcgccccggcmgccgggttgggcgggtggctttgtctttcgttttctgaagctccgggcgaaggggtttatgggaatgccgggtgctgggcgccgcggccggcaggcggagcggtcctgaggtgggaggctggggagggcgtgggctgggagcaaagacgaggggagaggtaaaatgaaggggtgctcgccgtgggtgcgamcctggcccgtgggaacccagcggtgataggttasgagtgtcccaccaaagattatttttttccaggttctcaacacccctggaatgaaacctgatgctaggttgatttttcttaggctgctgacattcctttcacatgtaaccttgtattgaactcttctgagcatcttcattatcgctttaaaagcttccctttaggaacggctccacagttaacgaaggaaatataaatgtagagcgtgcatagatgttagatggctaagaatatcaagaacatttgcatagcactttgttgtttttaaagtgaattattgaaacagtgcatgaggtagttgtttttaccccgttttacagacgaggcaggaagcctgtaaaggctcgttggcataagaatcgcacagctagaaagtggtcaaggcagtgtccgttgtgcttttcctgcatccactggtcgtcccgggcttatgaaattggccttttttcccctcaatctgaatacgattgtcatatttctaagaccytgaagttattatgaccatattaaatacagtaaatgggaactgttggataccacctgcatgccttcacagagtacatatgctgtttactcaacaaaaatattttgagcttactgtgctactgacaggggatatatatttgaatgttgccctcccaagtgtgtgttcgcataacctgtcagatcaaccctagcctcacgtggtcctaagatcaagagaagggagggcttacttgtgataaagatatgcgcagtggtctgaaggcttttataaagaggaaagattgggtgttgctaagggtgagaaatagctgtagccaaggttagaaatgggagtaaaggatgcttcccttcaccatccaccttagtacttttggcggttctgaccttggctgctacgtgtaattaggaatcccctacattgtgtaaatctcaccctggacactttgtgggagtaaagggatgtgccagtaaagaagaagaagaagggaaaggtgaggtttgcccaaagggttctgcatttgctttgaagtaagagaactgaactcagattgcaaaagaatggaagggccattcatttctccaacttcctcccttccaacagagttggacaggaaagcaaataccaacttcagaaacccattcctgggccgggaacggtggctcacgcctgtaatcccagcactttggaggctgaggcaggtggatcacctgaggtcaggagttcgagaccagcctgaccaacacggcgaaaccccgtctctactaaaactacaaaaattagccgagtgtggtggcatgcgtctatagtcctagctactcgggagactgagtcaggagaatcgcttgaactcgggaggcagaggttgcagtgagccgagatcgcaccactgcactccagcctgggcgacagagcaagactccatctcaaaacaaaataaaataaaaaacccattcccgtaatcagttgcttttgtcccctaacatcctcccccaccagtcaccaaaattatgtcttggagaacaaactttagtatttagagtaccccatggttatgaagtaaaggatgagtagagaagctgggcactctgaaaggtttagaggcctctcagtgtagctgattctaaagcagccttgcttccccaaacattttttttcctccagttttctcacccactttattctcttagagttcatgagacccaagtagatgttacccagggtgagcaagtgtccacttttaatgaagtagaaatttcagggaaggctcaggagtctccgtcagatactatatgctggtattgttctgagcacttacaagtgttaactcatttgattctcacaacaactctatcatctctgttctgtaacaaggaaactgatgctggaagaggttaagaaacttgcccaaggttacagggctagtatatgttggaccaggatttgacccagggcacgtggccctagggttgatgcctataaccactaagccatattgcctactcaaaattattaaaaataacrtcccaaggactgcttcatacatactaaataatccctgtattacttttggacatttgggtcattcctaaayatctcaaggtaaagaatcaacccatcatatttctgagttaggaattgcctatattccrtgtaaaataaaaatagattttatttctgagtcatttgttatgcataattttagacaataaaatgaaggaattttttgactgtctcaaaatgagttacttgaaggaagttgttaagagtcatatctggccgggcgcggtggctcacgcctgtaatcccagcactttgggaggccgaggcgggtggatcatgaggtcaggagatcgagaccatcctggctaacaaggtgaaaccccgtctctactaaaaatacaaaaaattagctgggcgcggtggcgggcgcctgtagtcccagctactcgggaggctgaggcaggagaatggcgtgaacccgggaagcggagcttgcagtgagccgagattgcgccactgcagtccgcagtccggcctgggcgacagagcgagactycgtctcaaaaaaaaaaaaaaaaaaaagagtcatatctatgaacttggcagtcatgctttaagttaatatttacagacccctttcccataattatttaactttagaaaagaaaagcacaagttgataaacaagcctagactgactggactttatactctcatgaaatcctgagttttagtttttttggtttcagaaattatttattgagtaaagaggactggttaggaactgagatgtaggttttggtcttggctggtcagactgtgacctcgctggccatcatttccacatctgtgaaacagaggagttgggctgaactctagactttgtctagctctaaattaatttaactctaaggctcttgtgtccattagggcgagtttctaacttggcaaatgcacattatcatacctatcatactaaccccatctactggtagaaagattaatcttgcccaacacagtgtatcttacaaattgcgtgtactacttgttctgctgctaggaacttacttaattcagccttttatagtgagacatttaattgttcacagccctcacaaatgaactattttaaatgtgcatgctatggtgaaatatgtgtagggactgggtacaggttggaggcaatggaggagactaattagcagatggggtaagtagttactggtaaattcaagaactagaaattcargtctctctacactcaggctaggggccttcccacagccctatgactcattcattcattatttgtgaaatctttaaaaaaatcygtattttatttttaaaatagaaaatacattcacatggcttaaaaacttaaaagctgcaaaagggcttacagtgaaaatctaccaaaacacacacacacacacacacatacacacacttccttagacattcagttcctatgtttgtagacaaataatgctctgaattatatatttttatatatcatttctctcttttttctgtatgaatggtaacatactcttcacactgatctgcagctcctattttgtttgtttgtttttacttaacatttgcaatcattccattttgttgactaaagattatcctcacagcttttagggctgcataatattttgttaaatggatacattgtagtttatttagccagttgcatactgatgaacatgtaggttgtttccagccttttgatatatcaaagaatggtgaartgaatactttgcacatatgtcattttgtacatattggaacgtatatgaaggataagttcctagaaatggaattttctgggtttaaggrtagatgcatttgtaattttgataaatattgcaaaattgcatcttaagggattgtaccaatttacattcccactggcaatattaagttatagttcacatcctatataatttaccattttaaagtatccaattcaatggttttttgtacattcacaaggttgtgtaaccaatattttcatcacctcagaaagaaaccactcaactattagcagtcactsttcatttcctcattccaccagcccttggaaaccaccagycttcttattatctatgtgactttacctattttggacatttcatataaatggaatacaatagatgtcctttcatctatgttgtagcatgtattgttcccttttatggctcaataatattccatgrtatggacatgccacattttgttcatacattcatcaattcatggacattaggttgtttgcrctttttggctattatgaataatgctgctgtgaacatccatgtacaagtttttgtatsagcatattttttaagttcttttgggttaatatgtaggagtgaaacgccgtattgttgcaggacttctccttagttcagctaacgatgaggtccttgtctgtcccayggccatgaaaattcaggctcgcagatggtttgaagggtgagtaaagcagggttttattgggtgaaaaggaaaaaagggggaaacagggacccactgaaaggtcagagtccctgctacagtgcttccctcattgcccgtttgaatcccaggtgccataggaagaggagaggccaggcgccacctccgtggctccaccccagtgcacagtccagctggagttttgccagggaccccctcccacctggctgtcttagtatcatgtggtaactctatgtttaactctttgaggaattggaaattgttttccacagcagctataccacgttatatttccactagcaacgtatgtgggttttagcgtctccacatccttgccaacacttgtcattatctttttgattatagccttcaagtcatcctagtgagtaggaagtggtatttaattgtagttttgattttcatttccctaatgactaatgatgttgaacatcttttaatgtcttattgatcatttttatgtcttctttggagaaatgtttactcagatcctttgcctgttttaaaattgggtaatttatcttctcattcttgagttgtaagatttctttatgtattctggatactattaaataaacccttactagatagattatttgcaaatattttctcccattctgtggattgctttttactttcctgatagtgtcctttgatgtaaacaaaagttacaaatttttatgtacaacttacctatttttctttggttgcttatattgttggtaccatgtctaagaaaccattttctaatccaagattatgaagatttacctctatgttttatagtattttatagttttcagtttttacatttaggtctttgatccatttggagttcatttttatgtacaatttgaggtatgtggatgcatgtaggtgtccaaatatttcagtgctatttgttgaaaagagtgttctttcctcattgcaccctttgcacccttgtcaagactcaattgaccatagacgtatgacttacaattctattccattgatctayatgcctatccttatgccagtgcctcactgtcttgattgctgtagctttgtattacaaaggtttcagaattagaaaatgcaagtcttccaattttgttattctttttcgagatagtttggctattctcggccccttgcatttccacataaattttaggatcaacttgtacatttctattaaaaaaaagggaagtggaattttggtagacagggatttcagtgatctgtaaaactatttggagagtattactacctcaacaatataactcttccaatttaagaatatgagatgtctttctgtttatttagagggtttttttttttttttaagacagagtctcrctctgctctgttgcccaggctggagcacagtgttggctcactataacctctgcctcatgggttcaaacaattctcctgcctcagcctcctgagtagctgggactataggcacccaccaccamgcctacctagtttttgtatttttaatagagatggggtttcaccatgttggccaggctggtcttgaactcctgacctcaaatgatccacctgccttggcctcccaaagtgttgggattatagacgtgagccaccacacccagcctatttaggtcttctttaatttctttcaacaatattttataatttttagtgtgtaagcattgtgctttggttaaatttattcctgttttactattttcagtggtattgtaaatggacttcctttcttaattttattttcagtagttcattgctgttacatagaaatgcaactgatatatgtacattgatcattttgcaaccttaatgaacttgttagccctaattgtgtgtgtgtgtataatctttagagttttttagtgcaagatcatgtcatctgcaagtagaagaagttttacttcctcctttctaatctagataccttttatttcattktcttgcctaattaccctggataggacctccagtgcaatattgagtagaagtggcatgagtggacatacttgtcttgtttccaatcttagaggggaagctttcagtcgatcaccattaagtgtgatatattcattcattctttcattcaacaaatgtttactgagcagcaagttacgccactgtactctgggaatctcttggtgcttataatctgaagggggtgaggtaaggagaaggagtaaccaagagggaagtgaaataaatacaaacaggccaggcgtggtggctcacgtctgtaatcccagcactttgggaggccgaggcaggcggatcacctgaggtcaggagtttgagaccagcctggccaacatggtgaaaccctgtctctactaaaaatacaaaaattagccaggtatgatggtgcgcacctgtaatcccagctactcatgaggctgaggcrggagaattgcttgaacccgggagacggagattgcagtgagccgagattgcgccactgcactccagcctgagcaacagagcaagactccatctcgcgsgggggaagkggggaaagaaagaaatacaaacaagtaaggtgaatttaartagcatgacaatacatgtggagaagaaaataaagtaggtcaagtgatcttgactcaggaaggtgtcttcaaggaggtagtatgagcagaggcctgaatgaagggagtcagccatgcacatatcctagcaaagtttaacgtggaggaaggagcaacagaagcaaagctcttgaggctggaacgagcttgttgtaagaatgagatggtagctgagtgaatgagggtgccagaggcaggccaagagctagaggagggaggctgggtctccctgggtttaatgctgcccacccattaaaaagtgttaaaacttgaactttttttgtgtcagtttttatagtaaggtgacattgaggctattatacactaaagaacatttcgaatctaacagtgttctaaatgggcrtattttaaggaaatacagtcaagtgccatgtggcattctttggatgcatgtaattccaattagaattaattgtacatattctctctttttctttaaaagaaataagcttggctgggcgcagtggctcatgcctgtaatcccagcaattkgggaggcctaggtgggtggatcactggagtccaggagttcgagagcagcctcggtgaaattccatctctataaaaagttaaaaaattaaccaagtgtggtggtaagcgcctgtagtcccagctacacaggagactgaggttgagaccsgggggcaggggggtagatggcgggaaatygcttgagcctggggaggcagagtttgcagtgagccaggatggtgccactgcactccagtccaggtgacagagtgagactctgtctcaaaaaaaaaaaaaaaaaaaaaaaaaagtagcctgtttttaaaatcatctccaggaaatacattcaaaaccttcaaatataaaagatgtaaaaaatataaacatgtagatgaggatcttttcagcctgtctccccaccctccttcccataggcagctcctgtttattggtttcttgatatcgcttggaggcatgttatgcatatgagaaaatmgattttatatttatttttcccttgtttaaaacctcaagattaaaaatattaatttaaaaattctccagcttttctaatagaatttgtgtactgcatttagttcaaatagaaaacttaatattactaattttccatattcttacaaattgactttattctatacaaaatattcattatacctttgttattcctaatacatattttaattgtgataagtggttctgaggtctgacttctccattagattgccttgtctgtctctgggctaaagaagcactcagtgttggacaattaaatgatcaaatgtgagaagcacttttacacagttcgtgaaagagctcaccatcttaattaaactgcttgaaattgccatgtcatttctaatgcctttacttcttttttaagaaattgaaaagattaaagagtaagaaagtgataggccttaaaggaaaacactcttctgggaaaatagttaagaaaagtaactctggtcctcaactgggaatgtccttaccttgggtaccaagggggccactccaccagaactccataaaccttggcacagaatagaagcaatgaaagatgactccaaggtttcattcttaagggatccaaaccacatttttcttaatcacactgataaatggacaagacattttcacggcttttcactcacccctgaggcggaaccttggacaggaaatataggaaggaggctgtgctggagcatcgtgggtaatttttgacttttgcttcaagtttgcttcaagaaggtgagcaggaaagatgcatgctgcaggcagaagagggcatggtggtgcaggcgctctgcctgagcatgccctccctttcctgcttcttgtcctcctcgccctcactgtcctgcctgctcctcgcctgctggcctctcagtggactcctgccagtggtcgcctctccctggactttgaggttcagaagtggggcacaggagagtgcagagctggaagaaatgtttacagggtgcagggattggggaaagtgcatgtctcaaggtgggcgctccyaggatcccctggcaaaggcacaggaggagggagctgtcagaggaccatgtagccttgagaccatgggtgcctcctaagagaaaacagtgtctttatttctgtgctcctttagggggagaaacaaaggatgcattagctccatagggacaagcaagatggcctcactaaagcacagcagagccctggggtgactttcatgggtttgctaaagccaggtgtccttcctaagcctagccaaatccaagagacattttcccaggagggaaggggagtgcggaggcctcattctgcaaacattgcagctattttaaagaaacaattccagattttatatcttttacctgccaggaaattgcaaatgaggaaataaggaaataagtttggagctaagtggaatatgaccagtggagttagaggattttctggttgcttgatttacgaggtttgtcatttcaggaatcactttgagcataagctgttgctctctggtcattatcttttgtttgcgtttccttaatcatatcaccttttgagagattcctttccctcagctttcttcatattttccttccttttccatttgggctttctttggaattataatttaaacagagggaggcactgaaaccctttctgacttgtttattcttttttacaaacaacatccctttgtgggtttagtcagagatttgcactcttcactaatcaacaccaaaataaatagactcttaaaactgtcagtgacacgggccagttctgcagcccgagtcctgaagggccaagccagatggcaaagccaggcccctagcacacataatgcgtgtctgtaggctcttggcttcagcagcatgggcagctgactgcttttcagatggcttctgtggggagggagcagattttccactatccatttgttctttgggcatctccaggaataaaccctaaggtggcacaagtgttacttgaccgtgattaaaacctgctgtgtactggccgaggcacaggctagaaattctgaactcctgctttgccaccagcatgttctgtgattgcgttctgatcatgaagcttcccataggctctctggtgtataaggtggaggggtagagtggcccatttttctgaatttttaagtactgcagcaggaggtattgcacacatatgtgggcacatgaggatatgagttcattttkctcagaccagactgactggacagaacctcccttctgttcaacgggatattatctcaacactgttgaggtgaggagagaaagagcatytatcgccttctgtgcagcagtggtttgcttcgctcttgggagagtttgagtgtagctgaaatattgtgctctgaactcccatatagataactaatcaattgactgtctggacctctgaaaggggarttgaaagagattctgatatgggagctgccatcttcctctcccccagcaagagattggattttctcctttaagctcatgagactatactgcaaggaactcctaggtgtgcagaagacagaataacacactggaccaaataaattgttacgtgcaaccaatatgtaaataaggatctctcagttatgtcacagaaagagcctagaacaagccaggtcctccactggatttgcagaccttttgcctttgtggagaggatttttgatggtcaagtaaaatcttaggagaagttgttttttgagagaagatttggtttaatgaagaggagacagccacacatggtagatagggaagtaaccccttggactttcgtatattacatgtagaaccttctccattcacacacacttctttggacattgcagatgggtgttagaatgaaattgttttatattctgttgtgtttatcagggcacccttatttttttcttttgattcctattggtgcccggttgccttcctgccccttgcagcatggcgtggctctgtagttctgtgctgaagtgctgggttggaaycagttcggcatttgcctgtttactgcttctctacacattacagcttccttccttcagatagtgtttgaacagaccgaaaacatgtttttggatgtcatccagggtttggcttctgcttcccaataatgccataaaaatgctctgtcaaataaattctcaggaactgaaaagaacacattccctgctccatatgattgtcagtaatggaggaaggcttcagctgaccacctggcttggtgcccacggcttaggaaaaccaaatcacacaacatctcttggcagtgctttctagcaatcagaattaattctctgcatgtgatggatgagctttccatttaagggaattttcgcagagcatttatctccactggggcttttggattccataaaatattatctttacttatcctgcctggttgccaattagcatactatatgctatgaagtttttgagtcctagggtcaattttctcttcagtaagcttccagagttaaccatggaaagaatactttgatttggggtgtgtgtgtgtgtgtgtgtgtgtgtgtgtgtgtgtacgtatgcgtgcacatgtgctaagaggaatgcttccctttcccagcctggatattataacatccttatcattcagggtcccagctggagagaggtggcacattcaaattagggagggtttatttacaaagggaccattttaaaagatgtgaatgtgtggggcaaaatgctagggatagtgtagtaatccagtggagctgttactactcctaaaccagaagagaagaaaggaagggccaattaccagaacctagaaggagagaggcagatagagaaagaagtctgcttccagagtgacctttggtagagagactcatgtagccaggctaagcagcgtgtcaggtgaggccatgcactctcctctttccctctcactcctgccagggctccccattggctaagcccaatcagaaacctgaagacaagtgtcctttgacttgatcctcataggtcagcctcctagggcagagagcaggactgagaaagcagcgtggatttgaagggcaaacagaaggtatctgacacatctcccaatgtagataggtgtctaattatttctaggagaggcataacaatctcagtaggaaacttaaactcacttttatttttaaacagttttattgagatatgattgacatrcaatgaactgtacacacttcaagtatacaattcgataaactttgataggtatatacctgtgaaaccatcaccacatcaagatagtgaacttaactatcatcctcaagataaacccactttaacttaacacttaagatattccatgtggttcttttaggaggatgtggaaagagatcatgcagtaaagcaatagcaggtgcaattcctaacttactaaagttattgaagttagtgagttactgaatgaagttactgcccrgggttacaaagctcataagtgataaagccaggatgggatttaatcctctgagccttatgctattccactttaaattataaggcaaataaaatactcacaaacacttataaaaatcatttgttagcaacaagtttcttgctctccaccttatagctgatgaagggaccagccgtggcctgggttgagaactggcactcttacctcctgtgtccccagagcctgtttattctataaatcaagagctcccagggctggggaaggctggtgtcyggtgcagagttgaatttgagaccccagtcccactttctacaaagaagagcatctccctggctaagccaggacaaggaggcaggaggtgttaagttttagggaagggtgggactgggtagacaaggagggataccctgtcatgccgcagcaggggctacagtggcacccaccagcacaagagctgtgacagggccaaactgggttctgggcgggccttttgaacttgtctagtaagctcaggtctcagggcctttgaagtttttattccttaggtctggattgctcttaccccggatttctccaagtctcactgcctcactttattctggtcactgctcaaatatctcctcttcagaaaaggtttctttctttctttctctttttgagacagggtcttgctctgttgcccaggctggagtgcagtgcagtggtatgatcacagctcactgcagcctcgacctcccaggctcaagtgatcctcccacctcagtctccttggtagctgggactacaggcacaggccaccatgccttgctaattttttytatttttatttttagtagagatgagatcatggcatgttgcccaggctggtctggaattcctggagtcaagctakcctcctgccttagcctcccaaagtgttgggattgtagggataagccaccccgcctggcccagagaagctttcttttgccactctatcayaagtgccacctctgtcactgtctccctctccttctttacttttcctcatggcaatgatcactgttggacattagagtatcagttctcaaactttttggtcttagggttttgcacttgcttaaaaattattgaggaccccagggagcatagatttaaatgggttgttaccattcaaaatttgccccataagttaaaacaaattataaatttttttattcaatgaaaaatagtaataaacccactatattaacataaataacttatgaaaaaagctctatttttcaaaaccaaatagttaagtgagaagaatggcattgttttataytttttgtacatcttttctactaatagaagtttgctaggttgttgtatctgcttctgcatttaacctgttatgatatattatttttagtaaaagttgaagaaaaatctggccccacaaagatgtgtagttggaaaagggagggctattttaatatccttttcatataattgtgggtattcwactcaatattacaccaaaagttaagaagtggtcattgcttaaagtttagttgctgtatggaccttatgccctgggcatacttgygtgagccactcccaagcagcagtcagatggccgctttttataagaaaaagttgaacactctcttttgagataatgatttacataaagtagaataaaaaatgcaataatcgttttattatactgttaaataactcagccaggcacggtggctcaagcctgtaatcccaacacattgggaggccaaggcaggcagatcacctgaggtcaggagttcgagaccagcctggccaacatggtgaaaccccgtctctactaaaaatacaaataaattagttaggtatggtggtgggcgcctgtaatcccagctactcaggaggctgaggcaggagaatcacttgaacctgggaggtggaggttgcaatgagccaagattgcgccattgcactccagcctgggcaacaagagtgaaactccatctcaaaacaaaaacaaaaacaaaaccacttgtaaaaaaatcaccaagttttcgaagattacagaagtgtcttctaatcaaacaccaacttcttgtgtgcccaaaaytggaacrcttttttcttgttagattcacaccacatattattgctactttttttgaggcaaaaagtaacaagttaatggtttctaacatagtgccttgataaatattgaaaatatctgttcgttggaatggttttatttgtctttcaaatcctgtttatgtccactacttcatttgaataagagaattctgcctttcagaaatatcctcaagccagtacaggaatagagttaaacatccaagtcaacagatatgatcartaargtagaaggccattttatctgcttgttcacaatatttcaatgtcattaatcyataattttatgtttatctctgtaagatccgtacaggtttacagcaccaaataatctggccctgtcagcccagctgtgttcctctggatgaaaaactcctgccccagctcctaaaagaagcagkttatactacccatatsgtcggaaaatkrcacctgggaatgtacyggaaagaatgccttccaacccgcyraggatttgatacctactttggtaatggaaatgcacatgtttctttaacaacttagactaactgcagccatctcataaaacacacccaagtgcaatcaaatgaaagaactggatatttgaacacagagtgaatcagtcggcactgtartggggctgctttctaatsttacctctgtaaacrgggctctgtgctgaccttatggtgggcaaacccattacctttgttggagttctaaatgccaccttagggccttgcaagagtttactatccacgttggagaccgctgtactctcagagacccttattaccaaaaagggatatggattgattttttatttttttaatgcctggcaaaacctaatgtaagaatatttccaggctgggtgcggtggctcacgcctgtaatcccagcactttgggaggccgaagcaggcggatcacgaggtcaggagatggagaccatcctgactaacacggtgaaactctgtctctactaaaaatacaaaaaaattaaccgggcatggtggcacttgcccatagtcccagctactcaggaggctgaggcaggagaatgggcatgaacccaggaggtggagcttgcagtgagccgagatcatgccactgcactctagcctgggcaacagagcaagactctgtctcaaaaatwataataataataataataataataataataataataataataaaataaaaaatgaatatttccttcacaaaggtttggtgtgtttttttctccctgtggaatgtattcacaatttttcctttttttttgaagggggtgggggaagactcttccattggcattcttccacctgtgaaatctgtttttgcaatcacaaagktggggaagataggttttaaaaaacaaaggaaaatgaggaggccaaataaatggtaataagaaggataataagaaataataataagtattttataaacttgatagccctatgaaactaaatgtgaaacctagagtttgttttaaaatatgccctctttaaacctgtaataacctgtgcctgaattaataacctgtgtatcttgccagtagctatatatctttctttcaagttctttttatagtgagctatctgtttagctatttagctacctacctacctcccatctgttcatttatttatttacaaccctccrtagccaaaaaggaacacatattgaacatagaaagtttaaacaggattaaataatcaggatgagtagaaaaagatggaataggttaatggcatcaaattacagaaaagttgcatggctctaggctgtcttcatattcatctctgatatttgaaatttctttttttttttttttatatacggagtctcgctctgttgcccaggctggagtgctgtgtcatgatctcggctcactgcaacctccgcctcccgggttcaagcagttctcctgcctcagcctcctgagtagctgggattataggtgtgtgccaccacgctcagctaatttttatatttttagtagagatagggtttcaccatgttggtcaggctggtctcgaactcctgacctcgtgacccacccatcttggcctcccaaagtgctgggattacaggtgtgagccaccgcgcccagcctgagatttgaaatttatttgtcygaagagggagaaagaaaggaaaagactataagagttacattatttacaagataaatggaaaccagatgttcaggaaaagcaaaagcattttctggctcttaggcctgacagaaatttctcctttgggagaaggagaaggtaaggtggacaacatctttaaaaatgtcattttaataataygttaggtggttttcttgtagatgttttgaggtattttcttctgttcaagctagggccagagcaccaaagtgcaattcagtaaaagtaattatatgggggcyaaaacaatgcagctgaagcacatggctctgtaatgcctcattggattcagggttaaaatcaagatgcaaggatgtcagacaggagggtgtgtgtgccccactctcatccaggtccaccagcagacctcactactcaatcttagcttttttttttttttttttaaatggacccggatgtattctcagtacctcaaatagctgttaaaattagacttgatgtaagatcactttgtcatcttggaaattctagaggagcaaacagcctgtacatccttagaaatttttcaatcaggcctttgctaaaagatgagtcaatatctatactctgggaagaggatgggctgtagatattttgaattttttattaaaaccaagttaggtacttaaaaattcagctggacagaaggtagaaatgatatccttttatgagaattaagaagcctaacctggatttagatgaacacacaccccaaattcatttgaagggagacttgcagccaagaaggttatgatgaccacacagctcttctcactgttacatctcagctcttttgctaaaaatcaggtgatggtgggatagttgcacaagcctgtgaatacactagaaaccaatgtcttttacactttaaatgagtgacttgtgtggtatgtgaattatatctcaatgcagctggtacataaagcatcagagaagatttggttgttcaagaagcattttctatttttttcccccaaaagcataggctgccatcatctttaggctcagtattgaagttcaaatttgtgaatcattattatgaagaaaagcttcatgtgattgtcacatggttkcttggtattagtkttgccaagtatgtgaatagttttatttctggaattctcctatctgtattatcttttaaatatttgtagttcatgcctttgctaatgaagtgtatctgtcctatattctgcyaactgatagaaagcagctcacacttaacagttaaagaacctgaagtgatttcctcaagctttaatgcccagtagttattaaaaaccttaaatagacctccagtgttctgacattctaatcacccatgtaagggctgaaaytatttttatggatacatttctttctctgttacacattaattaacaagtactttgtatttcgttttccattatatacataggagaaaagattgccatataaaagttattttaagaccaaagtattaattgtattcaagatcttgaatttattgagtcatagaaaaggagaatttaatttaaaatgaattgatttattatataaactatgtaaagctcttaattttcattatagggaaagttcaggactgaagaaagagctaggtcaattttatcatcctcattttaaggttaataagcagtatatgtcaggagatagctaagagtctagcaaatatttctttttaataactttatcaaagtataattcacatatcatacaattcacccaattaaagtgtacaattcaatgatttttaataaattcagaaggttgtgccactatcatggcaatccaattgtagaacatttttatcatccccaaaaaagaaactcatccacctcagcaatcactccccatttccccctagtccctccagccctaggcagccactaatctattttctgtctctatagatttacatgttgtgggcatttaatacaagtggaatcatacgtagcacagcttattttaatactttaaaatatagaaatataatattttaaaatatagaaaagatggaacatttgcagaaacaactatatttgagaaaacccattttcttccatgtgaagtctaaattatgggataggccgttgatgccatttaaatctggggtgaaattgagatcattttaggtagmaaagtcttatttcagtgctcactttagtttgatctgttggctctgttatgtctagagatcctctattaggaaaggtttgtatctttcaccagtgggtgtcagcatctgactaaagatgactcttcctagaaccacttctgtaaataaccttgaagccagtctcgcaacatcagtaacaacaaacattgtttgaatcctgcactcatttatgtgatcaccttagagtaaaaacctgtaacaagtcacattaactgtacattatttttaccattatatagctttgaaggattgagattttatcacccttactgagtttcaactctgataaaaaawaaaactgttagtgttacatgatagcgcctatattctaaaggcgaatgaggaatagatttgagtttttatgcagtaatgttttaatgccttctgccaccagatatagacatgttgagaaatggtgctgattagccttgtcatttgattagcctcgtcacgggtaatcaattgcattaggcaattaaatgctgaaacattagtttgtttaacaagttttatgctatgctgactattttcgtcttccattcttgcaggatatctcctgggtagtgaagattattattcccatgaacgctgtacattaattgacgctctgaatgtcacacgaygtgctcttgattttcgagatggcgaagaagttgcaacaggatataaaaatatgtrttcaacaaacatattcaccaaaagggctatagccctcataactaaccatccaccagagaaggtaagttttgcttctatttactgatagcaaaatcttgttacactaatgtcttttcagacaaatgtaggaaaaggccattgttgtttagggaaaaatctaataaattctagggaagtccttttcaaattatacagtrtcccagaatcagcctgggaagcttgttaaaaaggaagattcctggagcccacctctagggtgtgatttattaggcgtgggagaaatccgtacatcagcattttagagaaactcttaaaaggtgattcttaagagkggtccccagatcacactttgaggaatactatgttggtagtatttcaatagaaatatagtttaaaaattttgrtatattangtgcatgtgctgtgagtaattaataaaatgacttaaaaaatgattggcttagrtgtaaggtgaggctttattatgacaaacttttggttaagggatccataaattttgggatcagggcagttcctctaaccttgtacttcctccctacaagaatattttgctattctagatcttttgcatttccatgttaattttagaatcatctagtcaatttctatatgccagctcccccctgcccaaagtgtctgcttggatttatatttgaaactatagaacaacttggggagaatggatgtcttaacaatattgggtcttctaatccatatacctggtataccaatgagcttatttttcacatttactatactgatgcttttgtgtaacacatgaataatcttattattatgattattttgttaacctagagttaacttcatgaggtaaagtttaagctaagttctctggatttagcttataaatgcttttgaaatgggaacaaatatttgtattgtcagacactgggctcaaaatatggcttcattaagaacacccataaaaataatacttcagtgggaccctgacacaacaaattatagaatatgcagtgctccctggttcttccaatttcctgcactttgcctctttgacaatgcctgaaggtccttggtgcaggtctgtcttagtctgtttgtgttgctataaaggaatagctgaggctgggtaatttataaagaaaagaggtttatttggctcgtggtgctgcagactctacaagaagcatggcaccagcatttgcttctgggtaagggcttcaggaagcttccagtcatmatggaaggtgaagttgagctggygtgtgcagatcacatggcaggagaggagagagagagagatgccaggctctttctaacaaccagmcctctcaggaactaatacagtgagaacttataactgcaaagatggcatgaagccattygtgagggatccacctccatgacccagacagctgccattaggctcccactggggatcaaatttaaacatgaggtttggaggagggtcaaatatctaaactataagaagatcaccgtgtggattctggttkacatacctgtttggacttggtatgtggctgctggttccccttccagtttctgcctgtttgaactcagtattggaaatcttccctgaatgagttaaatgccagattgctggcatccttatttgacttccacaagctaaggtaaaatctttcagaagacaactttacctcgaacttcaaattatatttacactatcaaatgttatacaactcctgacattcattaaaaaataatagaaaccccgtctctactaaaaatacaaaaaaaattagccgggtgcagtggtgggtgcctgtagtccagctactctggaggttgaggcaggagaatggcgtgaacccgggaggcggagcttgcagtgagcygagatcgcaccactacactccagcctgggcgacagagcaagactccgtctcaaaaaaaaaaaaaaaaaaaaatcgagcacatgtagaagtgaaaacacagatagaggtgtctgtcctcagctgcgtcccacttttggcgatcactctcctatgctgatatcttgaagcaaccatgctttctgtggaacacgaagaaatgggaacattctctcaaatatgtggaaatacacagattttaaatttaaatctaaacaaatattcagataattggaaaaatagttgctaggtaattggcttaaatcctcagttttcttctacatatttgacattttatggatgcaccttaacacttaacmaggtaaagtcttaagagaactgtgtattattctttgagggagccaccattttacacataagcaaactggcttagagaagttaagtaacttgttcaaggtcacagagctattgagagtcagaatcagaatttaaactcatgctctctgactccagacctcatgtacttaatcagcctccctagttcacagctaatatccaagaccagagattctgagtcccagctcatgattcaccttaatgatttcagtcctgaccatatattagaatcatctgggaaacttataagaaatactgatgccaaatattgtgattcattggtctgaggtgggacccaatcattggtgtttcattattcctcctcctgggctcctaccagtgattctaatgtgcagtcatcactgacacctggtgcagtgacagccattctcggatgggtcattcagggcattcctctcaaatatggagaggcaagcagaagccagctacctattacaggttcacaatctgccataccttaatctgtgcaacaactgtaatctgcccacaatacaaattcattcctactgaagaacgatggaatattccctcacagggttccataacattaagcagataagaggaagcaactggagtgaaataatagatctttgtgggtgggctctcttaactagggtggtggggaaaacacggaactgaggacaataggaggccctaaaagcttgctagccatggaaggagtgttattaccatagccgctgttcgtaggtaactgtttggaaattgccagatgagaggatggtcattttcctatygtgtctgaaacatgctatagcagtatccagcattcccagtatcttcaaaggaaagtttcagtcatagacataagtgaatgaaataatcaatagtcaagctgtaacccaagaatgtttaagacagctaatacatgtttacattttcaattctgtataaaatgatgcaactcaccagtttgaggagctgagcttttcacgattttatcccgatgttgaatctaattctgggctaatttctcaggtactatatatagattgtagcataaggaacttgttctaagataaaaatcattaaagaaagccacatgaagaatccacaggctaacttaaaattgtgcctattttaaaaagcacttaagaggaaaaaagcatttggaggcagttcataactgaaacacagttgctgatgctggactcaggaaggtactgctaattaccatttcacatatgttaagaaggaaccttctttctctttttcagcaggataattccccatactagtgacactacagactgaaagtaacatattcataaaatatctttcttttaaaaacagcccccygtcagccgggtgcactggcccacacctgtaatcccagcactttgggaggccgaggcgggtggattgtgaggttaggagtttgagaccaccctgaccaacatagttaaaccccatctctactaaaaatacaaaaattagccaggcctggtggcatgcacctgtaatcccagctagtcaggaggctgaggcaggagaatcgcttgaacccgggaggaagagttgcagtgagccaagctcgtgccactgaactccagcctgggtgacagagcaagactccatctcaagaaaaacaaacaaaaaaacacccccatgtcagcactttgcagaatggaagcaaatgtaatgttatacacctgatctactagaagcttcttaaagaaaatgttaatttctagtggaagactcttacttttctgtgacacaatttggaaaagaatgtcttaatttagaagtcaaagaaaaacaatttcaaaacctatcatatgctttttttttcatttatactttaaattaggagaatacactaaagaaatgaaaataagactttcttcctcactgaaataagttttcttagcatggtgaggatatttacagtatatatcttaggaaccatgtagcataaataaagggaaaagaacccccaatatctcaaacatgaatatgctaatagctctaggtgataatgtcttgcttttatgtartacttagatatttagtaatgatttcatgcctaggatttcatttcacattcccaagacactggaaagggttacaggtagggttggagctaaggcagtaactgtgacagttgatgagaacagggatctggacctaagaaaaagcaggggagagatcaggctccagtgatggcagctgctggctttaggctgacagtgagccgagctctggttggcaggagtgggaaaattgaccacagctgttcacaggcagggtcctaggaatagtggctgcaggtggggtcctcactgtgattggagaaccttggagtcctagttaattcattccactaggctaccatatagtattaaaaacactactctttctcttttttcaatttaaaaatagtatagaaatatttcacatttactactgttggggaatgagttataatatttcatgaataaagttcaccttctgagtgttgaaactttattttttgtagtatgggatggaaatatctaaaatgtgcatcagtcctgacctcttgaaatgggctatagtaccgacatggactggtatagtttcttatttttaacccctcaagagtgtcaacttaaaataatcaaaaggatcagaatctagtttaaagagagtttattcaagtacagagtttaaggatggcctcttgggaagcacagattccaaagaatggaagtccgtgtttcaaagtgtagaagtttgggatttcttactgtattagtccattctcacgctgttataaagaactgcctgagttccactggccctccagtgagctgagggtttttgcaggaaaaaaaaaaaagctgcctgagactgggtaatttataaaggaaagaggtttaattgactcagttccacatggctggggaggcctcaggaaacttacaatggtgtggaaggggaagcaaacaagtctttcttcacgtggcagcaggagagagaagtgccaagcaaagggggaaaagcgccttataaaaccagcagaccttgtgagaacttattcactgtcaagagaacagtatgggggtaaccacccccatgattccattaactcccactgggtccctcccctgacacatggggattatgggaactacaattaaagatgaaatttgggtggggacacagccaaaccatatcacttacatagacaaaatttaggggagcttaaaagaatttcaacatctttctgtacaaggcttaatgcataattacaatgatctgattagtcaaggtggtggttttcttttgggaaaggtatgtttaacattccacactgaagatgtaacagtcatggtgttttttgggtcatctggtctgagttaggtacaggacaataaaggaggtggttaatctataacaaagatcttcaataagaaggggaggagtcctggtctctggtctttcctagttatttacagaagaagaacaataaggaagagagttactctataatctaagaaacagaagttgcaaacmtgctacgtgacacagtctccaggacttaattttccccttggcataatttagagggtcctgaaaatttatattcttttataaaagtgatggtaatgtctttagctactaaggaataattataggaaagattttcagattatttttcaccatatttaacaaagtgagtagaatgatttctatactgaatatttataagaacctttaataatgatccccaaatctttttttccctggtcattgttcaagaactcccctgtccsccttcccagccattgcctttagtaatcaattgctggctgggaatcacctaccctctttctcctttctctccttcgccaggtggttgccatgttgctgctaatgacctggatgagaacatcttctccttaagctgtgggccccctctctccccactgtatcccctgccccctgccactgttaagagtccagatcagagtcacaaaatctcgtgtttgcaagggccaggctgctaacctaaagaagtgaagcagtttatgtagaacagtgggaaactagaaaattggatagcatttgagggggatggggcccctgtttctcatactccagccttttgttaccagatggagtgtggacaaagagtagtcagaaattctgatttttccaaaaaartttttttatataaaaacagatcgatgtgatatttcctgattttttttaaaactttacgtgggctgcaaattgttgtagacttccgatttttaatcctatccccatctggaccttggctggtggctggagttggctcagtctagtgctgaagacccagatagcagtacccagagcagacccatactgcactgtcaggtcagcgatgcacctgcacgttcttccctccagacatcgcagccragaccttcatcacccccaggcagggcatctgttgggatgtcctgcascatggtctacacgaacatagacgcttcagcatgaccatgcagctggagtagaaggtgtatgtgtgtcgagtggaagcagaggcagaactgaaatggtgtcagaggttatagaatagacttttggagtgggaatttggaatgttttcccatggaaataatggaagtacgggttctacattatcatcattttcactccatcagctgcstccttagtttaataggttttaaagcaacgactttgacatttagcagctatttttaactttgtgagtttagggaaaacgtatttctgagttccaaagacctgaacaataaataaacttttggggggtctatttgagctctatgtatggatactcctttttgcattacaaggatgtgtaatataaaatttaaaacaacttgtcaacaatgaagaatgaaataygagcaccacccccccaccaaagtctgtttctaaccattttcattcatttatgagatttaaatgcctcaaatactttaacagaattatacgtttatttttgggttaaactagttgttgtctctttgaggcttttcaactcattaaagaattctgtagcactatgaagagaatgccttcagaaaggctcattaaaaaggagaagctgacctggtatgccactaatgttaaatgttgcaaattgatgtaagtggtaaaatagaatcagtgtgtcatacttcttagtttcaggaattaaactggtcttatgtttggtcctgcatcaaagactaacaaggcatggtgttcactttttttctcataaaatatagtttaaaaatactaaacctcttctaaaagatgagggcttattttcagctaaagcaaaaagctaaagcctctattggtacacatccatatcgtaatagtgggttttccaataggaaattgctcttcggttaatgtggagttggacaagtcacacatataacctttctaagcctcagttaactcatctgtaaaattgctgtaacatagggtggtttcattaaatgagatagaatrtgtaaattattatcatactgtctagtatgtagacaacatttaatatgtggttgccattactgatattattatttgtttggattaggtccattgaggccgttctgggactctggcttttattttcaattttttgtcttgtgtcttttgttatattttttaatatctttattgaaacaaaatttacatatcataaaattcactcatttaaagtatacagttcaatagtaaattttcagttatgcaaccataccacaatctaagtttaaaacatgttcatcatccccccaaaaaaaccttgtatctgttagcaatcactcaccattcctctcccccacaatttcctacagccccaggcaaccaccctctgtctctatagatttgcctatatttctggaatttcatataaatgaaattacataatatgaggacttttacgattgactgatttcacttagtataatgttttcaaggtttatctatgttgtagtatgtatcaatactttatttcatttattgccatatgttgctgaaaatataccatattttgtttatccattcatcaattgatagatgtttgggttgtttctactctttggctattatgaataatgttgcagtgaatattcatggaagtttttgggtggatgtatgctttgatttctctaggaatggaaatgctgggtcatatggtaactctatgttttacaatttcaggaactgccaaaatgtttcttcaaagtggctatgtgtgccattttacattcctgctagtaatgaatgacagttccaatttctccatatcctcaccaatacttgttcttttccatttttaaattatcaccatcctaacagatgtgaagtgttacctcattgtggttttaatttgcatcttaataatgactgatgatgttgactgtctttacatgtgtttattgccttttgtgtatcctctttggagaaattgctattcagattctttgcccattttgtagttgagttatcattgagttrtaagggttctttatatattctggagatgagtcccttatcatacatgtgattcacaaatactttcaatgcattctgtaggttgtcttgatattatttttattaatgcataaatctgaactgtcttatccttctatatttaatgcttcaatatcctcttaactggtttgcacaaactttctttccagcctctgtttctctaccttgctctccagtctgtgcatgagccccttcaggtccctgaggaatacttgaagccatatgactttatccaagacaagaacaggcatcactatgcaggaatggtgtcccttatggatgaagcagtaggaaatgtcactgcagctttaaaaagcagtgggctctggaacaacacggtgttcatcttttctacaggtaagtctgtcaataggaaaatcatctcttggcaaagcctaggacatggtatttgataagtggaatgaagacaaattggagcggttagcattgccttattaaaataaatgcaaactgcaatagtggagacatggtaattgtggatggaaagatatatctaaggaaaaagaatgatgggcttcccccgttccctcagatatcaaaatattctgggactgtggcttgaaaacacatgttcactaactgagtaagtatgagtggacatcactcatatacagggctgctgggtagtgaatccctagagtggcttgttcccagctctctctacaacccagacatcctctatggtcacaactcccaccaactagaagggtctctgtatcactgcaaagagacagattgtgacattatgaagacaaataatggagccatttaaatctatgaaagtgtctccaagtttagatttttttggtattaaaattgtttttggggccgggcgcggtggctcacgcctgtaatcccagcactttgggagaccgaggtgggtggatcaactgaggtcaggagttcgagaccagcctgaccaatatggtgaaacctcttctctactaaaaatgcaaaaattagccgggcatggtggcgagtgcatgtagtcccagctactcgggaggctgagacaggagaactgcttgaatccaggaggcagaggttgcagtgagccgaaactgtgccactgcactccagtctgggcaacagagtgagactgtgtctcaaaaaaaatattttttttctgacagtaaaagttatatatgttattatagacaaattagaaaagggagaaataaaactcataatctcagagattacttttgaaaatcattttcattatggcgatgccattctgtttcctaatctgttacatrtgcaacttccccctctcattagagacggttttctgaaatttcactgtgatgtgctttgggtrtagatcatcatttattcatcatgctgagtactcagagagcactttcaatctgaaaatgcagatccttttgttatggggaattttcttatatgatttattttggaattgtgtggccctccgtcccaccttcccctattttttctgtacagaactcctattatttggtcaccaggtcagtcctctaatttttcytagtttttttttyccctctcctgttttctttatttttcttctagtatttgggaaatcttactgttttgtaagcttcctattgaatttattttaactgccatgtctgttaattaccagcaactcttttgtgttttctgataattccttttttgtraagttctgtttttaatttatagatgtcataacttgtttccccaaagcctgtgctcttaaccattactcttaaatgtgtattatgtgtgtgtgtatatatatgtatgtatatactttttttaaagtttgctgatattgccaacattatctctcttccttttgagttctttttttcagtttgtttatatctttgttatagtctgtctttaatgagagtggtttggttttctcaaatccctagagattcttggctgaaatctaacaatttgattggaaactccaagtgccaggtcagggcttgtcatctggtgagttttactgtaacatgaccatgtaggggtgaggtgacatgttgaggaattcattttggtattctactcatacttttgtggttttgttttttcacgagttgttttgttttgctttcaatcaggcatagttattgaacgtggcatttgttgagcagttactatgtgtgggacgcagttctaagtgtttcatgcgaattagttcagtgaatcctcatgataatggattctctgggaactattattgtcccatcttgsagatgtgagaactgaagcacaaagggcataagtaacttgccccaggtcaygcagccaggcagagcctggctccactacagtatcctgcctcccagatgatgatctcagtgttctcataggacctcatggtatagcagagctttmcatatggtgtgctgcaatattgatctactgaggagcctgggcagggccagaatagcatctaccctgagcagccttgttcacttgtgtgggtgctatccaaatactataattttctaagtatgtcctgctgtgaaaaaggttaaaatttgtttttctcccaaaacttactcttcagaaaaaaaaggtagacatatttcagcccttaacaagatctctcagattctgggagtcattctcaatttaatttattttgaatatcctggcatagcattttgatcagtgctggttttgaatgcctagagaagtcactagaaagaatcaattaaaaaaaagatgctaggacatgtaacactggtgtagcaaaattattcctgggaaatgacctcattgttgcaagaaytggaagtcataagtttakaaaacaagtctttgttctagagatcacaattagacaatttcaggacaaatgattttctaaagtgaaagtatatatggattaatgtattgtacgtgggcttaaatgtgctcagacagaagtgaagatgctagttctggaagactgtattaaatatctctaagtggctcttgtgataacattcccatcaagaatgcatgggaggctgggtctggtggctgacgcttgtgatcccagcactttgggaggccgaggcaggcaggtcacttgagttcaggagttcaacaccagcctgggaaacatggtgaaaccctgtctctacaaaaaatacaaaaattagccaggtgtggtggcatgtgcctgtagtccaagctactggaggggctgaggctggaggattgcttgagcctaggaggttgaggctgcagtgagctgagattgcgccactgtactccagcctgggtaacagagcgagaccttgtttcaaaagaaagaaagaaagaaagaaagaagagtgcatgggaagaggtggaatacaatttttttcatgatatttgagaatggaaaaatattttaagataaatatttcctttattatatgattgcaaatgtgtatgtataattgtactttcaaacagatagttgactatttcrtaaacatctatatttattcaagctggtagtagtaacatttggagcttctcactgagaaaatgaggatcaccttaaataggattgtcttatattttgatactatattaatagatatcttaatcttggatcatctttgctttgttaggttaaatccaacttgaccgtgcctatgtatttttattatactgatgaattcagtttgctagggtttcatttaggatttttgcatcaattcagaagtggaagtagagttagtggtttcttttttgtgtcaggttttgttgtcttggttgtrctcacttcataaaataatgtggttagttttgccatctttttctatgctctggaatagtttatagaatgttggaaagatctttctgtttagctggtccctgaagccttttgtggaggcatttaaaaaattatttccatagtttacattttttgctgaattatatctaggtgtgtgtctttaaaatgttttgaaattaattttgcctgaaatatagtgagccctgaaactgcatgctgagatgattattcactccaggaggctttccttgttcctattttagcttattgcttttgttctacttgatttatgtctcaaaaatatctttaattactgtgttgaatccctgattcagcttttctctcatccttttcattttttttgtcctttttctcaggctttggagctcttctgcattaccagtttagacacttttgcaattttaatcctacaccttaatatctccaacatagattattgttgattgtatttttagtttttttgcaatgctgtctctgtttcaatcagtacccttttcttccaagcttgttagtatagtatagtatagtatttagtagcattaaacctcaatgtaaccctgtgagatagtaaatggtttcttgatcccatttaccaatgaagaaatcaaaacttctttttaaaaaataaaataaaaaaataaagatagggtcttgctatgttgcccagactggtctcaaactcctgggctcaagtgatcctcccacctcagactcccaaaatgctaggattatcagtgtgagccgcttaaagaaattaagcgattagtccaaggccacacagctaacaactgaaaaagccagaattcaaacccagatctacttgaggtcaaaacccaattaacctaatcagttgtctttttgcatctcattttcttttccrtttatttcatcccattgtactgcatttctacgcttgtgttcacaggacccatccttttcctgaacctttctgaatagaacttttctaaaatctttatttttataggaagtcattgccagctagatgctcttccttggagtatagtggtgaaggatctgcacacacagaatgtgtggccgtcttgtggcctctggtcactgtttcctggttgattccttctcaaatctgcagcttgaggtcaggttgatgcatacacctcacagagttcctggtggcatataggcattaagtgttctactctattgaacctgacccacctagttacagtttcttcttttttggcactctaattctttgacaggctaaaagaaccccagactcttcctatctccacattttcagggctttatttttggggacattcctcaggatacagtgtgccagcactgccagaccttctcttttcctgcctattgtcttctgggagttgtgatctctaagcacacagaagtagaggaggtaataattctcctctgcttaaattagtgccatcccttctcaggctgtcttcctgcctctcttaatctaggtgaagggctctgtgtcatgaggcaaagcagggtgggccagttcttatttcctcagcccagcttctctggtcttgtagtttctggacatgtttccaagattctggcattataagctgtctgtccatcttggtttcttatgttgtgatggggtttcatcttgttctgtgtttgttgttttcgcagggtagtggtccagagaagcagcactagtggctgttaggaagacaccattgtattctggatgcttgtcaccatggctgatctttgtagttgctaaattccaggaacctgcacaggaatctgacctggagtaaaatgagttaaggttagggacaactcttgagtaactaggtcatgagttaagactaggaaaaccgattctgcaaccctgaaaacagtgattgacctcaacatcttaatgcagccattgtgtatttatattaactcttttttttgtytgttttgttttttttgagatggagtctcgctctgtcactcaggctggagtacagtagcatgatcttggcttgctgcaatcactgcctcccgggttcaagtgattctcctgcctcagcctcccaaatagctgggattacaggcgtgtaccaccatgcctggctaatttttgtatttttaggagagacaaggtttcgccatgttggccagactggtctcgaactcctgagctcaggcaatccacccacctcagcctctcagagtgctcggattacagtcatgagccaccacgcccagcctgtattaagccttaccagaataattagttttacttacatttagatgagggtttgaatataaggagaaacctaatttgcatttctttctccagagacttctgtgtttattgacaatttcatttcctgaagttgaaattaataatgtgctataataatgtaattataacccaaggacctggactaactaatcacagagcagtgattcattttttcccacttctctcactttacttcacttagccctgtacttctttataaggataagaatactggttgcattcaaatcaataaatgttgagtccattagtacagaaaaccatgaaaacaatctagcttcctggtgtyggattatatttggtgatcggtaaaggcaaaggcataatttttagattttgatgtttgataaagctaacttttaaaaatttctgttataatctgagagaaatccatgattcattccttgccacctctacccatcatcttagcatagttattctcagtgcgctgtctggggaccacctgcagcagtggagcatttgttaaaaatgcaattttcaaggtgatggctgcacaacattgtgccatgttctaaatgtcactgaattggatactttaaaatggctaatttcatgtaatgtgaatttcaccacaatcttaaaaattcagtttctcagactctatcacagcccagctgaattagaaacccagaggcccaaaaatctccatttttaacaagaattcaggtgattcttttgtacacagaaatttgagaacctctgagctaaggtaactcttattcaaactttaggaatttaccttacaaggaatgtatgtggttatttaaatttgacatatatttatgtttatacatatatcctcctcactaggaggaatatatatatgacagctggaaaccaactgggtttgaagttcaggcgctcctaggtagttttcatttcaggtaaatgcacctatttctagaaatagactcttcaaaaagctgacgagaaaagtttaaatttaattattctgctttccatgttcttactgcatataaatcacaaccttaattgattcatgccatttcttctgcagtgtgtgattaataccactgttaacaaatattgtctttctcattacacacatactattctgggtttgtttttttatttctattttttatttttatgggtatatagtaggtataaatatatatttatggagtacatgagatattttgatacaggcacacaatgcatagtaatcatatctgggtaatggggatatctatgccctcaagcatttatcatttctttgtgttaccaacattccaattaaactcttytgattatttaaaaatgtacaataaattattattaactgtagtcaccctattgtgttattaaatactagctcttattcattctatctaagtatatttgtgtacccattaaccatacccacttcccccctaccctcaccccactaccctttccagcctctagtaaccatccttctattctctacctctatgagttctattgttttaatttttagctcttacaaataagtgagaacatgtgatgtttgtctttgtgcttggcttatttcacttaatataatgacctccagttccctccatgttgttgcacgtggttgatctcattcttttatgtgactgaatagtactccattgtgtatatgtagcacattttctttatccatgcatctgttgatggacacttaggttgttttcaaatcttggctattgtgaatagtgctgcaataaacatggcagtgcaagtgtatgtttgatatactgatattctttcttttgggtatatacttagcagtgggattactggatcatgtggtagttttgtttttagtttcctgaggaacctccaaactgttctccatagtggctgtactaactcacattcccaccaacattgtacaaaagtacccttttctccacatcctcgccagcattcattattacctgtcttttggataaaagccattttaactggggtgagaggatatctcactgcagttttgattggcatttctctgatagccaatcatgttgagcaccttttcatatacctgtttgccgtttatatgtcttcttttaagaaatgtctattcagatcttttgcccatttttaatcagattattagattttttttccccatagagttgtttgagttccttatatagtctggttatttgtcccttgtcaaatggatagtttgcagatattttctcccattccatggcttatctcttcactttgttggtcattttctttactgtgcaggagctttttaactcaatggaatcctatttgtccatttttgctttggttacctgtgcttgtgggatattacacaagaagtctttgcctagtccaatgtcctggagagtttccccaatgttttctwttagtagttgcatagtttgtgttcttagacttaagtctttaatccattttgatttgatttttctatatggtgagagataggggtctagtttcattcttctgcatatggatatccagttttcccagcaccatttattgaagagactatcctttctccagtgtctgttcttggtacttttgttgaaaatgggttcactgtagatgtatggatttatttttgggttctctattctcttccttttgtctaggtgtctgtttttatgctagtaccgtgctgttttggttactataactctatagtataatttgaaatcaggtaatgtgattcctacagttttgttctttttgctcaggatagctttggctattctgggtcttttgtggttccatataaattttagaattattttttctctttctatgaagaatgtctttggtattttgatagggattgcattgaatctgtagattgctttgggtagtatggacgttttaacaatattgattgttccaatcatgaacatgaaatatctttccattactttgtgtctgcttcaatttccttcatcaatgttttatagttttcattgtagagccctttcactactttggttaagtagtgatctacttactacttattcctaggtatcttattttattggtagctattgtaaaagggataactttcttgatttctttttctgattgttcactgttggcacatagaaatgttaccgatttttatatgttactgatttttgtatgttgattttgtatcttgtaactttactgaatttgcttatcagtcctaatagtttttttgtggaggctataggtttttccaaatgtaagatcgtatcatctgcaaacaaggataatttgacttctttctttccaatctggatgcctttatttctttctcttgtctgattactctagctagcactttttaattccaggttttttaaatccaaggatgacacttctaatccttctctgatagaacatgatcagagtttgagtcccaactttcctgccaatgagttatatgtagagtctagcctcggtttcattatctgttaaacgcaagttgattgaccattcatttattcactccgtctttcattgcagataaaaagataactgggacatattgctcccttaggaaactcacactctagtgaagtagacaggtacatgtattattattatgcagtgggaatattaggatgaagcccagggtgctgtctgcacacaataagagccacctctcagagcccagggtgtggggaggctttctgagatggaaaggttgggaatggcttggccagataagcagaacacaggtggggaggagattgggcagcattctagcctgtgagaaaggaacataaataaagacagggaggttgggagagcagtcctggaggggggtctgcattgctggagcctggactgcaaggtggagagcagcgagatgtgaggctagagagcatgacccaggggtccactcagaaggggcctgtgcacatgcagggaggaattgtgaagggtctcatggtgacagtgaggcacttaaaagttttaagcaggatcagattttcactttagaactgaaatggagggtgattggaagcaggccgaccttttaggaggctctgacaataaagagaggagagaagataaggagcacttgartaaaggcagagggaaggtggatggagataagaggacagatttaagaaatacataggaggggtggagccaagatggccgaataggaacagctccagtctacagcttccaacatgtgcgacgcagaagacgaatgatttctgcatttccaactgaggtactgggttcatctcactggggattgtyggacagtgggtgcaggacaatgggtgtggtgcactgagcctgaggcaaagcagggcgaggcatcgcctcacccgggaagcgcaaggggtcagggaattccctttcctactcaaagaaaggggtgacagacggcacctggaaaatcgggtcactcccaccctaatactgcgcttttccaatggtcttagcaaacggcacaccaggagattgtatcccgcgcctggctcagagggtcctacgcccatggagcctcgctcattgctagtacagcagtctgagatcaaactgcaaggtggcagcgaggatgggrgaggggcgcccaccattgccaaggcttgagtaggtaaacaaagtggccgggaagctcgaactgggtagagcccaccgcagctcaaggaggcctgtctgcctctgtagactccacctctgggggcagggcatagctgaacaaaaggcagcagaaacctctgcagacttaaatgtccctgtctaacagctttgaagagagtagtggttctcccagcacgcagcttgagatctgagaacggacagactgcctcctcaagtgggtccctgacccccgagtagcctaacagggaggcacccccttgtaggggcagactgacatctcacatggccgggtaaccctctgagacaaaacttccagaggaatgatcatgcagcaacatttgctgttcaccaatatccgctgttctgcagcctccactgctgatacccaggcaaacagggtctggagtggacctccagcaaactccaacagacctgcagctgacggtcctgactgttagaaggaaaactaacaaacagaaaggacatccacaccaaaaccccatctgtaaatcaccatcatcaaagaccaaaggtaaataaaaccacaaagatggggaaaaaacagagcagaaaaactgaaaattctaaaaatcagagtgcctctcctcctccaaaggaatgcagctcctcaccagcaayggaacaaagctggatggagaatgagtttgatgagttgagagaagaaggcttcagacgatcaaacttctccgagctaaaggaggaagttcgaacccatggcaaggaagttaaaaaccttgaaaaaagattagatgaatggctaactagaataaccaatgcagagaagtccttaaaggacctgatggagctgaaaaccacggcacgagaactacgtgacgaatgcacaagactcagtagccgatttgatcaactggaagaaagggtatcagtgattcaagatcaaatgaatgtaatgaagtgagaagagaagtttagagaaaaaagaataaaaagaaacgaacaaagcctccatgaaatatgggactatgtgaaaagaccaaatctacatctgattggtgtacctgaaagtgacagggagaatggaaccaagttggaaaacactctgcaggatactatccaggagaacttccccagtctagcaaggcaggccaacattcagattcaggaaatacagagaatgccacaaagatactccttgagaagagcaactccaagacacataattgtcagattcaccaaagttgaaatgaaggaaaaawtgttaacggcagccagagagaaaggtcaggttacccacaaagggaagcccatcagactaacagtcggtctctcggcagaaactctacaagccagaagasagtgggggccaatattcaacattcttaaagaaaagaattttcaacctagactttcatatccagccaaactaagcttcataagtgaaggagaaataaaatactttacagacaagcaaatgctgagagattttgtcaccaccagtcctgccctgcaagagctcctgaaggaagcactaaacatggaaaggaacaactgataccagccactgcaaaaacatgccaaattgtaaagaccatcraggctaggaagaaastacatcaactaacgagcaaaataaccagctaacatcatgacaggatcaaattcacacmtaacaatatgaaccttaaatgtaaatgggctaaatgctccaattaaaagacacagactggcaaattggataaagagtcaagacccatcagtatgctgtattcaggagatgcatctcacgtgcaaagacacacataggctcaaaataaagggatggaggaagatctaccaagcaaatgaaaaacaaaaaaaggcagggattgcaatcctagtctctgataaaacagactttaaaccaacaaagatcaaaggagacaaagaaggccattacataatggtaaagggatcaattcaacaagaagagctaactctcctaaatatatatgcacccaatacaggagcacccagattcataaagcaagtccttagagacctacaaagagacttagactcccacacaataataatgggagacattaacaccccactgttaacattagacagatcaatgagacagaaagttaacaaggatatccaggaatkgaactcagctctgcaccaagcggacctaatagacatctacagaactctccaccccaaatcaacagaatatacattcttttcagcaccacaccacacctattccaaaattgaccacatakttggaagtaaagcactcagcaaatgtaaaagaacagaaattatagcaaactgtctctcagaccacagtgcaatcaaactagaactcaggattaagaaactcactcaaaaccattcaactacatggaaaccgaacaacccgctcctgagtgactactgggtacataatgaaatgaaggcagaaataaagatgttctttgaaaccaatgagaaaaaagatacaacataccagaatctctgggacacattcaaagcagtgtgtagagggaaatttgtagcactaaatgcccacgagagaaagcaggaaattgacaccctaacatcacaattaaaagaactagagaagcaagagcaaacccattcaaaagctagcagaaggcaaggaataactaagatcagagcagaactgaaggagatagagacacaaaaaacccttcaaaatatcaatgaatccaggagctggttttttgaaaagatcaacaaaattgatagaccgctagcaaractaataaagaagaaaagagagaagaatcaaatagatgcaataaaaaatgataaaggggatatcaccactgatcccacagaaatacaaactaccatcagagaatactacaaacacctctacgcaaacaaactagaaaatctagaagaaacggataaattactggatacatacaccctcccaagactaaaccaggaagaagttgaatctctgaatagaccaataacaggctctgaaattgtgacaataatcaatagcttaccaaacaaaaagagtccaggaccagatggattcacaaccgaattctaccagaggtacaaggaggaactggtaccattccttctgaaactattccaatcaatagaaaaagagggaatcctccctaactcattttatgagtccagcatcatcctgataccaaagccaggcagagacacaaccaaaaaagagaattttagaccaatatccttgatgaacattgatgcaaaaatcctcaataaaatactggcaaaccaaatccagcagcacatcaaaaagcttatccaccatgatcaagtgggcttcatccctgggatgcaaggctggttcaatatatgcaaatcaataaaggtaatccagcatataaagagaaccaaagacaaaaaccacatgattatctcaatagatgcagaaaaggcctttgacaaaattcaacaacscttcatgctaaaaactctcaataaattagatattgatgggacgtatctcaaaagaataagagctatctatgacaaacccacagccaatatactgaatgggcagaaactgraagcattccctttgaaaactggcacaagacagggatgccctctctcaccactcctattcaacatagtgttggaagttctggccagggcaattaggcaggagaaggaaataaagggcattcaattaggaaaagaggaagtcagattgtccctgtttgcagatgacatgattgtatatctagaaaaccccatcgtctcagccccaaatctccttaagctgataagcaacttcagcaaagtctcaggatacaaaatcaatrtacaaaaatcacaagcattcttatacaccaataacagacaaacagagagccaaatcatgagtgaactcccattcacaattgcttcaaagagaataaaatacctaggaatccaacttacaagggatgtgaaggacctcttcaaggagaactacaaaccactgctcaatgaaataaaagaggataccaacaaatggaagaacattccatgctcatgggtaggaagaatcaatattgtgaaaatggccatactgcccaaggtaatttatagattcaatgccatccccatcaagctaccaatgactttcttcacagaactggaaaaaactactttaaagttcatatggaaccaaaatgagccygcattgccaagtcaatcctaagccaaaagaacaaagctggaggcatcacactacctgacttcaaactatgctacaaggctacagtractgaaacagcatggtactggtaccaaaacagagatatagaccaatggaacagaacagagccctcagaaataatgccacatatctttaactatctgatctttgacaaacctgacagaaacaagaaatggggaaaggattccctatttaataaatggtgctgggaaagctggctagccatatgtagaaagctgaaactggatcctttccttacaccttatacaaaaattatttcaagatggattaaagacttaaatgttagacctaaaaccataagaaccctagaagaaaaaaacgtaggcaataccattcaggacataggcatgggcaaggacttcatgtctaaaacaccaaaagcaatggcagcaaaagccaaaatagacaaatgggatctaattaaactaaagagcttctgcacagcaaaagaaactaccatcagagtgaacaggcaaccttcagaatggtagaaaatttttgcaatctactcatctgacaaagggctaatatccagaatctacaatgaactcaaacaaatttacaagaaaaaacaaacaaccccatcaaaaagtgggcgaaggatatgaacagacacttctcaaaagaagacatttatgcagccaaaagacacatgaaaaaatgctcatcattactggccatcagagaaatgcaaaacaaaatcacaatgagataccatctcacaccagttagaatggcaatcattagaaagtcaggaaacaacaggtgctggagaggatgtggagaaataggaacacttttacactgttggtgggactataaactagttcaaccattgtggaagtcagtgtggcgattcctcagggatctagaactagaaataccatttgacccagccatcccattactgggtatatacccaaaggattataaatcatgctgctataaagacacatgcacatgtatgtttattgcggcactattcacaatagcaaagacttggaaccaacccaaatgtccaccaatgatagactggattaagaaaatgtggcacatacacaccatggaatacttgcagccataaaaaatgatgagttcatgtcctttatagggacacggatgaagctggaaaccatcattttcagcaatctatcgcaaagagaaaaaaccaaacaccacatgttctcactcataggtgggaattgaacaatgagaaaacatggacacaggaagggaaacatcacacaccggggcctgttgtggggtcgggggaaggggtgagggatagcattaggagatatacctaatgctaaatgatgagttaatgggtgcagcacaccaacatggcacatgtatacatatgtaacaaacctgcacgttatgcacatgtaccctagaacttaaagtattaaaaaaaaaaaaagaaatacataggagagcttggaccacttgatgttgagagctctttttactaggaaagctgatggttttgtaattctgccagttttcaggatgttgtcagtgctaatgaaagcctttcatgttctccccatggcatggatacatctgcaaagagctggaaagagtgaagcccatggccagagtacccacataatccacatagcagtagtgcatcagagtgcatagattcatagtacacatgagacggagagcagaagtggtttggttgtcacagtgacttgagggtgaagtttccatttagtgaacaggcatctgcagtgctcaggccagtcctgcagtgaagtgtcctgcctcagatgtcagtagcacaaccattaagggacagtgaccggatcctgttcaataacacatttctacttagacaaatagagcaatttattgcagagtctaaacttttagcacttattatctgagctttyacaatattacatgtgatttaatactcaaatggagttaataatcttaactaattcctctaaatcttacgtcccttttccccttacatataagaatttccttcaaaactggtagttggcaaagagagagctcattcaaggttttaaatatacttatgcaattggcagacttataaaatattatagaaattctgtgccaggaacaaagttatatgtgctaggaaaccaatctcactgggttcttcagacacttaaatgaatttctgacaaagctaaggaaaagctgttatgtgaataaatcagtgagtgtgtccacattctattactctttgcaattatgcatttatttggcgcgtctatcatagaggaaaattacaacccatgcctcaraataatgagacttgaatgaacttttccatagccagtcattaattcatgccacctctttagatttcacctgttaatgtccacactgagagcatgttggatcactttaaaattttattagtaataggtactaatttgttgattattttattgagtgaaaataataaccaatacattttactgaacagccatgctgatttggtgtccctggctgagttacaaagcagaggttccagggctggggatggtagtcccacctcccctctttgtctctggctgttctcagggatgtgttgccctttgggtactcgtgttgcttcccatgggttaaagcatgggcaggcctcctgccagggaacccaggatggtggggaagctggttgtttacctccatctcactttttccagtgtrgaaaccatgagttgggccacagtgggtggggggtgtagcagatatggacatttgattcttttaccatctcctcagagtttttcacttctctgtgaccctggaaatggaatcatcctcatrtttgagttctgcgatgttgctggtgataatcttggcaccttatatttgttttggttttctgtggagaggagtgaacctagattgtgtctgtgttatcattttggaactagaagttccgaaatcaataaccaatacattttaaaaccacccccaccccrcaccaaagggtcttgcatttgtattctctgtgtcaaaccattgaattcayaatcccagagtcgaaggaaaaaatgcctctcaatctctatgtttatcagatcttcaatgttttattatagtacttaatatatactatgctataatgtcttattgttgatattatgaacttttagcaggagaaacatgaagtagtcatgattttcacaattctgtgagaagagagcactgtggcctttctatgagtttataattaatgaatatatatattcattatatatataagatatatatatcatatatatgatatatatatcttacatatatatatcttacatatatatgatatatatatswthtatatatcttacatatatatgatatatatatcttacwtatatatcttacrtatatatgatatatatatcttacatatatatatcttacatatatatgtaagatatatatatatcgaacttccttgaactgagcatatttattgactaaattgcaagaaactttccaatttgtttgggtttactttaatctcatcttttgcactccattttgaaggtcacatttaagatgaatccgtttcttatattttatgctcctctcagaactcactggagccaaaattctctgtgaggcaagagctatgttatgttggacaggctgcactggaggatgaagcaaaatgaaaagtagattctatgtagaaataatcacctggaaactacagtgacagcaagaagaaggagctgaaataaattcaggttgtcacaagctgctaaaaaaatgcatttacttacattgcttcttatctggtacccatatctgctgtctcctacagtcgtctagccaaatatttaaagatatagaatctacaaagacaaactaattattaatgtgtctgtgaactctgcaaacaaacattattgaatgcattactgttaggactcctatttggacaagtagctaggtgagccctgtctaagcataaagacctatgcagggcttatcaaacttcaagactctgctgactagagatgcaaaataaaatcatgagggaattagcaggcaccagtgagacctgyaggctttgagaaatctcttgaggtaagtgagaaagacagcttcctatgtgagcagaggttcatttattttgattcaagttaagggttaagggcaacttgacattttgtattacacctatcccttccccacccctctttttttttttttcttaggagttgtaaggatcttacaagatcatctgatcttagaaagaaataaagaccctggccaggcacagtggctcgcacctgtaatcccagcactttgggaggcagaggcaggcagatcacttgaggtcaggagttcgagaccagcctggccaacatggcaaaaccttatgtctactaaaaatacaaaaataacccagcatgatgccttgtgcctgcaattccagctacttgggaggttgaggcaggagaatcgcttgaacccgggaggcggaggttgcagtgagctgagatagcgccactgcactccagcctgggcaatagagtgagaatccaccaaaaaaaaaaaaaaagagagagagagaggaagggatggagggaaagagagagaggcggggaggaagggaaagagagggagggagggagggaaagagagagggagggaggtggggggggagagacagagagaaagacagaaagaaaagaaaggaggaaagaaaaggaaggaaggaagggaaggagagaaggggggaggggaggggaggggagkggaggagaggggaggagagagaacgaaaaatacccagagagggacgttgggacttttgtaaatactcaggaggcagatggcctgagtccaacactcactgatgcctatgcaatcttgggtaagatacttaaacttccagtgccttattttcttcatcagcaaagtgtggataaaaattataactacccgatagtactgatgagattgcagcacttcctgacacatactgagtgctttattgttattaggttgtgtgatataataatagctaagtggctagagattaaaccatttctagcctttggtctccggtttgctttttatttgtttttatggcttctgtttcctcttgttactctcatcaggctatttgctactacctatgcttattattcattcattcattcacttgttcactcatcagcggcacacctgccacgggccaagctctctgctaggccctgggaaacagtagggaatgaggctgactatgcacaggacgaagtggcttatttcctaattcaatagtctgttaatgagcatcaggaatgtcaagaatcctccttcttctactgaagatggttagcagcctgtaacaattattatgacacatttttcatttatattttagcttctgaaaatcatgaggaattattttttaaagcagtctttgattttgattactgagaatacaatatgttttgagaacctcattatttcctctgatactttcttcttttcttcatatttcttatattctttatgtttaaattgaaggtgatttattatgcaagctattggatatgattttggagttttttgtaccattaattattgagggagcaaagttgaaattctgcttttaattcatctcctttttttgaaaaatgtatgacttaaaaatgaaattaaataatcaaaaattaaatgtgatgcttaaaggtcattttgtttaaagtgatgaatgctagtttaccatatactactagaaaaatcaaaattatataatctatttgccatgtattattatttaattttaataaatatttatggtttcataaatatacaaggttcttcctaaagttatctatctaccacattttctcatttatttatttatttttattttttattttggagacagaatctcgctctgtcacccaggccgtagtgcagtggcgtgatctcagctcattgcaacctctgccttcccagttcaagtaattctcctgcctcagcctccacctcacaagtagctgggattacaggtgcccaccatcacgcctgccaaatttttgtatttttagtagagacagggtttcaccatgttggccaggctggtctcaaactcctagcctcaggcaatccacctgccttggccttccaaagtaacattttctctttcattaactattcattcattttcctattttttaactctgaaagttcttaagtatatatattattataatatcagcaatcatatttataacaaaatattaaccattaatgattgtagtattttatttttattatactaaacagctatactttgattaaaattgtaacatatatagtaaaggacataggaggttttttgctccaaatgacatccagaatgcttatctatatttgaaagagactattcagatattaatactaacaccaaataatgtgccttgttttactgtgatgtagctacactgattatctgtgctggtaaactgtacctcaccattattgatgttccaggatgccagaaatggcattaaagtaagcattgggctatttggtcttctagggctaatgcagagaccatttgggttttttgggagaactcaactccctgtggtcctatgaccaagaccctcattgtctggctgtcagcttaaggctcattctagcttctggaggcttccccttattctttgactttctccttccaccttcagagcctttaacagtgggttgagtcctcctcatgttttgaatctctcctcctttttcttctctctcgtcactctagtctattcttccttctttaacttttagagctcataacctatgccctctccaataatccaggataatctccctatatttaggtcagctagttagcaacttcaattccatggcaactttaactccccgttgccatgtaaggtaacatattcacaggttctgaggttaggacatctttggggaccataattccatgcagtcactttggaatgattgaaattttttagtattctttctgatcacctcccatcctctactagttcttttcctaggagaaacattcaccacacatgcaaatgctcgtcctaatacttgtgtgatagtcccagtgtccccatccacaaggcagctcagcagacttctctgaaaaacagacaatagcgactctatcgccattgacctccacaaaaaaaagtaattgttgtgggcctgggaataattgtttaaaatattgtgacttgtgagtgactgtgaagataagaacaactttgggcaaatagatgcttttaacagcatcacacctcagagcctttgaaacttgagcgggagctggctctagttttcttggggatccatggactgatttcttctacttagggattttgttgtaaatccagaaaaatacgtaggaagctgtaaacgattataaaaattcaggcccattcttcaatccatgggtatatatttgacaccttggraacttgcattaatactttttcggtaaaataaaaacctcaactcaccttcatttattgagcatcttctgtgtgatgagcagtgtcacctctgtgtttacgcacrtataaaagttccaggttctgctttcaagagtttacattcttatatgagcagtaaggctagctatccaacccacttgctaatagtgtaagactttatacaactaatttctaaatggtgtgacattgacaatgacagtaagtgctgtttcgtagtagggaggggaaatatgagtggagttgtgtgagaagacttcacagaggagctggggcttgagctgttggcggaaggatgctagagtttgaataggcagagagagagagaatggtccattccagatgcctccatggagaaaataatggagaatgattatgacagtaacaaccaaaaatttatgagtacttcctgtaacctagttgttgtgccaagcactttacatgtatctacccatttaataggtactactattatccccaatttctagatgaagaagtaggtgcttagagagtaatataactcattcaaagcatagcacttcctaagtggaggaatggagtcaaactcaggcctgtctgatttcagagctcaagcttataatcactgtgtcagtaggctgtgatccaggtcagcttagagtatgggagccatgcagagaaatcctggataattgaagttctagaaagatagagctggaaagggttttagagacaatccccacacaatgttttcattttaaaaacagagacccagagaggctaagtgcaaccacttatgttagaatggagacttagccttgyctcttacacttgtcctcttaccacagttaggtgagtccatctgataatgatgcagaaaggttagcgttgccttgatgactgtcagaaggcagctataggctgcctcagtcacatgggaggtaaagcggtatctgacataatacccctgggaatggattccaccatgggagaatgtagttcactgaattccaactaaaacaaagagctattagactgctcgtgactttttggctgaagtatgcctttttgatacatatgcagccatcttttggaattgggtgaaaatcagtgtattagtccattctcacactgctataaagaaatacctgagctgggtaatttataaaggaaagaggtttaagagccagttccacatggctggggaggcctcaggaaacttacaatcacggcggaagggaaagcaagcacatcttacatggtggcaggagagagagagaaagtgaagggggaagagccctttataaaaccatcagctcttgtgagaacttactcactatcatgtgaacagcatgggagaaccagcccccatgatccagtcacctcccaccaggtcccttcttcaacacctggggattacaattcgagatgagatttgggtggggacacagccaaaccataccaatcagcataggacaaactatatttgccaaagaataatgaaattttgtagagtcatgttttcatatcacttcatgtgaaaacatgactctctacaaaatttcatattcttttctagcttgcattctacccagaaaccagtggtaaaaatgggctgattgtgttttttatctttctcaagttctcctccccttccagtagaaatattaatgagcagtgaaatggccagagacaggcagctggaggaagatgggggcactaagtgaggaatatgcattcatgaatgagcggaaaatagatgctggtgcttttggtctggaatctttttaacattgtcattagtaatagattcaagatagacatttaggtttcaaagggggcaccagtattatcagttgaaaaaacaaaagtgatgcattgtttatactcatctcttctagaatgtaaaaatgaggatttaccctgtagtaatatttctaagaaaaaaaatgaaagttggttagattttagctactaaagaaccaaaacagactaatactttcccattttactctccttgtgtggggttctccttgagggcagtggtaactgctgcacatatgtgtgcaatatatttgtatcaaggcattcgctccagaaaacgagagagagatttcccgggctagcctttgttggcattctgtcccagattcctctccgctttggggttatacaaagattactgtggttctctgacttgatttgaagctctggcttagtcagctgaggaaagactacagtcgccttcctccccaggagtttatcagagacttgctcttccgtgsagggcctgggaacgcagtgcctaagctcttggtgggggaccaccccgctgtgcttggcttcaaacaggctgctgtccattgctttcagaagcatgagattgccccatcaggcttaaaaacaataataaaaatatatttgaaaaaaatccccagtcgcttctcttgctgtctttggcagttaggtacaaagcatcaacaaaatgttgtatacagaaattctgccttccaggcttgttcctttcttacagaacaatccttaaccttgtaggactcttttttcatgttttcttaatgagaaaatatttcagagattattggcaccacaggtttattcctttccagtggtttacactcttaactgactgtaatctttatgatctttttttgtatttttctttcacagtatgggccatatctaatcagcctctcctaccgtgactattcaaagaaaaggatcttttttttctttttctttttcttttgtttccatctcagaacactttcttgtcaatatcttctttttaaaaaatgaggattgttgtaacaaatttagcaaacattaagaatgacatccattgccgtggaagctaccaaaaaagttatatacctgtcctcaaaatagcctgtgatctggtgaactattcagatacatgcaaattagtcaaaatataaaagaaatagaggtggggaacaaagggagtgctgtgtttgcrctgacagtgctggccgtaggttgccattttaaactcccactttggtgtccccttttgtttgaaggtccctctggagtccagaggtaatagagcaggctgagtagtggggcctaaggaaaactcagggctgcaaataaccctgtgtacagtgcattcagatcacatctgtgagtcgctggagggagtggcctgaccggttggtgtctatggtgggttgtgatcatcaggctggtcccaggtgaggtcacctgaccactcattattttctttttggtaacagaaattagtcagttaacaagcataactttaacaagcataactctacttgttatttaagacaatgtactgtcctgaggagttctgaagatcagtaagatacagtctccctctttttttttttttttttttgagacagagtcttgctttgtcacccaggctggagtgcagtggcgcgatctcggctgactgcaatctcagcccccagggttctagtgactctcctgcctcagcctctctagtagctgggattacaggcacccaccaccacactgggcaaatttttttgtatttttagtagaaacggggttttgctatgtgggccaggctgttttctaactcctgtcctcaggagaaccacctgtctcggcctcccaaagtgctaggattacaggagtgagccactgcgccgggccagtctcctctcttaaagcacacctagaatcatggtagtggtctctaattcagtgtgaggcacaagtctcagattcctctgtgggtgaagagggggtcaggcaagtgtgtggtgtggagatttcctttcccgtgtctgaggccatgatccatcccctgtaaagactgtgttgattccttgccctctagactgaaaatcacttagtatgagaagaaatgttaccaaagggagtgtgaattgtgaaggagggaccaaaaacatgtcaggcactagtctagcacaatgcctagcaaagaactcggggactgtgtgaggtacaggagtatgcgtggattcaagattcagctacacatctgcaggagccacggttccccaggttaagggcagaacagaaagatgaagtctggacagcagaggggtcattgaggagcttcttaggggaggcgggacatccattaaactgtgcttgagtgattgttaagatgtaggtaggcaatggacacggagagcaggacgttttgggcatggggagtgagcagggatgtaggaagaggaagtgaaggtgtgttctgagcatgttgactaggcctgtccagcctttggtgttcaaagaggcacacaagaccacaggagaaatggggcacatcttcctggagtgttcattttgcttgaatatatagaagggaaaataaataatttawctggttaataatttaaaacattgttatattaaaacaggcaaattatggaagagaatacaattaatttcatggatttttgttaaagttcaaaatctcaggtttccattgttttcttttgattcttcgatggaagaattttaaattctttaaaggagatcaactttattccttcattcacaaaaatagcaaaagcagccgggcatggcggctcacgcctgtaatcccagcactttgggaggccgaggtgggcggatcacctgaagtcagcagttcgagaccagcctggccaacatggcgaaamcccatctctactaaaaatataaaaaattagccagatgtggtggtatgcccctgtagtcccagctactcagaggctgaggcaggagaatcgcttgaacctgggaggcggagattgcagtgagctgagatggcaccactgcactccagcctgtgtgacagagcaagactctgtctcaaaaaaaaaaaaaaaaaaaaaaaagcaaaagyaaatggcaatcacagttgcccacagatccttacttacatcatgaggcacgagctatggtttcccttagctccctgtgggcagtggggaagcagtctagcatgtggccatggggtttgcttggctgttagacagccctcttcaggtcccaggccctttggacccatcatactcatcctgtgcttcttgacactggcaaatcttgatgatggttaatgtgactccccgaaggatgtgcctccatcccatgtgacagatatgaagtctgtctgcgcacagtctgggccatggagtctgcactcctaagaatgcacagaggcctggctgccttggtctcttgagataatgaaattaagagtcttcagaggcatttcttgagtcttcaatttcatctcctttctccccttctggtcctaagcatgacattcctgtctcagctttttctggccccctgctgtctctggattctggtcttgtgagtttcctttgtttgggttgtgaatcattaggcaatttagataacaggttctgtttttcctaggcagaggcaaactcctctggttcaaagctgcctctggccttttcccagctttgaggaagctgcatacagtctctccaagctagtgtggcatcagaggccaatcagaggcagaattggtggtgggtgaaagagcctctaagcctttctttactatctctgttttgacttctattctttccggtgtgtgttggattgacctaagattttctttgttagaacaccaaactgcccagtgttatagatagtgtttttatactttatctactcataaattaaaggaattaagaaaatggcaggaagagctcagttattcaatactaaatagtgccctggccttcattattcaggggagaaaagggcctgggtctgtgctgttcaacaggtagccactagtcatacatggctattgagcatttgaaatgtggtaaagttgaattgagatgtgctgtaagggtaaaatactgaatttcaaagatgatatgaaaaaataatgaaaaataatacctccataatttttatatgaattacatattgaaatgataatatttttatatattgggttgaataaaatatattattaaaattaatttcagccaggcaggcgtggtggctcacrcctgcaatcccagaacttgatcacttgagcccaggaattagagaccagccttggaaacagggtgaaaccccatctgtacaaaaagatacaaaaattagctgggtgtgatggcacatgcctgtggtcctagctactcgggaggctgaggtgggaggattgactgagccagggaggtcaaggctgcagtgagtggtgatcatgccattgcactccagcctgggcaacagagcaaaaccctgtctcaaaaawaattaatttcaacagtttatttttatcttttcatgatctggccactagaagattttaaattacatttgtggctcacattttrtttccattagacagtgctgctttagatggtagcttcataattgcagtaattcatacctcttgagagttctccagggattattttgttgaagattttctcttgcaatgatcaggctgggtgagaataacacatagtagactgtaagagtcttcaaggcaaaagctgtgtctgtttaatgtactttggaggcaggagtagtaaagtcattttgcttaggaaactcataaactggcttcgaaggcaattccaaaaccagttttgagcatcatctttgaaataagggtattgcctcccagtgactccattgaaagatgcaattcatttggttgcataagactggggttggaatgttaaagaaaaaaaaaaagtgggggaagcaagtttcatttcttatagtccatacctccagtggggactcagcatgtagaaaggcacttggacaggaaccacgatcatacctattgttatttcatcaatgcagaatgcaacataatggaggcagaatggggaaagaaagcctttccagctgcttcaaagaaaacccagatgcttaacttgtttgctgtgatgtgctatcctttcttccttggtgccagaagagaaattattacaacatataaaaaataggattatggccggaagaaaagttattataacatacaacaaataggattgtgggatcctgaatrtgttattcaggatccatattgtaaaacatattttctttgaaattttaatcattagaaactatatagttcaaatatattctcaaggctaatccatccatattcaggaatctttcttttttaatattataaaatctttctatggacaaactcacgattagtaaagtatttccccataaaatagaaacaatctttttttccaaaaaagagggttgttattattaaggtcttttaaaaatactttttgttctggagcatgctttatcttctacttctctggggtaggttagaaataattatcaccgttttgtaaatcgggaaataaacacagggaagtcatttgtcgaaaagcacaggggaccagtgccagaaatggtttgaaaatttagatcttttactttccatttcaggtgctgcaatcatagtatcacatggctatgtgaatagtaaagtgtcttgtttacgacagaacatactgttctgaaaagtggggaggtatatctcatttttaggggcattcctttttcttaaattctaccctgtgctttgcttagtaatacagttatttataaaaatttatagaactgtaacagaggtaaagaattctcaatcttgctacttctttcctcccaatagtaataaaaaggatttaggcatccttgctagcttctcggaggcaaagtccctgtgaagctatgagaccttcattatcacattcccactgctttgtcagcttatatttgtgaggaatttaatcagttttattgctgtatatgactggaaatgaatggcatttattttctctgcagggatttatttgcttttttccttgggtggctattcctttgttgataatattttcccaagtcttgaagcactaattgattttgggacttaagcaagatcactttttacattgaatgcagaaactgtgttcctatggattagggcayggtctgtgtagccatcaactggagatcctgctgagaactgtaaatgaggaagaaattatgggtcatgataataaggtgttccaagtctcaagattcagacaggagcagacataaacagcctcttccttggagatatgcaaccagtcagccaaggtgtattttcttaagcattgaggccttgaaaaacatatggaactttgagaatatgtttgcaggtgtgaaaataatggtcggtggatctttctccctgtcatgtatatatacagtgtgtagagagtaagagacayattttggaaaagaaaaatgattttaattgttggtgtttcaggacaatgctttgcttttaaagttacatgtcattatctcaaccccaattcagtctattccctgaagcacattctccttgctctcttactagtcttagctttgggcatatattgctcatcgtaggaacttggtaataaacctagatttaatcgtaactcaaagaatacatgaggactttatatcactttttgatttcaaagactgctcaagtcaaatgactgatacggaaatgtaccaaaaagattccaggtccagtcaattccttggaaaatattgttaatagtagactcaacttggcatgttgggaacagggagaaggtgggaagccaaggctgggcaaagccatagataggaggctgagctggctataggacaggctccagaaaattgacaaggagtctgacttatcacggccaagtagacatggcaggtttaggacccatcttggagagactgtgtagcacaatgattaaatcggaatagaggctctgtaattgtacagacctgaggctcaggccctcattctaccacttactaatttggtgatatggataaattacttttctgagcatctgttttgttatctgcaaaatagggataaagcttgctcagcggactattgtgaggattaaatgagagaattcacataaagcacctagcaccaggcctggcataagcaggaatttaataaatacagctattattattatcttcatcatcatcactatctgggcttttgccattttgcactggttggtgaggatactgcagcagtaatctctgggcaattacaaatattatatccatgtttaggttccgtaggtccaggaagaagcaggatcatattcagccatgctatgtggacagagcccagcaccccctggaaaaggaggttcataagggctgggcaggccttggaacctcgctttcaggaaactggaatgtacatttggaaagcaggcagatgcccacacataatactgtagggtagcagagaaaactgtagactcaacatgaagctgtcagtctctagggcctgagcagagctgaacctattcactgaagtcctcagaatttgcaactgggtaggattggggcaagcaggagctaatgactcaatagccaattgctgtctttaaatcttactgaaattcttaaaactattgaatggcagcattytagttttaagtcttttccagaatgtgaggtaggtatgttattctctgtttttcagatgacgacgtgagcttaagggactgtgatccatagttaaagcaaaagccacaattgcatccttcagctccaggctgtcatttagaaaccacacttactaagacagtgtctcttgtagacgcgtctatgcatcactgcagatgcttgaagcaccatattttgttccagctgctgctatggtgaccaggtcagagcaggctttcgtgagtttctcacaggggcaatcacagtgccttgccctgagcccatgttttctgacactgaggggctcacatgtgcataacccaggtgtgctgggagtcagtgcccatggggccacacttactcattgggaaccagtggatggatgtttcccccatggatcccccagctgtgagatgaatcttattggaattctcaaagggtcccagtgagatggagcatgagccacctgtggcggtggtcagccaacttgataacacatccaggtgttgctttttccctccctccctgtttggctctcccagcctttccctcctgctctctgggatcacttccaacataaactacctacatgcaaacttctgcctttggtccaagcaaagataatttcaaaaagcgtttccttatagtcacatgttcatactgactcccttgtcctgaccaactcacagcaggttggagcttgaaagattaagaatctgttattatagtccaggtgcggtggttcatgcctgtaatcccagcactttgggaggccgaggcgggaggatcacgaggtcaggagatcaagaccatcctggtcaacatggtgaaaccccgtcactgcccaggggcagctccagaaatgctaagaaccaaggcctggaatcagggatatcaagagtcagcttggtactttacctcactgtggctgagctgatgcttaagctgcaagacaaaagtccgctttacaattccctctccttttctcaagcagaagacatccctccttataggcaccacagctgggaatgtgctgggtcacacctgaagccagcctggctctgaatcccgttcaaggcctactgcaagtactgcctgggtattgctgctgactattcagagcccaagggctcttaagttagcaggtgatgaatgctgccaggactgggttcttcccttcaaggtagtgggctcccttctggcccaggatatatctagacatgtcctccaggaggtagggcctggaatggggacctcaggactctgtctggtgccctatcctgctgtggctgagctggtatccaagttgttagacagaggcctctttagtcatccctctcctcttcttgagtggaaagaagtagtctttcccagggctgcgagctgcactcccttggccatcctagctggtgtctcagtaggtcacgtgcccccycctccccccccaccaaatccactggctctaagcccagcatggtattaggatttgcctagaaattgcagtccttgtaccctggactaccttaaagtttatttagaatcccagagcacttgagcccatggtggtgagccttgctggaacttcgattccaaccactgggattgttgatcccctctggccagggctggtctaaatgctccctccacgggtgccagctgaattctgccggtgttgctttccactgttttagggcagcactgagttccagtgcacagtcccacaatcgctacaccttccttcccccaagaacacagattctgtctctgtgccacgcagctgctactggggagatgtgtgaggcatggcagcaattcgtgactgtctttcctaccctcttcaatgcctcttttagtgatatgaaggagacatttaagtgatatgtctcaagatatttttgacttcccttttgatttcttctttaacccattggttattcaagagcatgttgtataatttccacatactgtatttgtgaattttccagatctcttctgttactgatttctggtttcaaagcattgtggtcagaaaagatacatgatatgattttaatcttctccacatatgtaattttaaatagccacattaaaaaactaaaaagaaacacgtgaaattaattttagtaattagatattcygtatatccaaaatattatttcartttataatcaatataaaaagttattgatgagatgttttacagtcttttacacacacatatatacacatacatatgtatgtacatacacatatatgtgtgtgtatacacacacacacacgcacagtctgttgtgtattttatacttacagaacacctcaattcagactagccacatttctagccgcatgtgcccagtgggtattgttttgaacagctcagctctaaaggaagtgagctggaagatggttggtggtcattggagagtgagacttgaaactgagattgtggagggtttgcaaatatttataatcttaagatctaggatacaactctgggattgagtttctttagcagagtggaaatttagatcatggaaggagaaaaggacaggtcattgagcgtccaggttttgggaaagatcatctgtgtcagytttgaattcatcaaggtttatgagagagtggagagactgataggatgttaggtcttaaaatcttcaaaagagaatctacaaactcctggcaggtctgatccaggagtttgtaaatccctgtaatcaagtagtatagtctgatagcatgggcttctaacctggcggggcagcagttagaaaggagggtgggaaaaagttaggaagtgcagtaacaagcaacaaggctgcagaggaagcagttgtcctctggggagagccagatctcaatgtgagccagaggttctggctgtaaggacttctgatggtgatctatgaggagctgaagcacagaggaatggttttaggagtcagatcaccagatgtgcagagctcatggggacaagagtccaggtgccgagggatgctcaccccatcccctgtggtggaggtgtgtcccccactgctgtcccagccttattgccttctgagggttctgataacccgccgcaggtatggcctgtrgctagcagggtagaggaccactaagacctaagtctcacagtgtatctttctacccctgacttccatcctgtctcctgtttgaagtgttgctcagatgactgcacagtagtcttattccagataaatgacttcatccagagttcacttttaaataataatttattttattttttattagagacagtcttgctatgttgctcaggctggtctcaaactcctgggttcaagcgatcctcccaccttggcctcccaaagtgctgggattacaggtgtgagccaccgcatccagcctattttatttttgaaccaacagtgcacaaagtacaaaattttaaaatgacaagagcatctgaatgaaaagtaagtctgcctccctccagccacccaatttcttttctcagagaacacacttgttaccctttctggaattcatttgtaacaggtggctcctctgtccaaattccctcctcctatctcttgggggtttggatgtgaagctggcctttttttccctgaaaatgcattcatgctccctaggacactggcttgccaaacaggagtctgggcacttagcagccagtgctctgtgcaaaccagccagtgctctgaattcagatgagagctttgtgtttgccttattggaaagcccttgattcctgggcttctagaggtatgtatcactcaaaatctctgcagttcttttagggtaagtgaacgctttacttcttcatctattagaaaattattctctcagcagggtgcggtggctcactcctgtaaacccagctcactcctgtactttgggaggccgaggcgggcagatcatgaggtcaggagttcgagaccagcctgaccaacatggtgaatccccgtctctactaaaaatacaaaaattatccgggtgtggtggcacacacctgtaatcccagctactcaggaggctgaggctggagaatcacttgaatccgggaggcggaggttgcaatgagccaagatcgtgccactgcactccagcctgggtgacagagcgagactccctctcaaaaataaataaataaataaataaatgaataaatgaataaataagtaactctctcagtggttcctcaatgcagggctgcacactaagcacacaaaagtgaatcaaacttgaccaaacttgggtatttggatcatacatgaactctgcctgaagtccaatcccaggctagctactggcactggcagcttctccacattcaagaaccacggggatgttgcaagtgcgctgatgtttgtggtaagcagacattaatggaataaggactatgtggtccccacagcttgccctgtcatgatcattctccagtgtgggtcacaggttcaccggaacatcagctaacatgctgtataaagtcacagcaggtgagcccacgagggaatattgagctccattctctctgcaactccaccttcttctctcagattggagagtggggttcctagcttcctgtattgaaattgtagccaatcaataggaaatctcacacttatggaaaatcccaaatcttaattgactctgttccttatcctctattaccagtactcaactgcagcattttatgttgctgttgtcatgcagaagagaaaggattaatcacggtaactttcatcggcagaggggtgaaacaaatgaaaaaaatgttcagkcacttaatgcttctgtgaaaacccaattagcaccccttcatggttataatttctaattactttttgaactgagaaaaaaatgttcttgctaattagctaattatttggtagtgaccttttgataaaaattgctttgactctaaaaatgtctgaagaagagttacttaatttaataaatcactgttattctaacattttagaaaatcaggcattaagaagaggtcttgaaagtttctaagtttcagaaataccatgttgggttgaaagttctttagatgtgtatttgtgcatgcatgtgtgtgtgtgtgtgtgtgcacatgatattgagatttttgccacttaaaatttatgagactaatgtcagttgttagcaatagagaaaactgggcttggggcatatggaaactttctgcaacatttctgtatatctaaaactattctaaaataaggaatttatttttttcagtgtaagaaagtcccttgaaataaaatttgatacagtctgcaatgaactgaattaaaacatccctgaaaagtttctataaagtttaattccacgtagaaaataacttaataaaaaaacctcacaatgtgttgccttcctaaagcttctgacttcagctaacagaagcattaagagtagtggttttaatatgtatgtaatagtgccatcagaaatccctaatgtgcagatatattaactataaaattacatgtcaaatatttagttgctgtatttagaagacaatacaattcctaagagaaacaataagcctatttactaatacatctattttctacacctcagtcaaatttatagttaaaaactagaatgmattgtctttagggttgaaagcctgtctcatgatgctgatgagccagcgtaaggaagtgtggtgactgtttgagttgtgtctgtctcttggtctgttctcttataagtttctaagaaattaactgatggtggccaaatttgattgaagtatatctagtcttccttgattcccccttgaacctgtggtttaatattccacctttaaacataactgcaggctgggcacagtggctcactcctgtaatcccagcactttgggaggccgaggtgggtggatcacttgaggttaggaattcgagaccagcctggccaacatggcaaaacctcgtctttactgaaaacataaaaattagctgggtgtggtggcacacaactgtaatccgagctactctggaggctgaggcatgagaatcacttcaacccaggaggcagaggttgcgatgagccaagattgtgccaccacactccagcctggatgatagagtgagactctgtctcaaaataaaataaaataaaataaaacaaacacaattgcattttaaaaaaccagtgatttaattgagaaaaatgcgtatgctcagacaaaaaagaaaaaaaaatgacttcagatgggcatgtatcctatcagataaataaatttcaataaaattaagtaggtgggttatacagataatgagagagaagtaatgataatcataaaatttgagttgacgttcctttgtgctttatgcatttagcttaagtttttcttgacaacagacaactataggaatatagaatatagtctgtagtttaaaaggaactttggcacaatgtatccaactacctaatactgtattagagagggcctttgaacttgagcttcctctgcctagagctctcttcatcctgacctgacagggttgactcctggtcattttaattctcagctcagaagtcaactcctctatcttctgcaccctctcccttttccctcatggtctgccccatcacagtgtttggtttctgtcctggcactcaccacagtgggaattctctcaacgtttattatttgctttccttatttatcacctgtctccttcaccagaattcagctttataggagcaggggccttgtctgtcttgttcaccactatatcattccctgtgcttggcacatagcaagttggtaatttaaaktttgacattgaaatacatgtgtgtgtgtatctatgtgtttataattactggtagaaacaggccaaaaagatccccccaagaatgaataacaacctccacttactaaacctttgtctcattctttgctccattcctgattttcttacacacttgtattgcttttaggacatgataaatgatacarcttaatargaaaatgataaatctcaaggagaaaacttggcattaatgtaacrtttaatstgcagaacaaattgatgttgtagcttccttcttatctttctgtttttatcaataagagaaagatgtctttggggatgggaaggaaacagagggtcttgaggtaggattcccaggggtcctcatctcagtgacctcttgttctacgtgcattttcccggaagacaggcaagtttagtgttttaccacattaaccctgaaatctgataaagtctgttctcctctttaaactaaagacagtttgtctgtgtgcccaggcccagtctcctttcttctggactggaacaggccagggaagatttctgggccttttttctctttctttccgtagtcagggcacctggccacagctttgtctcttatcttgccttagaacttgcatgggaagctgtcatagaccgcctgctgagagccttaaaagaaatgtaaggtagagtgtgtaattattatcagctgttcacatatgagatgtaagtatcttggatattttggattttatggaagtcatacgcgcttaccacattatattcatccmgaacttcagtaattttacaatgaatcattgatcttaaggaagacttgtaataaatgctaatctcagagcattaatgaagacacaaactaagactacataaaggctatacaggatgagcatccctaacctgaaaatccaccatctgaaatgctcccaaatctggaacttcttgagccgatatgatgccacaagtggaaggttccacacgtgaccttctttgactagtcgcattcaaaatgcagtcaaactttgtttcatgcacaaaattatttaaaatattgtataaaattaccttcaggctatgtgtatatgaaacataaatgaattttgtgtttagatttgatcccagccccaagatgtatcattatgtatatgcaaatatcccacaaaaaaaattttaaatcccaaacacttctggtccyaagtgttttggacaaggagtattcaacctgtagtgtccacttagatctggttggtgttagcttccattttaccttcttattcataccctcactctccttttctttttttccccaaattaatgtagtatccatatttagtagaaagcctatttgacctttctcattattgcctgtaggacatcttttcttttagtgtgtagagttagcttgccttcgactgacattaacaaagtgctttcctaatcacgatcctcaatgcagatagtcttttcctggaatcacttgttttccttttagttacggtatcaatgcagctcagaaaggtcctaaggtcatgactgatgaaacttcaagaaaaaaaaaaagccaagggcctagaaattgtgtcaattttaattgattagaggtggcagcagtagttcttggtcaagtaattatcaaataactcaaaaaggtatccaggaaatgactgggaagcagaaaccaagctgattgcgcattgatagtgaaaaccagatttgtttgacaaaagggaaagtttctgccagaattgaattatgtctcttctaggcaaaaatacacacataaggaacaaggagcaagctcaaaaactaaagaaagtagcccattgcctggcaaattactagaaaaataataggaacgtttaatgtccataagaagactttcatgaggccaggtgtggtggctaccacctataaatcccagcactttgggaggccaaggcaggtcrcttgagccagagttaaagaacagcctggccaacatgaccaaaccctgcctctactgaaaacagaaaaattagctgggcgtggtggcaggtacctgtagtcccagctactcgggaggctgaggcaggagaatcgcttgaacctggcggagattgtagtgagctgagatcatgcacgccagcctgagtgacagagcgagactctgtctcaaaaacaaagactttcatgaaataaaacgaataatgaggtatccttggcatcatctgatggctctgagtatttgttgggctgctccattctgatacgtgggccattctgtccaacaaggtgtggcattgagaaggattggtggtcacattaagggcttgttttcttttatattgttaaataatagactctgaaatgttacttttctctgtaaaacaaggtagtacttcctagttcatttctttcttctttgtaaattaatatttaaaataatactttctaacttttggattaccagattagactttattgtataataaaccacatgattttagatttaaagtcagyttttgaaagaaatccttattatttgttcattaattttaattaaaaatttgataatgtttctgataaaaaatattaatatgtggctgctgggcacagtggttcatgcttgtaatcccagcactttgggaggccaaggcaggaagattacttgaggccaggaatttgagaccagcctgagcaacatagtgagaccctgtctcgaaaaaaaagttttaaatattagctgggtgtggtggcacatatctgtaatcccagctactcagaaggctgaggtgagaagatgacttgagcccaggagtttgaggttacaacgtactatgattgcaccaccgcactcctgcctgggtgataaagtggtatcttgtctaaaaaaaaaaaaaaaaaatcatggtattgaaaggtataaagaggaaaatgtgaattattattattctactcctaaggtaaatatttaaccttttatagtgaaaatttttctgacactaaaaatttttttaaaaacatgagttttaacaatagcagtcatcttaagaaatcattattgaggtgactacagctagcaaagaaattttttttcccccagctgaaatcttgggtacctttatactttggtataaacatgtacacatagtagcagagaataattgtgatgcactaagctggcaggtctgtggatttcagctccaaacacaaatatgtaacactgagcctatattgaaatatggattaagaggctctaactcacttttgtaaaataaaatgataggagccacatttgtgtttaattatagcatgagaaacctgagaatcaaaagaaataagtaagttccatcacacaacaggataggaaaaatagaaagtctacctcacactgctgcatttgtctgtaacttggcctactttatgaaactcaaaagcgaattaagccgggcgcggtggctcacgcctgtaatcccaagcactttgagaggctgaggcgggcggatcacgaggtcaggagatcgagaccatcctggctaacacggtgaaaccccgtctctactaaaaacacaaaaaattagccgggcgaggtggcgggcgcctgtagtcccagctacttgggaggctgaggcaggagaatggcgtgaacctgggaggcggagcctgcagtgagcggagatcgcgccactgcactccagcctgggcgacagcgagactctgtctcaacaaaagaaaaaaaaaaaaaaaagcgaattaaaactacattttaaaagcctggttctcatcacagtttttggctgttagggataggactggtgcaggcaacattgctccagctgaccaggaaatggtcttccagaatccctctgatttaatgagccctatctcctagctckgcgtgggttttgagtaaccatgaaaaaaagcttttaagtgatcaaaatgatatattgattctttctttctaatgccttgaatattctttcagcaaagctgctttaaaaataatttctgattttctatttggtttttatcaagacatggaaatggatagaggtattgtgaattgatcccaagaggaagaaattcctgtaaaatgtagatgcgttggtcacatgggggagaagctcctgtctgacctctatttcatattatgagctcaaaacatgctttctcatgggccatgtgacatcatgtttggttgagcaaaatgttaatgttgcagtgattgggatcagtgctgtgcttcctgacccacctgctgcattggtaaacctgaaaccaccgcagcaaatatgtttatttgcttttccctgaaatgtgctgttcctttttacctcctacagataaaactgacaggcccttttcctgctagccaaaaacagtgaggagaaccaggtggaagacacagcttttaaaatgtagttttaattcactttgagtcccataaagtaggctgagttacagacgagctgtgggcttcaccaaatcactccatgacctcactttccttctggcaaacctctcccagtgcaatatgttgatatcgttgatggagtatgagaaacagcttgctggagaagagcctgcctgtgatctcttaaggttgccagacaacatcactgtaggccatcttctctctttttccttatgcttcaatttcccatggcttttgtgtactacaataacgtcagtaaccaacctcactggaaccacttggcttgtagatagtgaaagctctgtttacattagaggtagtttcagaattgatgaaagcctgtgttgacttcttagtttcttatagtggatattttgattgaaaacactggaatctccaatgtgataattgaccttactgttgtgtactgagatctctattttagattctccccaaataccaccttttttctatttttaaaattattattgcaaattcagtcaaataatatggtagacagaaatttggatgggcttcaggaaaagaggtttaatagtggatttgcccctaactagctgtacagcctcttgcatatcatttaatctatcttgacctcattgtctttgtattgagattctgtggtccagtcatgggaattaaaatcaccatccatagaaagctgtgtctctcgtctctttgtgattcaacacttcatcttttctgcagagtagaacaccttgtaggcaggttcataatcttctctgtacttggaaatcacccggaaagccccctttcaagtttytaattgccccaggtaatcyttttttttttttttttttttttttttttttttttttttagagggagtctcactctgttccccaggctggagtgcagttgtgcgatctgagctcactgcaacctccgcctcctggtttcaagcgattctagtgcctcagcctcctgagtagctggaattacaggcgtgcaccaccacacccggctaatttttgtatttttagtagagacggggtttcaccatgttggccaggctggtctcaaactcctgacctcagatgatccatctgcgttggcctcccaaagtgtgcccaagtaattctataatgtagccaggatgagaaccactggtatcaggtctagacccagggactcattattataaaacattcccctttgacataccttttcatccttgagtcaggacaattttacctttcagaaagtagctacagtccttttataatttactcctcaccaaaggtaaratacatccattttctctgtgtgtgacttctgactattctgcactgattcaataccccttcgttttttgcttattttttcattctcaccattcaaccacacttgacacttgaatcacttttgttgatttaaaagaacaacaacaacaaaaatacagagtaagatcacttgactttattgtattagcyattaaatctctttctggagcaatagttctctaagtatggtcccaggagcagcaatatcactatcacctggaaacttgttagaaaggcaaattctcaggcccctttctggaccagaagctctggagatggttcccagcagtctgttttcacaagacttctaggtgattcgacacactattgcttgagagctgttctagagagattttatattttcagatagttggatttttaaaaatttttttagtgtgctcagatatttttgaagtaatcgttgtctgaacttacttggtctagaaatagaagagatgttctatttctaaaggggatatttcccaatcctacccatctttttatcctttagaagttttcatcttcttttctgcttttagaagacctatccatatctctcttatttttacactgaaaatttagtcttacattctattatcatggaaactttaataatcaatgctatttcaatgatgtattatgatgtgatgtaacaatagatggggcagtgactaatacaacattaatttctacttcttcatttgtttatttttattggaccttcagatgacattcttcttactttatgaagggggccagcccctccacacctgtgggtatttctcatcgggtgggacgagagactgagaaaagaaataagacacagagacaaagtatagagaaagaacagcgggcccaggagaccggygcttagcatacagaggacctgcaccggcaccggtccccgggtttcctcagtatttattgattactattttcactatctcagcaagaggaatgcggcaggagaacagggtgatagtggggagaaggtcagcaagaaaacatgtgagcaaaggaatctgtgtcacaaataagttcaagggaaggtactatgcctggatgtgcatgtaggccacatttatgcttctctccacccaaacatctcagtggagtaaagagtagcagagcagcattgctgccaacatgtctcgcctcccgccacagggsggcttttctcctatctcagaattgaacaaatgtacaatcgggttttataccgagacattcagttcccaggggcaggcaggagacagtggccttcctctatctcaactgcaagaggccttcctcttttgctaatcctcctcagcacagacccttcacgggtctcgggctggggggatggtcaggtctttcccatcccacaaggccatatttcagactatcacatggggagaaaccttggataatacccagttttcctgggcagaggtccctgtggctttctgcagtgcattgtgcccctggtttatcgagaatggagaatggcgatgacttttaccaaacatactgcctgtaaacattttgttaacaaggcacatcccacacagccctagatcccttaaaccttgattccatacaacacatgtttctgtgagctcaaggttggggcaaagttacagattaacagcatctcagggcaaagcaattgttcagggtacagatcaaaatggagtttcttatgtctttccctttctacatagagacagtaatggtctgatctctctctcttttccctacaacttaagaacacagacacagattattttttaaagttattcttaaacatgtggaattactttataataaacccaaaagttgctgttgttagagggaaatttttactaagtcaagyactctctggaaaaaaaaatgtgtgagcataagctaatatcataaatgaaatgatgaagaagaggataagggcacatggtcctaagtgaggaaactttgacccagaaaccttttgcagtgacagaagtagaccaagagtccaagtctccatgcttccaattcagtattccttgcatgaaatgtcactgcctttcgagactataccgtttacctaattggttggatctttgtcaagagcttgatccaagtggagtttctttgtttaatatataaagcatttgcaagtcctttcaagggcagcacatagttttatttaactccctcaagccctctcacctctgtcaagttgcaccaggaaattcaaggtctagccaaaggcccccaatgagttaaaaacccaaccatcctgcagagtagaagaaattaatgtcaaaaccagatgttcctctgtgggccttgctggattcataagtcaggataaagccagcgtggatgcatgcatgtcaaaaaaaaaaaaaaaaagtcttggccagtgttgtagagaaatgaagtgttgtttcatctgcagttcctctccagtccttgctggttgggagcactggctcccgggagactggtggccctgacactcaagccattaactgagaatgctctctaatcccttgttttcattgttggtgttccggmcaggctgcccgcacagagcctgcccgttttcattggctgcaggaattgttattggagtggctgacagctgtctgccaggctgcctgaaactgccttcctgtgctctccgctgctgctccacttcacagcgctattgttcctgttgagccttttcttaaaatctttcccagctgtatcctgatatggtaaaccacttaaattagctccagattgttctgtttattttgtgttagataagcgacaaaatacagtcccagcggcagaccaagaggagagtggaagtcgggggaggggggtcagaggacacaaggtcttttacaacacraggtagagttcccagacaaaactgtgagaggcacaagtatgatacagtcactggcctgaccatttatacgtgactctgatgggccaggtgagcattaacgttgcatctgcgcacacctcattccagaaaagaaaatcaagaccccagcatacagctacactggaagggagctaaatttctattattggaaatagacacagtattgctgtcaggttggttgccatgccagctgtccaggtaccatgcttgatgccctgattaccacaagacttcccccttccccctgcttttaattatccttctgtagtgcagtgtatggtaactgatgggctcaaaactggcccacatttgccagtctccctatatgctcagcacttgaaaatgagtcttctctgctgyaatttaaagctagaaatccaaagacattgagtcaccagcataggtattttccacacagctgcaagtgaaacttcacaatggacttggccgctatttgcttacacttgccatctgtgcaaccgctctacccrtggcctcccccgctttgtggttgtcttctaacaggagcagtccacgcaaagccttcctgaatacttaacaaaattttaaaaratataatagatactgtcctagcatgaaggcgctgcctttgtgatttttaggaattaacccaaataaaatatgaaaaataaactaccgagtgctttaacgcagctaaagcatgcaagcaaaaccagcaaccagctgagttccgacagttactgagagttttgtatgtggtaattcaagactccccaggaaagatctcatgactcactccagtgtggctgggcctccagtcctcactctgaaccaaagtcctggaaacacttttccaccacgttgagagaaggcgagggaagaacagggtcaggagtgatcaaatgcccttagaaacagtctctttctttccttttgggaaaacaaactcactgtgtaataaaaaggtacaaagccaactttggaataataatcaccccgccccatccccttgccctctgatggaaagtgccttgtcttctccatcaaggtctagctgggggcttgaacggcctccrtgtcacctctaattccccagtttttaccttgtttcctttctctgtatcttttttgcccttagttgtgtacagtcttgtattttttcacataggctatgctttctgtggatgttgcctccctcgaaagcagggaccatgtgtygaacccctgttgccttttcccagagtagcgggcacctagcaggtgcttaattaaggtgtgtcaaataattgtttccttttttattcttacctgacatgaagtatgctcctgtatcaattcagatgaaggtttaaaaaaaatcaagacaagtatcacaagttcccttagcccattctcattaaaatcatgggcaccaccttcccgtgctcaccaggatggaggaagtcaacaaatatctttctcattgattaaaaactctggataatactgaaagcaactatctgaggcttcttaaaagtacttaggttggtgctaaagtaattgaggttttcgaaaactgcaattacttttgcaccaacctaatataacagcagggatgataagaatagggacagagaagaaaacaaaatcaggtgaatggagaatggggaataaagtcaaagcttcatgaatcccttgtgtggtgagttttggaggtttattttctctcctctatctcttggctttgacctaagagccaatggaattatggaactatgcagcaggcactggcagcaacatctccaagagaaacctcctacttctaaccagaggtctaggaaagtgggctcttgctcaagaatatggggaattcctattttatttgttttttcttttcttttaattttttgagattgagtctcacgctgttgcccaggctggagtacagtggtgtaaccatagctcactgcagcctctacctcctgggctcaagtgatcctcctgccttagcttcccaaatagctgggactgcagkcatgcaccactacacttggctaattttttttttttttaattttttatgtttggttagcgattggatcacactatgttgcctggctggtgtgagccacagtgtccagactgwtttttctttttctttcccttttctttcttaactctaccccaagacaggccccagttgaagatctgcattggtgttgtggtggggtscaggcacctaaaatctcaaaagaagacccacatttctgaccggagtgtgagataatctctgttattttcctctttttttttttttttttttttttttttgctactttgctcccaaaggcaacctcagttatgcagaagtgcatgacagaatggggaactacaacctaacagaaacctgtttttctgatcagagaaaccacataaaggggcccctggagcggaggttgggggtggatctgaaggatctaaagggagagaagaactggagaagaggatcccctgattctgtgtatgagctaagccccaggctcacctccaagtgcatatatgccacacaggcccaaaggagcaaagcagaggcttcgaaaactcaactgccatgtgaaccactgcccaggtcctagattaacccctgagtggcacatgcgctgggcaaacccaaacctcatagcaaaggctttaaaaactaaactgacattagagccactgtccacagaaggtgagacaaaacttgtggtctgagtctcactaggttgattctctgcttaaccaaacaaacatcaacaccctcgagaggattttaactagacctagaggctcagaacatggtattcaaaatgtctaatagacagtccaaaattactcattatacaaaaaaaaaaaaacaggaaaatacgagcagtactcaagggaaaagactaaaaatagattatttcagctgtgatgagctcatttgagatgatcatccaaatattggtgttgtcagacaaaaactttaatgcagctatkgtaaccattctccatgagacaaagttgaacactcttgaaatgaatggaaaaatagcagtgaaatagaaactaaagccaaacaaatgaacaaacaaaacaaatgaaaattatagaactgaaaaacacaatatctgaaatttaaaattaactctatgggtccaatagcagaatggagctgataaagaagagtcggtgaacttcaagatagatcaatagaaattatacagtctgggctggtcgtggtggctcgtgcctgtaatcccagcactttgggaggctgaggtgggcagattgcttaaggctaggagttcaagaccagcctggccaacatgatgaaaccccatctctaccaaaaaatacaaaaattagtcaggtgtggtggcacacgcctgtygtcccagctactcaggaggctgaggcaggagaaytgcttgaacccaggagggcagaggttgcagtgagctgagatagcgccactgcattccagcctgggcaacagagtgagaccctctctcaaaaaaaaaaaaaaaaaagaaagaargaaaagaaagaaaattatacagcctgaaacacagaaaaaaggaagaaaaacagtgctgcagggacctatggaataatatcaaaaggtctagcatttatgtcattagagtccagaaagagagcagaaatattagtgtagaaaaaatatataaaggaataatgtgtgaaaacttcacaaatttggtgcaagatacatgtacaarttcaagaagctcagtgaaatccaaacaggataaactcaaagaaaactacaccagcatcataatggaactgctgaaaactaaagatgaaaaaaaaaaataccttgaaagcagcartctcattcatgggattgaatgaaattgaatgaaagcatgttcacacaaaaaacaatacccatatatttatagcatctttattgataattactaaaaactgaaaaacccaaatgtccttcaactagcaaatagataaacagatgtggtacttctgtgcagtggactactactcagtagtgtaatgaactgttgatacacacattagcatggatgaatcacaaatgcattatgctgaatgcaggaagccagactgaaaagattacacacactatgatttttttatatgacattctggaaaaagcaaaaccttaacgacagagaagcatcagtggttgccaggggttaaggctgggtgtacaatttgtctacaaagaggtggtacaaaggagttatatcacagtgatagaatgttctatcctgattgtggtggtatttatrtgactctatttgtyaaaatccataatgatgcacaccaaaataagtgaattttactgtatgtaaattaaaawgaaatcaccagcacatgatttcatatctgatatggttaatatatcttcatgactatgtgaagtatagaaaagattcatgtaatctcttatctattttgaagtcattttccatttgattccataaactttcaggaagccaaaaatggaataaayaatgaaatggtctctgatacatacagaaagctttccaaaaaagaattttgtgtttcatatgccaggcakatgttttgtagggtcagcttaccacaaaaggcctcgctgaaaaaatgcagtataaaagtaggggcctgtaagagaaagagaagcacattgactccagaggaggtctactgttttataaaagaagccaagcaaatttgatggactggtgaaaacaagaacaaagaatctgacatgtcttggaagctctgggttttgataattagggaagtatttagaatgctgtctcgaggaatcacatcttttgtgctgagatatatccctgcttgtgttctgaaatatacatggagtgggcaggcttggactgtttaaatgaagcagattttttacattcttgtgacactaggaagacttttcctgaatgtaggattttttctttaacgcacctctcatccaaatggcaaaacatccaggatgggtgcttacttgcaatgagatctccccagctgaccagagctgtactttctcccactgcttattccccctctgaagttacatcatcattttgctccctggtacaccattatgggtcttatctatttttatacataaatatattaaacaaaactgttggttttaagaaacttttgacctattctaagacctattctctgtttttctataaaagttttatggttttagctgttgcatttaggtctttgatctatcttctttttcctcatacagtattgtttttattgagatataattcatataccatgaaattcatccttttaaagtatacagttcactggtttttagtatattcacaaagttgtgcaatcatcaccattgtctaattctagaacattttaaaaattaaacatacaagaaattctctaccccttagcagttactcccaactccctttcctccctctgtcaatcacataatctatgttttgtccttatggattttactaagctagacatttcrtaaaaatggaatcatacaatatatggctttttgtgtctggcttcttttatttggcataatgttttagatgttcatccattttgtagcataaatcagtatttcatttctttttgctgatgcataatatcccttttattgctatacattgctgaaaatatacattttaaaaaatccattaatcagttaatggatatttgggttgttcctacttttttgggctattatgaataatgctgctatgaccattcaggtaccaatttttgtgtggacatatatttttacttctcttgggtatatacctaggtgtggaattggtggatcatgtggtaaatctatgtttaactttatgaggaactgctaaaccctttgccatggtttgaaggtatctcccaaaagttcatgtgttggaaaccgaatccttctgtcctcatgaatggattaatgagggttttgccatcatgaatagattaatgtcactgtcacaggaatgggttcattacattgagagtggctttgttataaaagtgagttctctcagtctctcttgctcttgccctcttatcatatgatgccctctgtcatgttatgacaccacatgaaggccctcacctggtgccagcaccatgttcttagacttcccagcctccagaaccatgagctaaataaacttgttttctatataaattaaccagcctatggtattctgttacagcaacagaaaacaagactaagacactgtttttcaaagcagctgcatcatgttacactcccaccagcaatttatgagtgttccagtttctccacgtccttaccaccacttgtcaattgtctgtcttttttgttatatagtaatcctattgggtataaagtggtatcttcttatggttttagtttgtgcctcttggatgactaatgtgggacatctttttgtgtatctattgaccatctatttttgtgtatcttctttagagaaatgtctatttaaatcctgtgtcaatattttaatttggttatcttttattattgagttgtaatatgattcatctttaatttttatgtgtgttatgaagtagggtttgtcaaggttttgtttgttttttttaacgtagatatcagaatactctagcattatttttttttkaaaaaactatttccctattggttggtttggcacccttgctaaaaagcaaatgaccatttaaatgtggttgttttactaggcactccattccagttccatgaaatcttgattactgtagctttatagtagttcttgaaattggatagtataattcttctaactctgttcttctatttgaaaattgattgcagtcttgggataaatatcactttatcatcatgtttgtggtaggcagagtaatcccccgtctccctcctgcctccaaacatgccctaaagcctggaacctgtgaatatgttatgttatatgacaaggggaattaagattgcagaccaaattaaggtttctgataaactgacctgaagatgaggagattgtcctggattatctggttggaccagtgcaatcggtgaccttaaaagtggaagagggaggcagaagaggaggtcgggtaatatgatatgaaaaggattcaaccatcattgatgactttttttttttttttttttttcctgagacggagtcttgctctgtcgccaggctggagggcagtggcgcgatctcggctcactgcaagctctgcctcccaggtcccgggttcacaccattctcctgcctcagcctcccaagtagctggcactacaggygcccgctaccatgcccagctaatttttttgtatttttagtagagasgggcttcactgtgttagccaggatggtctcgatctcctgacctcgtgatctgcctccttaggcctcccaaagtgctgggattacaggcgtgagctactgcgcccgcccattgctgactttgaaggtgaaggaagagggcatgaatcaaggaatgcaggatttcaaaatggtagtatagaagcaagccagcttcaatccctcaatagaagaccaaaaacaaatatatagcattgagattttcaccagcaacaacccagagttcaagtatgaggatgagacagcccccagggccacagagaagtggaaaaaccttgagcatatgattggagaatcagatttccacgtctgcgagtcccctcccctacattctttcagcaccaagcatgtggaaaatctccctcaattctgtttttacactggaaaaagtgaaattgagtggtcaaccagcttcctcaccttcttgggttccgtagcaggagtcctgtccctgccttaactcatgggaagcattgtgagtgcctgtagggagaaatatctctgaggacaggctgcaacaaaggtcagaaggtgagactaccatccccaaccctggaaactctgctctgtaactcagccaaatgagacaccaaatcagagtggctattcagcagcaccacactgtaggaggtacattccacaggttcccatgggcaggaacccctagccagtcttcccacactgctgactaggggttcctgcctaggagcctgtagaacatacctgggataatccctttggtgactcccccatttgggacaggcagcactgcaaccgtttactagagccaaagtgaacctgggcttatagcgccacctagagccgaaaaggaggcagcaayctagttgcaaagattaagcaaatatattcaatgaaagacaaaacaagctggacagagaaaactagaatcaataattaatccttcaatgcaaagacatagacatatacccgcaagtaacaacagcaaacagggaaccacagtctccccaaaggacaaagcaaaaatccaatgactgaccctaacgagatggcgactattagcttctgaccaataatttaaaatagcagttttaaggaaactcaggtatctccaagataatacagaaaagcagaaatttatcagagaaatctaacaaagagattgaaataattttaaaaaatcaaacagaaatcttagaactgagaaatacatttgccaaactgaagaactcttaagaggctctgagcagcagagtgagccaagcagaggaaagaatctatgagctcaaaaaccagctgtgtgaaaatacacaatcagagaagaaaaaagaaataagaataaaatgtaacaaagaccacctacaatatgtaaaaaattacctcaaaagaccaaatctaagaattactgctgttggtgttcaagagagagtgaagcgagagcaaggggtagaaagttgattcaaaaggataagaactgaaaactttccaaaacttgagaaagagaaatatccagctacagaaaggtcagagaacaccaaacagatttgacccaaataagactactccaaggcatagaaaaatgaaactctcaaaggtcaaggacaaagagaggatcctaaaagcagcagagaaaagaagcaaataacacgtaaagtagctctaattcatgtggcaacrgattactctaaggaaactaaacaggccaggagggagtggaatggcattttcagattgctcaaagagagacaaaaaaagcctgccatccaagaatattgtatccagcaaaattatcattcaaatataaaggagagataaaatctttcccagacaaacaaaagctgagagaattcaccaccactagatccatcttgcaagaaatactaaaggcagttcttcagtctgaaagaaaaaacgctaatgtgcaaaagaaaacttttcaaagtataaaacctacaggtaaaattaagtacctggacaaactcagaatactctcttactgtattgctggtatgcaatccactcataactctastatgaagctcaaaagacatgagccaaggagtgaaaacagcctctagaagctagaaaggcaaggaaatggatttgctagaaaggcaaggaaatggaacttccagaagggaatgcagccctctcaacaccttgacattagcccagtgagacctgcatcagacttgtacaggcctcagcagctgaatgtattgtacagcctgcagaactgtacaataataagtgtgtattgtttaagctgctaagtgtgtggtaatagaaaactaatgtatgtttttttatataaagctaaatttgatttcctaaatattgttaaagatttttacacctgtgttcattgtggttttctttttctgtaatgtctttgtttcattttggtgtcagagtaatgctggcctcatagaataagttgggaagtacaggattcctatctattttttgaaagagtttgtatagaactagtattattcctttcttaaatgtttggtagaatttgccaatgaaggcatttgggcctgaaattttcttggtgagaaggttttgttttgttttgttttgagacagagcctcactctgtcgcccaggctggagtgcagtggcacagtctcggcactgcaacctttgcctcccgggttcaagcgattctcctgcctccgcctcctgagtagcttggattataggtgcctgccaccacacctggctaatttttgtatttttagtagagccggggtttctccatgttggccaggctggtctcgaactcctggcctcatgtgatccatccacctcagcctcccaaagtgctgggattacaggcgtcagccaccgcacccggcctgtggggaggtttttaattactaatttcaatgtctttaatgggtatagggcatgtangttatctattttttcctgaatgaacttagattaatcatttttgaagtcttagttgctagaaaaaaatatttaaaaattggtgaattttctcattaaagcagcttttagtgcatttttgaatatagtaaatataaatattttatatttatagaatntattttagatctgaaaaataattattatgagagtccncatattacaaaaatacaaatattatatctgagtccttacttaccaggagatctgattataacttgatttcccatacatttatgccactcccatgggccataaacatgccagtcactgtgataaatttactttgtaaatcaattaattgactttgtgattatatatatatcatttacagtgattctgcttctaaaaagtggaacctctttccatatgctgttagaattatttataagcttacagaggtttaggccagaccccaaactgtgttaaattcacaaggtaatgagtgctaacctgtgaagcctcttgaaagagaggtcactacctatctctggccatatgtcccaatcctgccattgtatagggcagtggtttttactgagagtattttagaaattcacttgagtgttactgatagttagtgagtagggggctcaggatgcaatgcccgtaataaccccacacagtgaggaattgtcccaagtcctgtacaacttacaaaatatcctgctggttagtcatgaagattaaaagcttgtttacaattttctgagactagaacctaagtctagtctctatgttttacacataaacacaaagtattttttgcgtggttttaatatataattaatattctaatctttattttagcatttatccctgctctctctttttttttgtatttctactatagaatggccttaagtccaaatttatttcgtctataactgtatgcactcatctaaccactttgctatgtcttttagggttgaacctgcgcattttcctatgaaatacatgctattttattattaattgcctttttctactctgtattacactgagagttattttttttaattagacatatagttacagtattgtatataaattccatttcaggacaaaggagcatcacaaaatatttgttatgaaaagggtggggatgttagatttgaaaagcctgagaggcatgttatagaaacaaactttcttctgatttcmgtacttttcctatcattatagttgctattacataaaaatgtaaagtcttggaatgagtccatattactgcttcaaaataaccaaaacaataaaaatggatttaacttctatttcgcctacaaaatagcctaacacaattattatatccatcaagtctaggacatccagccatagtgctcacacatatgcatagtaatcacaaatttcagtgcacaaacttagatctgcaaagaatataacttacttcttttttaccctgtcactgaacgcagtacctctggggtccctattctgctgggtggaggaaacctggttccagtcaattcagatcatctcagttaattcatgatctcatcctggctcccctccagggagccagtgcgttggagctgaaggaagtgtgtggtccatagtcatccttgcacaagcctctgcagaaacattcctgttcctggctggcctttttatatcatccatctagatcatgctgcgacctccttgcctgcggagactctttggaccatctctgtgccacatttgtgctcttctcaacaccaaatcaaaaacattcatcagttcagctgcaaccccttccacactgtggtgtgagaagcctctgagcctgccttccatcaccttgtgcaaccattgtcatctgctgctgccacactatactgggcacaagaaccgcagggagtcttgctatcctctcatctgccccccggctcctccaggggatgaggcatggttctttccactcttgtatccctccgtccattatttcttctacactagatccagtcctgggggcagagcccaagatgtgtgcttaaggtcacagccatgtcctttagcttcgtttccagtcctctctcttcccctggctctgagtgattgcttaagctaaatctattagctcatccacctgctgactatccatttccggagcccagacatggatctccctgcctgcttcctgggttgagggtcacagggtgacaraattactaggaatgagaaaagctgttacttaatatttggaaacatcattccagtggagatgcagggcacatgaggcatactgcttagcctgtaataattttctctcttttcagtctatatgcctaactttatgccaggatagtgaaagttttcatgtgcttatcgttgtgacctttgcaaggtatcaggtgaagaaggcaggcacattgtattgctgtagataaataggattaatgacaggaatatgggatataaacctttttgctaggtctaaaccatccttaactatgccatgagtctctcactatcttaatgatgtagggtcatcattttaatttttttattgtagtatgcatctttcagtggtgtcttcaatatacgtcagtgtggatcatttaatgttggaaaaacaggtaaagacactttagtttgtggtctacttttacaatttatacttttcttctcctttcctccttctacaaagattatgtccagcagtatgcatcttcctgacttgcagattctagcctgctataaaattaggacaccagacaccgcacatattgctagaattgcgtctgagactgaataggtcctgagttagtctctaattgcatggacttcgtggtgcctattgtggtaactcaggggcatttgttttgatttgtttgtttgtttgtttggttggttggtttggttttttatcctggcccttggctgttcatccctttgtctcctgctgcaaggcctcctgttagccatttgcctctcattaggcatggagctccaggctgccttccatgttctttcctcctgagtggcctcctcacctgcttgggatgtccagtgtcaatcacctggattctgccctcactcccactgtgcatgccctggtcagaggtggggctgctgcccaggactctgggggctcacagagtttatttcactttggccttggagcaagtgttatctgcagatccgaagaggttcttgttattattgattaagtatgcattcaatatttgaaatgctttaaacaaactgcttcatgtttggatatattgagttatttttgtttctgccattaaatgttttactctccggttattcttcagggaggattgtgctcatcagtgttctcgtgacttttgtttgcctctctctgcattaaacacccaaacrtcagtgagatcctttagaatctggcaaaacttcagagaactctgaggaaatgaaactgcctgtccactcagtttcattgatttttctgagtaaccttaaaggcatatcttactacttaagaagtagagattcagtaaaatgttgtttctgytccaaggataaaaattgagaacatttaacttgtattatatacttggaatcataaagacaaattgaaatagttgatgtctgcccagatagaatgtgctagctttctctggcttaaccatctctgaaaacacattgacataaatttccatctttctcaccacgcaagttgttagtacacctgttcttttgaaaccacaattctgtttgttcctgtgtgttgatggtattttcacttttctcctgctgcccttgaacttgccagactctccagcacttgtgtggtacttttctcattcattacttctctagtggcattactgaaggataaacagctgtctagtcaaaattatctggccacgttcagtgggttttaggtctgaaaggggagccaaataatgtgtgagtaaactgtaacactccctaagagtgccaaaaaaattagtttgcctggaaatccattagtaaaaaatatcaaacattcctaaaaattaaacaataggaaaaacaarcagggttttagttgttaaaaaggacagaccaaatatttggtacttttactcgcttaatacatcaaacatgggtcttctgtgctacttgtcagggggattctgaatatgaagatcaaaccttgcattacccatacctcctaagtgagagcacctcaacattttgtgcttaccttacaactttcatctaaagatctccaagatctgtgaatacttatgttttaaattacaggaaaaagttaagttgttgcttgccaatatgtaataaattaggacactgttttccagtttccagttccattttaacttgtagagaataaacgttttcaatcyttcaacagactttggagtcttttcatccttaataaatgttaaaggagagataaaaccccattgatatctcagcattataagcaatggcattagcctcattaaagtgaggaaatattttactacaaacttttataacatttttctttttaatcctcattcatccctgattttgccctttccctgcatgcatcttttttaaatctccacatcttttggtggctacatccgtgyattagtccattttcacactgctgataaagacatacccaagactgggtaatttataaagaaaaaggtttaatggactcacagttccatgtggcttgggagacctcacaatcacggtggaaggtgagggaagaacaaaggcacatcttacatggcagcaggcaaaagcaaaatgagagccaggtgaaaggggaaaccccttttaaaatcatcagmtctcgtgaagcttgttcactaccacgagaacagtatgggggaatctgcccctgtgattcaattatctcccactgggtctcccctacaacacatgggaattatgggagctacaattcaagatgagatttgggtagggacacagccaaaccgtatcaatcggttatttggtgcctggctgccagtcgcactccaccagaaccctcctcttgctagcccagctggacattctccttgctggtgctcttagtcaagatgtaaagtctggttagtgtctgagctggtggtcagagcacttatctgccctgaatgctgcaaaccattttaaacccctacgaataatcaaatgtgtatttgaacaaatcttcagtttctggtgtttaatttgaatcccaggctattgttatagtgtttttttctatgataattgatgtcctttatttaaactcatgggaacagaaaggagttatcctggctctcccctgatagtaacaacmcccctcacaattcactgtgttgttgmacttctcaagaaattacctatagaatagagaatgcaggctgggcgtggtggcttctgcctgtaatcccagcactatgggaagccgaggtggatgaatcacctgaggtctggagttcaagaccagcctggccgacaaggcgaaaccctgtcttcactaaaaatgcaaaaattagctgggcatggtggtgggcacctgtagacccagctactcaggaagttgaggcatgagaatcgcttgaaccctggaggcggaggttgcagtgagccaagattgcaccactgtactccagcctgggagacagagtgagacactgtctcaaaaaaaaaaaaaaaaaaaaaaaaagaatagagaatgcaatctaggaggactctatgcttagaatactttggtcttatgaaaacgtgatgttttggagtgtggctatgatacttaaatctaatatatgtttagtaaatatccagataggagcctattctgttctgtgtactttgctggtgctgatgactagcatacataaaaatagctaatattatttagcactgcttctatgccaggcacaatattaaggtgggtattttgttatcctcatttctcaaataaggaaacttaggctcmgagattgagtacttgcccaaacccacagtgcttagctcctctcagttccctgcatttcagtgaaattagacatggggcagtaggggtgataggggaaagtgatgatggtcataaaacacctagacctatacctttttgtttatacctagtcatcatttagctcaagttttccttaacttctggcagcagagtatacctaatagtataactagtctttaattaagaagcagccttgacacagacaccctagtctctaatgtgcgattgcataaggcctcctgctccctgtgcctgggctctcatctctctggtggtcacttggctggctctgtcctgtccttatggtttcagctcctccacaaagcccagtcattgcctcccatgaatggagagatcttatctctttttctcactcactccgtgagggacaggaccttgtccatcctgtttgctgccctttttccagatctggagtggtccctggaacatggcagcactcaagaaagatgtgttaaaggaataagtgagttctttcttccaggccaagactgatgcttcttgaaatgctcccaatcaaccctcttagactccaacataactgaccagggaccagattagacaaacaattctgatatttgagggtttgatttacttaaattctcactggggtccaagagcaccccttgccagctcctatagtttaagcagcagtatgtagaatagccaatgaaaagtcaaggtcacagagtagctggacaaaggcttagaaaaaacaatgcagtgacctaagttaatgtttagtgcctttaacctctattttcggtgagtggccttttccctaattatttgttcctccaaatcattgagcccttctgtgtggtaggtcctgtgctaggtcttggaaataaaaacattaagaaactttttgctcttgagaagcagagttcatggggaagacaaagccatgaacaactgattaacaatagacagagctaagtatagtagaaaatgtgcacataaaatgtagcagaaatacagagcagagatgaagaccatctagggcactaagtggcaggttcacagaagatatgatctttaacccgtggcactttaggcaagggagccaacatgtgcaaaggcaaaattagcatgaaagggcatgacatattctaacaacagggagaagttagttctacgtgactgaagctcagggcactttttatgggggaggacaggagttratacccaaaaaggaggttgggggcagatatgaaggattctatatgtgggcctgaagttggaactttttccctgattggaaagcaatcaggtctttaaacatgcatgtggcctgattgattttgggttttacaaacacctctggtgggaacttgaagcggtatataaattagcccaggagcccagacagaggagtgcctgacctaaagcaatgggctgcagaaggggggatgattggaaagctgttttaaaggtagacttggcagaatcaaatgcacattctgtcagaaatgattcaatgtagtgcaacagggaaagagtagccaagcgtggtggcacacacttgtagtcccagctacttgggaggctgaagtgggaggattgattgagcccaggagatcgaggctgcagtgagctgtgatcctgccactgcactccatcctggttggaggagtgagactttgtctcaaaaaaaaaaaaaaaagakaagatttgagaatatcagaatgtaatttgaatatctaggtagataatgtctccaaaatcttttagcaggagaagattgaatttaccgaatcctttagatgtgtactaagacatatattagcactccagtttgcctctcagtaatttaaaaaaaaatccaaagaatcaaccatcaacaagcagatacttttctgggacaaagaggcttctccatttttgaaacgatgttgcctactcatctgttagtcacccttgcatcagggccgtgttcaaagagatgtccaggcttggtatgaggctgctagagccttccttgcttttccttttgtgatctttgagtcaggttgggaaggatgactagggtaagccccrgctgaagcatgcacagggatgttggggtaragatgatgtttcagggcagccctccacggccaagccacacattaaattgtttggggagtagttctaaaaattaatgctgttgtcatggtttcattttgatttttatcagctggatatggatgaggcttcattgtcatatacttaatgtttttgcttagatctttggcaaaccaatatttttccatgactttttgacagttatttttgttcaatagtgaataataaagtgagatttacggtctgtatatgataatgtttgtcttactttgacatttcttttctagacagtaaaggccttataattagattttccctgtgccaaaacattgctgcaaaaccatctccctgaaaaaacgtttctttgcttcttytaggagctggcgtcatcttattttgatttggaatttttttcatatgtcagtcaggaaatgaaacaaaaatttctcttgaatatgaattcttaacaagaaagaaattaacttttgccgaaaaataaaactagaagggaaaatgagaagaaacgtctttgaaatgctgatggttccattgtctttttaaattctaatttatgtcaaacttcagtgagcaatataggaaactcccttttccaccttgttgcaaaagagcttattttattcttgttgctactcctaccagttttatgttgaattctttgaaatacccaggagactgaactagaacttatggaccgcaccctatttctcatatagttaaccaactaatgkcctaactcagtggattctgccccattgctgataagtggcaaccatcggccaggtgccatctgtgggggtacaaggacaggcgaagctgaactgcccttctgctgaggccacatctgcagttggcgctatgccaggagagccttggagaagttgcacatgtgtccattgacagtgctttctctttggagtgctcttaaaaagaataactgttgatagaatcgcttattgctaatggcaaaacatcacagagaactaattgcaaaaacagtcacacttactacatccgtggcctcccctaatgatatgtggaaacaccttccctttcctacagtagcaaaagtggccaaattctctgtacaacccggagaattttcctaattttcctatctgagtcataactgaagagctgctcctagaatcagattccagatccagccacccttgtccccatcatctccactcttatttccaccaccatcttcatccaatactttccgttgagcactaacaaatatgtgcaactgaaggacactacataatacctcagagaagtgtatctatttaaaacagagacaacaggcttcttctaaagtattgagccagcatcacttacagcaatccagacaacagagtgaaataatcgttctgtctcagcctttcttgatatcacgggaagagtgtaggtatttctttccagtgtatttttgtatcacatgaatagcaccttcttctaagtttcgatacattggttatgagtgattgctactctgtgcagtatcatgaacatggaggaatttcttctttctactgatggtgaccttttgttgttttgaatatacgggtctgctcagcttcaatatgaaatggaatgtgtatttcaacaactggcctgagtgaatgtttgggccttgagtttttgtcaagaagtgatgtggggaggtttgaagaaagattcttgtaagtctgtgatgtcaaatgatgagattgtctgtcaccgacccatgtgttgaagaattgtttcctcacctgatctaactcaagactcttctctactccctttcgagaagcacagaaaagaactgagaactggtgtgttaagggcgccaccaaaagtttccttggcagtagagccttgaatttcttccccaacagcagctaagccttctctaaaaggaattaccattaccttgaaataacttcctatgtacactcataggaagagtgtacactttgctgaggytgaccgtacttgtggttttcatcaggaagtgaaagtttatgtggcctacatgtgtgagcccactctatactagggatagcaggagtgtggtgctctaggggcagaggcctggggtgtcacacagaccttgttggaatcctagcattgccatctattcactgtttggctttttcaaacttccttttaaaaaacgtgacaaaatggttataatactaaactattygggttgttgtaaattttaagaacaacagcagttactaccatgtattgagcacttaggttgtgtcaggtaccctgccaagaaaagatcataagcaatgtcacttcatttccatcataatacatgaagtagtgctatggtttggatgtggtttgttyccaccaaagctcatgtggaagtctaattgccactgcatcttgggaggtggggcccagtaggaagtgtttgggtcatgggggcgggttcctcatgaatagatcaatgctgtctcccaggatcgagttctcaatctcaagggaatggattagtcgccatgagagtgggttgttataaagtgaggctcttcctsctctttggtccctctttacctgcacctgcctctccttccacttctctgccatgttatgatgcagcacaaaagccctcaccagcaactgatgccagtgcctagcgcttggacttatcagtcatcagaattgtgagccaaataaacctgttttctttataaattacctagtctcagtattctgttatagcaacacaaaatggactaaatcaattagtgattgttatttccacatgaagacgaggaaactgaggtggtatatcacccctggccacacagctagtgagtgtctggcctcaggcttctattccaggtctgccaaccccagattctgtgagagataatgcaaaatcagagtcactcctagtgcagtcagtgcttaacaagtgttcattctctttcctcccagatgcatcttgtagctttgatagatctctgatttcttaataaatttttatatgtaacattctatacagcaggtggtctgtcatactgccctcatgtggctcatttgggtaatagtgggttttttttttaaagtttaatgcaaaatatgtgttatttaaaatgtgtctctaaagtcacctaaatctgtggatactttgggagtttgtatgattctataaccccagtatgtaagaaatggcactttttcttttctactgcccactttaatgtcttaactctgagccctcatttggctgggaagatacttaacttcagttactctagtagcttctaccctgtctttgccaagatctcccattccttctgttgtcttggaagagwaaccttctcttccctggtattgtgcataatgaaactttatttcaccatcctgtcaagaggggaaaaatttttttcacaattatatttttccatctaatgttctgtttacagagacatttatcaaccactggagaaatactcagctttcacacttaagaaagagatattattgccagagtgtagagtgttaattcattttccagtttaaattgtagaattttttttccaagaggaaaagaaaaaggtcagtttttgtctccacctataaggagcattaagtcactaagtgaaattcccttagttttctcttcatgcatggagagggtcccagcttccatggactcattctcccatgctatacaaagttacacaggtgtatttaaagtttagtggattgtttagcttagggatctccaaagcgcatatcatcgagggactgccttgttttccagtggctctctccatggaggatttaaaggtagatatgtrtcacactgggccttacttatgtctgaataatgaaaggctatgtcaatgggaaaagggaatttagggtgggaaaaggcaaggaattttctttttttttattatttaagcaccatttagtaacaatgtacatacagtctctgttcttaaatgtatttaagagttaacatcatcctcatgccaagaccttactgtgtttcagataacggagggcagactttggcagggggtaataactggccccttyraggaagaaaatggagscygtgggaaggaggcgtccgaggggtgggctttgtggcaagccccttgctgaagcagaagggcgtgaagaaccgggagctcatccacatctctgactggctgccaacactcrtgaagcyggccaggggacacaccaatggcacaaagcctctggatggcttcgacgtgtggaaaaccatcaggtacctacaccctgccctttttcctcccaggacagaaactccaagagcagcctgactccattgagcaagaatgatagcttttgtgttaaaatgatagttcagcttacaaatacatgatttttaagaaaaataagtgcctttagagacattgtaagtatatatatttttaaattataaatttgagattgtgggcctgtgttttacgtgaagaacaagattgtcctcagcccattgccctccatggaaggtctttgaagctgcgacgttttgcttagaagtaggctagggtattgttagcttcctgcagggggtcagggaactagtcctgttgtctgctggaagaatggaggacaaaacagcagggaaaaagctggaataggaactagggatatgtttatttccatttattagcaagtatctaacaagcacctactatgtgccataccttcttctagatgctgagaaattaggaatgaacaagtcagtcaagatcctgcctctcaggaagctgtattctagttgggggagaaagatgttggacaaatgaacacacagatgagcaagatgactgccagttgtgataagtgccaggaaggcaaaaaagtatgttgtgatagatagagctggctgatgtgaagaagatacatcagggaacaggacccagactcagrtttggaaatcgtgatggtctttttcctgtttaacccccacagtgtagagcaatagcccccaaggttgggaggcacatgccttagaggttgcaagatgttcccttggagtacaggaagaaaatttcaatcttgtatttgtattaatatctaatttcatctcatcctttttaaagtatatgttttttaagacacataatatattagtagacttgtacataaatctaatttataaataaatatgcatatattggagrtattatttttacgggtggaatgacctagtgcaatggttttcaacctctgtttggtgttacagctctgtttggggttagcagctgattgactgtcccttagtggccagggggagaggacttcctcaggccatctcttcatcccactccaggtatcccagctcaagaatagyaggtttcaggtctctagttataggaaatacacaatggagtatttaggagcaaaaagccatgatatatttaacataccctcaaatggttcagaaaaaaatgtgtgtgtgtgtgtgtgtgtgtatgtatgtacatgtgcacagagagaattcaaatggactgcaaaattaaataaaagaatataggtaaggtgcataagtattcttttgttatgtcttatttttgcaactttttgtaaatttgaaattatttccaaataaaagtgttttaaaaataggaaggtctgacagcactgcacccacatttccagaaggccaacaactgactagaatcaaatagctgctgccttctgtagatgaagtatccacccttcaaatcttcaatctctattgttcccaagttccaatacagatccactgcactcatttaggttacctacttagtctctgtaggcatttaagtttatagtccctgctgaacataatcatagtattcaacactctggaaataccatactttgaccaatttccagttgcaaaatatatagattatttcttatctttttatattatyaatttttctgtaattaataattaatgttaaaaaatagtagggttcagcagcctaagattagtttttacaaaggaagtttgatagctattcaagtttaaacattaaagtttaaagtcctgtgagttcaggaatggataraagaagtgttcagccaggccgctcaacctctcacaacgtggagtctatgggttcctctctaatgggcctcacccasaagggtgagactagggaaggtcctcatctcttacaaacccaagggaaaatctgatttaattagctttataaccttctttcaattattttgcaactcaaagttccatgttttccttcgagaatttattaaattttaaagatcacttttcaagcagcaacatttrtagtattgggtagccatttcttcaccatttctaaacattattttggttcttatgagtcatattattttcatattattttaaaatcctcactagcctcaaattgttccctcttattcttgcctgaaaagttgatttgtcagtttggagacagtgatcagtttatgatttgtcatttcaagaacactctacagcatccaagtcacagaaaaagtaatgccactgaacagctaagctgagaagcaaagcagtaaaaccttttctctcaccagaaattttgaagctttgtgctcattatgtgctcattcatatgcgatgacttttttttctttttctttgaaacatttctgcctctatccatgatctaaacttgatatgttaaatttaaatttaatttccccaagygtgagtactatatgtcattgtagataatttgcaaactacaaaaaataaaaataattggctgggcgtggtggctcatgcctgtaatcccagcactttgggagacygaggtgggtggaccacctgaggtcaggagttcaagaccagcctggccaacatggtgaaaccccgtctctactaaaaatataaaaactagccgggtgtggtggtgggcacctgtaattccagctactcaggaggctgaggcaggagaattgcttgaacccaggagatggaggttgcagtgagccaacacggtgccactgcactccagcctcggcgacagagtaagactccgtctcaaaaaaaaaaaaaaaaaaaaaaaatcactcaaatcttacctagaaacaactactataaacattttgtcatatttccttagaatttttcttttcagcatttttttactacatcttttttccttatttaacagaccattggtttttgattgtgtcatccaagaaacttactgcaaacactatttcagtcactgcacattcaatcgcatggatataccttgatatacttacccattcccttgactttcttttttagttttttaaaacattagctctgaaatgagctctttctacatgaactgtttgtctacattttggactttttcccttagatataaatgatttgaaattaaatcattgagctaaagaaagtgaccaatgttggggcttgaaaaacaataccccaaactggaggccccagaagcagcctctacaacagaagtttttctctgacctcctcctgctctcttgtctctcagtctcattttttcctgaggcaagccatggaaaccagaatccttcttccccagggcaggtcatagaaaccagaaccccttctccccagggctaatcataaaacctagaaatattattctaattttccctctgccctatttgtgtaaaaagtggccataaaaaagttatctggcctaacttgttttaactgtaggtcataacattcccattccagagcgggtccaaccccacatccagaaggaaggaatgcatgcccagagaggccgagaagaatccagagagacagaccttgctgggtttccccactcaggctattagcattagagcatacccttttatccaatcatgtttctatatggctgtccatactttgttaaacctatacataaaaatgaacgatttcctctatatctttgggtcttcattctaaaggctcccatgtatacacattaaatacatttgtatgccttttctcctgttaattcaccttttgtgaactgatttttcagtgaacttgcggagggccaagggtggcccctacatgattttaaaagcatttgataaacattaccaaactgctttctaaaaaggctgtatcaatgtactcttgtacaggtgtagaaagtgctcatcttcctcatagcttttccttatcaagctttttaaaaaacctttgctaatgttatagacaaaatagtcttgtattaacttgattttttattattatggagattaatatttaactttttatattccatttgtattttgtctttgaaagtattcattccatgtgcttttmcacttattttactgaaaagtaggtgttttttgtggatttgtttgcttctttatgtcaggtttttggattgttgtatttcttgcaaatatttttcctttttttttgtctttttattttgtttatgtcttctacatggatgtctttcccatgtttatttgtcaatgaaatgtttttctcttgcttttttgttcagaaatatttttctcagcttcaaatgtgctaaatatctattttcttctaggtgttgtggtttgagtttcttccatgtatttcttttttctttttttttctttttaagacagagtcttgctctgtcacccagactggagtgcagtgatatgatcttggctcactgcgatctctgcctcctgggttcaagcggttctcatgtctcagcttcccgagtagttggaattacaggtatgcatcaacatacccagctaatttttgtatttttagtagagcctgggttttgccatgttggtccaaccagtcttgaactcctggcctcaagtgatccacctgccttggcctcccaaagcgctggaattacaggtgtgagccattgtgctcagccataattcttaaattgttgcaagatggtgtgcgtgttatgtgaggtcagtgtytaaatcagaggagtaatgttttttgcagttttttaagattgtaggcctctttaagaccgatgaaaactatgaacttacaggaaaaaagtacctaaacataggcacaaaaatctagatattacctattttgtgatattagaaattgattacacattcttttctaaaacattctttacaagcctatgccccttttgcttattttaatgcaaaacttaatgcccacttcatggtaaaaataaaacaaagatttccaagcaaagcaaatcttgaactttaattcagtttatcatcaactttcaatataaaggctgtagcggtttggcttggagtaggagaaagctttgagtgactttgagatggcaacatttgtggcatgcttgatatccaatcatttttgatttttcttttgttttgttttggtggcaaaaatgttgtaaaccctggcttgcataaggacataatagcatgtggaatcaaagctttataggacactttgccaggtgagggtgggattgaatcgaaaaatagttgaattcattttgagtcccaaatttactgaggttattatctttggcaaagttcacatcattgatgtttgtccatatagctaaattttggattacaaatgcacatttcaaccttaagattatgttgatcagaagtaacctttaagaatttggctcatgtttgcttctgactgcagagaaattgggaaaagtctaatcactcttagctccaaattgcagatctttcttcggtgttagcacgttctcctagcggccaatctcttatggaacaggggcacgttcttcagtaccgtacatagtggtgactgcggggctttaaccaaaagatatggccaaaattattgtccaagtaggctaaatcatgagataatgggctttctttttttttttatttaaaagtaaaatttctgcccaaagtttgatcatacatttcaagacttgttttctggaaattcagcaaatttctatttagaaagcaaaaaaccgctctcattctgttcccattgcttgagaaaaattcctgaaataataattcagcctcgagcctaatgaagttggtgcttctcacagcattaggcaagttcggaatcggtggcagaacatttggcacccctgcctgctgatacagaaatcgcccagtcacattgacgtctgttgtgtcttttccaaagcagcaaaaacaaatggacagccaaatgtcagagacacccgatctgtgcccagaggtctgaaacttttttccagaaatggaaataccactttcgagatgatggtagtttttgaaaatttgaagaggctcgtgaaataggaatgccagtaacggatgaaaaacagttgtctgtgctgagagcatcagaagttttattagctgtatagttacaaatttctcttaggactgcttcaaaatattaaaatgttagaagaaatagtagttctggagtgggtgacattatttacaatagsagctccttcgactgcttcagtttttctttgttscaagccacagactatgtttgccatttctaggggacatgacttctctaagcwmtttccaattctgtgtagtttttctgcttttcagctcaataatcagcctataggttgtttgaagacatttcataaggttgattgacaaaaaggaaaaccaaaggattaaaaccttgcaagtttctttttaattattttatatttaattaaacaatgtaaaacataagcagactaggygtggtggctcacgcctataatcccagcactatgggaggccgaggagggaggattgcttgagcccaggagttcgagaccagcstgggcaacatagcgaaaccctgtctctacaaaaaatacaaaaattagctgggtgtgttggcacacacctgtagtcccagctactcaggaggctgaggcaggaggttcacttgagcccaggagcttgaggctacagtgagttgtgatcatgccactgcactccagcctgggcaacagagcaagatcctgtttcaggaaaaaaaaaagcaatctcctgatcataatgataggaatttcttttttatcatcaatgggaaacactttaagatgtcataacatgacagtggtgacaactgaatattaaaatatcttaaaaacttagtatgtcattataaagacttttcccccactatcaatatcatttcaagaagaaagttaaaggaaaaacaaatcttttcacctcaattttacagatgccatgaagccaaataaagcatgatggtccatgagctaaatgttaacctctgatctaaaatggatacttcaagaaaaaaaaaaaaacacataaaatgatacttcattccacatactaacaagagaactcagactaattattgaataatatttctcttttcactgacttatggcactattttaggttttaagttcttatgagtactgtgctctgtcttggggccccctgttttagcccactgacttatctgttctcatgctggcatctgactattaatcattgtctttttcgagtatatttaaatatctggtagaaatggttatcggcctgtccttcattatattgtctttataaaattttcttgacaactctcactttttaatttttcttggtgaactctagaattattttgttaaattaaaagaaaagcttctcaaaaattatactgagtgagattaagcctgtaaattaatctggcaacaatgtacatattcatgcttttcacttggacacttaaagttgtcccccagtttactaatgctctttttatttaaaaaaaattctgttttctctttatttcattttgggcagtttctatttctaagcctttaaggtttttgatttttttctcaatgtctgatctttcatcaatttcatgcaatgtatttttcatctcacacattgtagctttcacttcttgaagctccacttgggtctttttaatatcctccctgtaactacttaacttcctgaacatatagaatacagttataataaatattttaatgtcccctgctaattccaacatctatatcacttctcagttggttgtgattgattattctcctcattataccggtcatatttctatcccttttggtctttgattcaatgccaagcattgtacattttaccctgttgagtgctggatatttttgtattcttgtaaagcttctagctaggcagggtgtggtggctcacacctgtaatcccagcactttgggaggccaaggcgggtggatcacctgaggtcaagagttcaagactatcctggccaacatggtgaaaccccgtctctaataaaaatataaaaattagctgagcatggtggcgggcgcctgtgatcccagctactcgggaggctgaggcaggagaatcrcttgaacccrggaggcagaggttgcagtgatccgagattgcaccactgcactccaacctgagcaacagactgagaccctgcctcaaaataaataaataaataaataaaaataaagcttctggctttgttctgagatgcagttaagttatttggaaacagtttgatcgttttgagcattgcttttaggatttattaggcaactgcagagcagtgctcagtctacagctaattatactccactgctgagtcaaatcctctctagtcaaaccttctcacagcagcctgtgagtttttcaaggctggctgatgggaacgggtactgttcccaactctgtgtgaatgctgagcagtcttccccttaatccttacaggtagttctttcccgtgttgtgagtagttcactcacaggcatctttttctaagacaatggtccccaaactctctggcaccagggactggttttgtgagagacaatttttccaccgaccagggttggtcgggggatagtttcaggatgaaactcagatcataaggcattagttagattctcataagaagcatacaccgtagatccctcgcatgcgcagttcacagtaggattcgcactcctatgaggatttagtgctgccactaatctgacagaaggcagaactcaggcagtaaagcttgctagcccaccgctcacctcctgctgtgaggtccagttcctaataggccacagatgggtaccggtccacagtctttgttgggggacctctgctctaaggggatcctctgcagatttccaggattctcattctgtgcagctttctcttctctggtcctctgtcctaagagctcaagctcccttggtctctggactcagctctgtctgctcaactcaaggaattcattggactacatttcagttgcccttccctgcaccagggcttagaaattctctcaaggcagtaaactgggcaatgattaaaaactcacctgctttgtttttcatcttggaataatcattgttctttgcctgatatccagtgttttgaatactgttttaaatattctgtccatttttctttgggttgttttaggcaagagggttaagtaaatctaatttggctggaagcagaagtatccaaagaaaaatttattgtgcctttactttctttaccagtattttcttgcctatttctcactttcaagtgttttaaattcaatctatcagtacagacccagctttttgcaattgaatactttaaatcttataactcttcttccaaagcaagtttcttcttcattctactttgtaatcacatgttgtgaaattttatatatatatatttaattatgtttaatgttaccaacatttttatttataactttccttagttcttaagtttgattaatcttttgattagttgattaatattttaaagtaatttttcagtagaggtacataaatggtgagttcttccaaatttttcatatgaaagaatatatttctattaccatcaaacataaatagtaatataggtcaggcgcagtggcttatgcctgtaatcccaatactttgggagcctgaggcaggtagatcacttgaggtcaggagtttgagaccaggctggccaacctggtgaaaccctgcctctaccaaaaatacaaaagttgactgggtgtggtggcacacacctgtagtcccagctacttgggagactgagggaggagaatcgcttgaacccatgaggtggaagttgcagtgagccgagattgcgccgctgcacttcagcctgggtaaaagagcgagactctgtctcaaaaaaaawaataataataatataaataattattgttaaaaatgaaagaatgtatttatttcatctttcgatcatgatacttaccaacaatgttggcataaactccaccttgtcaaataccaaaaytgcaatcctgtcttgtttttgtttgcctttacctggttcactttgctataataatactcaccagtagacaataaactaacgtctacagcatcttgagcagaaaggatttaacaagaattctgtatattattaatattatttttgtttgaatgtaatatgttgaatgtatttatgtttgaatgttagaatattaatattatttatgtttgaatgtaattatttatgtttgagttctttcatttgaaagaatgtattctatggggaatggtgcaaatggtgatttttttctttgaaccatgtatttagaagtgcattgttaagtttccaaattttgggtttttccctagttaaattattgatttctagtttatttcagttktggttttgaggaccacaaataattgaaatgctttttattatttcaattattattattgttttttaacagagacaaggtctcaatttgtcacccaagctagagtgcagtggtgcaatcatagctcactgcaacttctgcctcctgggctcaagcaatccttccaccccagcctcccaagtagctggcactacaggcatgtactgctataaccagctaatttttaaatttttattttgtagaggcagggtctcactatgttgcctcagctggtctcaaactcctgggctcaagcaatcctcctgcctcagcctcccaaagcgctgggattacaggtgtgagccatcactcctgggctaattgttttaaatttgagacttggcctagtagatggwctttcttgttgtccacatcaggtgtaattgaaaagaatgcgtattctgtagttgttaagtatagtgttaggtttttctttatgwtccagtctgtaatgttttagtagatgaatttatacatatttataaatatttttatttctattcttagttttttcattgttttgttacatttactttttatctttgaccttttatttagtagttctttaatatttagaaaaatttatattttatcctactgtttatcattatacaaatatctttatataattccttagtcccttttttcttacttaggttccactatttggtttgtcacatttaaatgacatcttcagcttccacttattacccataaggaaatcaagcaacttatgtaacttttcattctcttccagttttgtgatttaagtagtgttattcctactgtatcagagcatgtaatatgtaatactgttctctctttatccacaattttgttttagttttagatcttcaataatatattcaatactgaccacccatccacttctaaagtgttcacaattatctcttagttggaggaattcatccttgaatagatttctcaggattctttgaattcttgmatgtttattaaaacattttctacaaccttgataattgaacaccagctcaaccggttaaaataaaacccttgtcccacactttcttgctttgagtttcttgaaaatgttaccctaatctttgcttgttttctatgttactgttgataagtctaatatcagcctgattttattcctttgcaagtgactttgtgttttttgtctgggcacccagaagattttttattatcactattattatagttatgatttaaaatctaagaatttttccagatgtgtcacaaaggtgaccctactgtgtcagttttctcagataaaagtgagttatttcactttgtatattcagatcttcttttatttcagagtttttaaaaattacagttttaggccgggtgcggtggctcacgcctgtaatcccagcactttgggaggccgaggcgggcggatcacaaggtcaggagatcgagaccatcccggctaaaacggtgaaaccccgtctctactaaaaatacaaaaaattagccgggcgtagtggcgggcgcctgtagtcccagctccttgggaggctgaggcaggagaatggcgtgaacccgggaggcagagcttgcagtgagccgagatcccgccactgcactccagcctgggcgacagagcgagactccgtctcaaaaaaaaaaaaaaaaaaaaaattacagttttaaatattatattctactgttttgtttttcttcttcaggaactcctagttataggtattattgaatcttctttacataaatttggtttctgtcaatttctctcgtatcctctttgcctctttattttttctttattttgaattaattatcctttctcttttaatttctattctctacacgctttcacatagagaatgtcatgtataatgttttgtcatttctaagattttgtcctttttttcccagttcccttcctttaaaaagtgtgatgtctgagttttacaatttctgaatcatggttgttgtttctttaatattggcagttgatgatttcattatatttaattcatgttgaaatatcctgtaatggttttcttctgccttatgactgtttttccatagtaggagaatgttttcatttgccaaatttttgaattctcattttctattttttttaactcgtatggtaactttgcatagatgctgagttctttttggttttgttcacgtttatgtatgttggcgtttcctggatctaagatagcaggcaatccgtaggagtgggatttggacactttcatttacttcaggtgcttcaagagcgctgtgtattgctatagtgaagtgcagtttctttgctaaatgtagcccctttcttyttttttttttttttwaattatactttaagttttagggtacatgtgcacattgtgcaggttagttacatatgtatacatgtgccatgctggtacgctgcacccactaactcgtcatctagcattaggtatatctcccaatgctatccctcccccctccccctccccaccacagtccccagggtgtgatattccccttcctgtgtccatgtgatctcattgttcarttcccacctatgagtgagaatatgcggtgtttggttttttgtycttgcgatagtttactgagaatgatggtttccaatttcatccatgtccctacaaaggacatgaactcatcmttttttatggctgcatagtattccatggtgtatatgtgccacattttcttaatccagtctatcattgttggacatttgggttggttccaagtctttgctattgtgaataatgccrcaataaacatacgtgtgcatgtgtctttatagcagcatgatttatagtcatttgggtatatgcccagtaatgggatggctgggtcaaatggtatttctagttctggatccctgaggaatcgccacactgacttccacaatggttgaactagtttacagtcccaccaacagtgtaaaagtgttcctrtttctccacatcctctccagcacctgttgttycctgactttttaatgattrccgttctaactggtgtgagatgatatctcatagtggttttgatttgcatttctctgatggccagtgatgrtgagcattttttcatgtgttttttggctgcataaatgtcttcttttgagaagtgtctgttcatgtccttcgcccgctttttgatggggttgtttgtttttttcttgtaatttgtttgagttcattgtagattctggatattagccctttgtcagatgagtaggttgcgaaaattttctcccattttgtaggttgcctgttcactctgatggtagtttcctttgctgtgcagaagctctttagtttaattagatcccatttgtcaattttggcttttgttgccattgcttttggtgttttggacatgaagtccttgcccacgcctatgtcctgaatggtaatgcctaggttttcttctagggtttttatggttttaggtctaacgtttaaatctttaatccatcttgaattgatttttgtataaggtgtaaggaagggatccagtttcagctttctacatatggctagccagttttcccagcaccatttattaaatagggaatcctttccccatagcttgtttttctcaggtttgtcaaagatcagatagttgtaggtaagcggcgttatttctgagggctctgttctgttccattgatctatatctctgttttggtaccagtaccatgctgttttggttactgaagccttgtagtatagtttgaagtcaggtagtgtgatgcctccagctttgttcttttggcttaggattgacttggcaatgagggctcttttttggttccatatgaacttgaaagtagttttttccaattctgtgaagaaagtcattggtagcttgatggggttggcattgaacctgtaaattaccttgggcagtatggccattttcacgatattgattcttcctacccatgagcatggaatgttcttccatttgtttgtatcctcttttatttccttgagcagtggtttgtagttctccttgaagaggtccttcacatcccttgtaagttggattcctaggtattttattctctttgaagcaattgtgaatgggagttcactcatgatttggctctctgtttgtctgttgttggtgtataggaatgcttgtgatttttgtatattgattttgtatcytgagactttgctgaagttgcttatcagcttaaggagatttggggctgagacaatggggttttctagataaacaatcatgtaatctgcaaacagggacaatttgacttcctcttttcctaattgaataccctttatttccttcccctgcctaattgccctggccagaacttccaacactatgttgaataggagtggtgagagagggcatccctgtcttgtgccagttttcaaagggaatgcttccagtttttgcccattcagtatgatattggctgtgggtttgtcatagatagctcttattattttgaaatacgtcccatcaatacctaatttattgagagtttttaacatgaagtgttgttgaattttgtcaaaggctttttctgcatctattgagataatcatgtggtttttgtctttggctctgtttatatgctggattacatttattgatttgcgtatattgaagcagccttgcatcccagggatgaagcccacttgatcatggtggataagctttttgatgtgctgctggattyggtttgccagtattttattgaggatttttgcatcaatgttcatcaaggatattggtctaaaattctcttttttggttgtgtctctgccyggctttggtatcagratgatgctggmctcataaaatgagttagggaggattcyctctttttctattgattggaatagtttcagaaagaatggtaccagttcctccttgtacctctggtagaattcggctgtgaatccttctggtcctggactctttttggttggtaaaatattgattattgccacaatttcagctcctgttattggtctattcagagattcaacttcttcctggtttagtcttgggagagtgtatgtgtcgaggaatgtatccatttcttctagattttctagtttatttgcgtagaggtgtttgtagtattctctgatggtagtttgtatttctgtgggatcggtgatgatatcccctttatcattttttattgtgtctatttgattcttctctcttttcttctttgttagtcttgctagcggtctatcaattttgttgatcctttcaaaaaaccagctcctggattcattgattttttgaagggttttttgtgtctctatttccttcagttctgctctgattttagttatttcttgccttctgctagcttttgaatgtgtttgctcttgcttttctagttgttttaattgtgatgttagggtgtcaattttggatctttcctgctttctcttgtgggcatttagtgctataaatttccctctacacactgctttgaatgcgtcccagagattctggtatgttgtgtctttgttctcgctggtttcaaagaacatctttacttctgccttcatttcgttatgtacccagtagtcattcaggagcaggttgttcagtttccatgtagttgagcggctttgagtgagattcttaatcctgagttctagtttgattgcactgtggtctgagagatagtttgttataatttctgttcttttacatttgctgaggagagctttacttccaactatgtggtcaattttggaataggtgtggtgtggtgctgaaaaaaatgtatattctgttgacttggggtggagagttctgtagatgtctattaggtccgcttggtgcagagctgagttcaattcctgggtatccttgttgactttctgtctcgttgatctgtctaatgttgacagtggggtattgaagtctcccattattaatgtgtgggagtctaagtctctttgtaggtcactcaggacttgctttatgaatctgggtgctcctgtattgggtgcatatatatttaggatagttagctcttcttgttgaattgatccctttaccagtatgtaatggccttctttgtctcttttgatctttgttggtttaaagtctgttttatcagagactaggattgcaacccctgcctttttttgttttccatttgcttggtagatcttcctccttcctttcattttgagcctatgtgtgtctctgcacgtgagatgggtttcctgaatacagcacactgatgggtcttgactctttatccaacttgccagtctgtgtcttttaattgtagcatttagtccatttacatttaaagttaatattgttatgtgtgaatttgatcctgtcattatgatgttagctggtgattttgctcgttagttgatgcagtttcttcctagtctcgatggtctttacattttggcatgattttgcagcggctggtaccggttgttcctttccatgtttagtgcttccttcaggagctcttttagggcaggcctggtggtgacaaaatcggtcagcatttgcttgtctgtaaagtattttatttctccttcacttatgaagcttagtttggctggatatgaaattctgggttgaaaattcttttctttaagaatgttgaatattggcccccactctcctctggcttgtagggtttctgccaagagatccactgttagtctgatgggcttccctttgagggtaacccgacctttctctctggctgcccttaacattttttccttcatttcaactttggtgaatctgacaattatgtgtcttggagttgctcttctcgaggagtatctttgtggcgttctctgtatttcctgaatctgaacgttggcctgccttgctagattggggaagttctcctggataatatcctgcagagtgtttgccaacttggttccattctccgcatcactttcaggtacaccaatcagacgtagatttggtcttttcacatagtcccatatttcttggaggctttgctcatttctttttattcttttttctctaaacgtcccttcttgcttcatttcattcatttcatcttccattgctgataccctttcttccagttgatcgcatcggctcctgaggcttctgcattcttcacgtagttctcgagccttggttttcagctccatcagctcctttaagcacttctctgtattggttattctagttatacattcttctaaatttttttcaaagttttcaacttgtttgcctttggtttgaatgtcctcccgtagctcagagtaatttgatcgtctgaagccttcttctctcagctcgtcaaaatcattctccatccagctttgttccattgctggtgaggaactgcgttcctttggaggaggagaggcgctctgcgttttagagttcccagtttttctgttctgttttttccccacctttgtggttttatctacttttggtctttgatgatggtgatgtacagatgggttttcggtgtcctttctgtttgtgagttttccttctaacagacaggaccctcagctgcaggtctgttggaataccctgccgtgtgaggtgtcagtgtgcccctgctggggggtgcctcccagttaggctgctcgggggtcaggggtcagggacccacttgtggaggcagtctacccgttctcagatctccagctgcgtgctgggagaaccactgctctcttcaaggctgtcagacagggacatttaagtctgcagaggttactgctgtctttttgtttgtctgtgccctgcccccagaggtggagcctacagaggcaggcaggcctccttgagctgtggtgggctccacccagttcgagcttcccggctgctttgtttacctaagcaagcctgggcaatggcgggcgcctctcccccagcctcgctgccgccttgcagtttgatctcagactgctgtgctagcaatcagcgagattccgtgggtgtaggaccctccgagccaggtgtgggatatagtctcgtggtacgccgttttttaagccagtctgaaaagcgcaatattcgggtgggagtgacccgattttccaggtgcgtctgtcacccctttctttgactcggaaagggaactccctgaccccttgcgcttcccaggtgaggcaatgcctcgccctgctttggctcgcgcacggtgtgcgcacccactggcctgcgcccactgtcttgcactccctggtgagatgaacccggtacctcagatggaaatgcagaaatcacccgtcttctgcgtcgctcatgctgggagccgtagaccggaactgtccctattcggccatcttggctcagcccctttctttttggtctgccttctcatgattctctgacactgtgttattataatggaaccctgatctttggccatgtccttccttccctttaccatccatcttccaaaggacacttgttcttcagctgctcctctctcagcatctcagctgcccaaggcagccactctcgtcctgcacacttccttatccaagctacttccttggactcccttttgactccccactagccagtgctttgatctgtcaggtatgagacctctatcaacattttgtcccttgggtgtgaccttctctttctggagtttatcttatcagacgttatttgagtcctttccccttgatatggtttggctgtgtccccacccaaatctcatcttgaattcccatgtgttgtggcagggacccagtgggaggtaattgaatcatggggcaggtctttcctatgctgttctcatgatagtgaatagggctcacaagatctgatggtaatataaggggaaatttccctgtgcaagctctcgttttgcctgctgccattcatgtaaaacgtgactggctcctccttgccttccaccatgactgtgaggcctccccagccaagtgaaactgtaagtccaaataaacctctttctttggtaaattacccagtcttgggtatgtctttatcagcagcatgaaaacagagtaatacagtaaattggcccagtagagtggggcactgatgaaaagatacctgaaaatgtggaagccactttggaactgggtaataggcagaggttggaacagtttggagggctcagaagaagacaggaaaatgtgggaaagtttggaacctcctagagatttgttgaatggctttacccaaaatgctgatagcaatatggacaatgaaatccaggctgaggtggtcttggatggagatgaggcacttgttgggaactggagcaaaggtgactcttgctatgttttaacaaagagattggtgacattttgcccctgccctagagatttgtggaactttgaatttgagagagatgatttagggtatctggcagaggaaatttctaagcagcaaagcattcaagaggttatttgggttctgttaaaggcattcagttttataagggaagcagagcataaaagtttgaataatttgcagcctgacaatgtgatagaaaagaaaattccattttctgagtagaaattcaagcaggctgtggaaatttgcataagtaatcaggagccaaatgttgattctcaagacaatgggaaaaatgtctccagggcgtgtcagaggtcttcatggcagcccctcctataacaggactggaggcctaggagcaaaaagtggtttcaggggccaggcctagggtccctgtgctgtgtacagcctagggatttggtgccctgtgtcccagccactccagccatggccaaaaggggccaatgtagagcttgggccatggtttcagagggtgtaagccccaagccttggcagcttccacgtggtgttgagcctgccagtgcacagaagttgagaattggggtttgggaacctctgcctatatttcagaagatgtgtggaaatgcctggatgcccaggcaagagtttgctgcaggggtgggatactcacggagaacctctgctagggcaggatggaagggaaatgtggggccagaacccctatacggagtcctagtggagctgtgagaagagggccactatcctccagaccccagaatgatagacccacgacagcttgcaccatgcacctggaaaagccacagacactcaatgccagcccatgaaagcagccaggagggaggttgtaccctgcaaagccacaggggcagagctgcccaagaccatgggaacccacctcttgcatcagcgtgacctggatgtgagacatggagtttgagatcatttctggagctttaagatttgactgccccactggattttggacttgcatgggccctgtagccactttgttttggccaatttctcccatttggaatggtcggatttacccaatgtctgtatcccccttgtatttaggaaataactagcttgcttttgattttacaggctcataggcataagggacttgccttgtctcagatgagactttggaatgtggacttttgagttaatgctgaaacaagttaagactttgggggactgttgggaaggcatgattggttttgaaatgggaggacatgagatttgggaggggccaggggtggaatgatatggtttggctctgtgtccccaccagatctcatctggaactgtactcccataattctcatgtgtcatgkgagggacccggtggcagataattgaatcatgggggcagtttcctccatactgttctcgtggtagtgaataagtctcatgagatctgatggttttgtcaggggtttctccttttgcatcttcctcattctctctttgcctgctgccatccatgtaagatgggacttgctcctccttgccttccaccatgattgtgaggcttcgccagccatgtgtaactgtagtccaattaatcctctttcttttgtaaattgtccagtcttggggatgtctttatcagcagcatgaaaacggactaatacactcctcttgtaccccctaaccctcttttgcataattctagcctgactctgcccttgggtgggtaccagtcctgactcttcaggtctcagagggttgtttcctcacttcacccagggtttaaataggccttgtctcctgcttgtgtcataggcttctgctttggttgatattactttctttctttatcaatatggtttttaaagagaatgtatgaagggattttaaatttagatggccaccattattctatgaaaatctaaaaattcacatgttcttaggttcttattccactttaagaaaaacagcactagaaactatagataaaacattatagatatggtttatgaaataaagatgataggaacaacartcagtagccctgcatgcaaagactatgaagtgactatctatttttttttattattattatactttaagttctagggtacatgtgcacaatgtgcaggtttgttacatatgtatacatgtgccatgttggtgtcctgcacccattaacacatcatttacaataggtatttctcttaatgccatccctacccccaccccccaccccacaacaggccccagtgtgtgatgttccccgccccgtgtccaagtgtcctcattgttcaattcccacctatgagtgagaacatgcagtgtttggttttctgtccttgctatagtttgctcagagtgatggttttcagcttcatccatgtccctacaaaggacatgaactygtccttttttatggctgtacagtattccatggtgtatatgtgccatgttttcttaatccagtctatcattgatggacatgtgagttgattccaagtcttcgctattgtgaatagtgctgcaataaacatacgtgtgcatgtgtctttatagtagcatgatttataatcctttgggtatatacccagtaatgggatcactgggtcaaacgatttttctagttctagatccttgaggaatcgccacactgtcttccacaatggttgaactagtttacactcccaccagcaatgtaaaagccttcccatttctccacatcctctccagcacctgttgtttcctgactttttaatkatcgccattctaactaatgtgagatagtatctcattgtggttttgatttgcatttctctgatgaccagtgatgatgagcatttttttcatgcgtctgttggctgcataaatgtcttcttttgagaagtgtctgttcatatcctttgcccaccttttgatggggttacttgattttttcctataaatttgtttaagttctttgtagattctggatattagccctttgttacatgggtaaattgtaaaaattttctcccattctgtaggttgcctgttcactttgatggtagtttctttttgctgtgcagaagctctttagtttaattagatsccatttgtctattttggcttttgttgccattgcttttggtgttttagacgtgaagtccttgcccatgcctatgtcctgaatggtaatgcctaggtttttttcttctagggtttctatggttttaggtcaaacatttaagtctttaatccatcttgaattaatttttgtataaggtgtaaggaagggatccagtttcagctttctacatatggctagccagttttcccagcaccatgtattaaatagggaatactttccttatttcttgtttttgtcaggtttgtcaaagatcagaaggttgtatttctgagggctctgttctgttccattggtctatatctctgttttggtaccagtaccatgctgttttggttactgtagccttgtagtatagtttgaagtcaggtagcgtgatgcctccagctttgttcttttggcttaggattgtcttggcaacgcgggctttttttgcttccatctgaactttaaagtagttttttccaattctgtgaagaaagtcattggtagcttgatggggatggcactgaatgtataaattacctcgggcagtatggccattttcactatattgattcttcctatccatgagcatggaatgttctcccatttgtttgtgtcctcttttatttcgttgagcagtggtttgtagttctccttgaagaggtccttcmcatcccttgtaagttggattcctaggtattttattctctttgaagcaattgtgaatgggagttcagttgtgatttggttctctgtttgtctgttatttgtgtataggaatgcttgtgatttttgcacattgattttgtatcttgagacactttgttgaagttgcttatcagcttaaggagattttgggctgagatgatggggttttctagatatacaatcatgtcatgtgcaaacagggacaatttgacttcctcttttcctaattgaatgccctttatttctttctcttgcctgattgccctgaccagaatttccaacattatattgaataggagtggtgaaagagggcatccctgtcttgtgccagttttcaaagggaatgcttccagtttttgcccattcagtatgatattggctgtgggtttgtcatagatagctcttattgtttttagatatgtcccatcaatacctagtttcctgagagtttttagcatgaagcattgttgaattttgtcgaaggccttttgtgcatctattgagataatcatacagtttttgtgtttggttctgtttatatgatggattacgttcattgatttgcatatgttgaaccagccatgcatcccagggatgaagccaacttgatcttggtggataagctttttgatgtgctgctggattcggtttgccagtattttattgaggatttttgcatcgatgttcatcagggatattggtctaaaattctctttttttgttgtgtctctgccaggctttggtatcaggatgatgctggcctcataaaatgagttagggaggattccctctttttctgttgattggaatagtttcagaagcaatggtaccagctcctctttgtacctctggtagaattcggctgtgaatccgtctggtcctggactgtttttggttggtaggctattaatttattgcctcaatttcagagcctgttattggtctattcaggattcagcttcttcctggtttagtcttgggagggtgtgtgtgtcgaggaatttatccatttcttctagattttctagtttatttgcatagaggtgtttgtagtattctctgayggtagtttgtatttctgtgggattggtgctgatataccctttatcattttttattgtgtctatttgattcttctctcttttcttctttattagtcttgctagtggtctatcaattttgttgatcttttcagaaaaccagctcctggattcattgatttttttgaagggtttttgtgtctccatctccttcagttctgctctgctsttagttatttcttgccttctgctagcttttgaatgtgtttgctcttgcttctttagttcttttaattgtgatgttagggtgtcaagttttagatctttcctgctttctcttgtgggcatttagtgctatagatttccctctacacagtgctttaaatgtgtcccagaggttctggtatgttgtgtctttgytctcattggtttcaaagaacatctttatttctgccttcatttcattatttatgcagtagtccttcaggattaggttgttcagtttccatgtagtagtgcagttttgagtgagtttcttaatcctgagttctaatttaattgcactgtggtctgaaagacagtttgttataatttctgttctattacatttgctgaggagtgctttacttcaattcagcaagaagagctagctatcctaaatatatatgcacccaatacaggagcacccagattcataaagcaagtccttagagacctacaaagagacttagactcccacacaataataatgggagactttaacaccccactgtcaacattagacagatcaacgagacagaaagttaacaaagatatccaggacttgaactcagctctggaccaagcggacctaatagacatctacagaactctgcaccccaaatcaacagaatatacattcttctcagcaccacgttgcacttattccaaaattgacaacatagttggaagtatctatgtttttaagttcaaactaaatgtttaaggaatgctatattatttgattccctaatttcccaaccttttggataaaagggcttctatcctacactcacagtatggagtgttctgaggttgtttcagattgttttgttaggtggttccatgttccaggaagctacatctcatgcctgatctcttccatgttagtctgctgcttgctgtgggggtggacatagagaggaaagcagccagcattcggggtgagaggaggcacaatggtgcctctctaaggacagttcatggaagatcatcactcttttttttttgtttgtttagcatagcccctgagtcccatcattcgatggaggcaaagcaaatccatcttcttctactttctttgggatcatgttttgattcttatggcagaatccaagaatgtgttgttcgtctcttcagcattggcaytagtgaaaatccccttgggactttggcatatggtcttctctttagtttccaacgctgttgccagttttcatctttttgtaattcttcgtggatattaaaatggaaattggaagaaaggcatattagtccctgaagtttatcctgaattaacccagaagtcctaccaattattttttagtaatgaataggaaaagattatattaagggtatgattcagtgatttttgattacttttttctctagactacttraaaaacttaataaaccttcttaataacaatctatatgaaaaatatctttccatatataactctagacccagtgaattcaacttacatatttcctcactgaatttcatcaacattttctaatttccgtgcctatactcttaatttatggtaatatttgcatgttgaaatggcttttcaggaagcatgggatttacacaaaccaaatatcacctgccccccatacacacacacccttaacaaaggaaataagtcctgtaaggagtttcaccgggatagtggttaaaaatcggtactytttgattagatctggtttaaatcctgtctcctccattaattacttgtgcaatctttaagcattgatttccttgtgtaaaatgtaataatagttacatttgtctgtaacaaatgtaacaaataacaacctatcctgtagacacctatgtgaggatttagtgagagagtgtgtttgaaacatttagcaccatgcctggaacattgtaagaactcggtagctggtagtgaagatgataacaaggatgatggtgcttccaaagggttaacaggtcggacattaccctgtggatgtgttggtcaatgttttcattagtaactggggttattttttttcttcaaaatttcttctcagaaagtattgtcattgctatttctaaaaatttgatactgcctttcagggtgtgtcttttatgacagatggtcagcagttagtggtaaaagaagtatggaatgtaataccatttcatttatttatgggaaatgttttgttgccccacccttcaactaataggaaaatgaaaatcaaaaactggaaactatttataaatggacagtgctgtgatctcagtgtctgaaactgtagacttttagaaaatatttatagcatattggaaactggtcactggtcagtggctgtctccttgccctgtttttgtaaataaaaatactctagcaaatgtgaaatttggggtaaattcaaacagaatactgaaaatatcatcagagacaatgatatactactttataagttttcaagagaagagggtgaagaaaaatgtttaacttttattaatagaagcatttgcagttaatagagatatttgtttatggagccttaaaaataaaccaaatgaatggaaacaccatacattcaaggagacactgaggccatgtgtacatyttactgagcagagaatttagcatagaaggttagagatgggatttgggggtcagtctgcctgagctccaaacccagtcctgtcacctgctcaaccacatgattgtgtaagtcacttaaccatgccatgccaagcttgtctctacctcacagtgttgaaggttgaatgaaatgatacgtgtaaagtattttaaatggtgtgttgcacataaaaaatgttctatcagtgcaagctactgttatccaaactagcctagccaaaacaaatgaaamcccaaaataactagtttggttgttataggcatgggtaaaacttgccaacttcaccggtttagaggtaggtcttcatcactaagtggcaaatggcaaacaagatagttctgttattttctttacataggtctttgtctacttactgccatagccaataatatgtgctgggatgggggtaaacattgtacggtggcaatccttgaactgtcccatgggtgcctaccttaaagaagctaattagagagctctgctttgttcctataagcctggagcccaagtatttgctgtaataaaaacacccattaccttgattcaygtaaaaccaggacatttcatgaacttgtgtgattattgaaaacccrtttatcattaacaccgtcagtcattatttagagatttttatttcacaaataaaatcaacaatctgataaagacagtatwgctcatgcagctaaactatagcatctaccaaaaccaaaaaataaggaaaatacctagataacagattgcaatatgtattttttaatatacagtctataatgagtagactgtgtgacttgactatattgacactgatatttttccaaaaagagactctcatattggagagaacatcataaaatgtcttagaaattaaaattacatctaccccagtgtgtttcataaagggagcacttgccagcaagaagaataggtaggaatattaatgtttcattttatcttcatattattcttgtgtctgtgtcccagrttatagtctttgaggttatattatttccatgtctgcagaatctggatctatattttacaataaaagggcttttgttgcctcatgcaattctcataacaactctgtaagataggtacttttatctagattctgctgatgagaaaaacaacacccaagtttatatagccagtaatttctggagttgggatgcacaccctgaaaggctttgctcccaaagacaatgctatacttcttatgagagwgtgatgtcttcagaaattggtcaggaggaaagttcattttctgatgattgtatggaaatgaaactttggaactgtatgatgtcctggaatactatagtatttgtagcattacctaaaartgaatacatgcatatatgtgtgtgtgtgtagagagagacatagagaagatagaagctaacacatgattatagtatagcaataatcaaccccacaaccattttatggttctgatagggccactgtttattctgcaagatcacaagtgatcacaagagttgatattgctgaaactgtgttatgaacatacaacatacactttttctccaacccactttggtatacacacctttgtggaagaaattgtgtcattgtgataaagctttgtgttcaaggtactaatatccctatatggcatatattaagatattgattatagaaagttatcaacagatttcttaagatactttctgggaaaccaggacttgttttcaaggggaagccrttatcattatatatggacttcttacctaagtgtcctaaaagctagatacccatcttttgctctataggaacaaaatcaagaatttagaacatgtaatcacatatggtgacctctataacaaggccagagagcagtgattcttaatcttagatgtgggttaaaatcagattgcatttttgacaagggtgccaagatagttccattggaactattgaaaagactattggaaaaaatagtcytttcaaaaaaatagtgctgggataactggctacccacatgcagaagaatgaagttgaagaagcatgacatcagcaagatggtagactagaagaccctagtgctattctccctcaaaaagatagccagaacaatgaataaacaacttcattttaacaaaaataactgaggaggagcacagtggtgcacaagagaagtaacagataccctggtgagcacagaaacttgggatggccacataragaatgggaagaaatgccaggcctccattaccctaaccccaattggaagcagctgggaatgaactaggaggarcgtttccctactgcaaggaggtwaacaaaaggatcccagcagccccatcaacaccgtggatacctacagacctgagcactggggtcccctgcaatcctcacagrcactaagcctagctgagggagctgcctgaagtccacatgtccgtgcttcccccagagaaggagccaatactatgatccacaccctgtggcccacatagctaccatgctatgccatcttggagytggaactatggctggatgtgtcttgctctgkgggcaagtatgcatggctctcttttatccctgaggctaagccattgctgaactgccccagcccaatggcctgacatccccaagtcgagcaactgttttgtgctyccctgtggggccaagcagaggtggagctgctccacctcccaccaccctttcctcctcaggccagagctgaagcagtgtcctgattcctgggaaaacagtactttgactgctcagagaaatcatgcccctccaatgcctaagtcaaagcagcacgctgcatcctagggaaatggtgcctggtccacccagagcagtcatacctgttggactcaagccraaatgacacatcaccctctggggaatttgtaccctggctgagctgaatagctgcaaatcccagggctgtgctgacatggtatcctgtgtcccagggaaacagagcagtggctgagctgagacaccccatcctgcaggccaaacagctctagtgtccttccttcctggggctgtactagcctcctgaagtctgagctgctgagatacccttgactctggggagtggagtcattgctgtgctgcacattgtcttccagggcccaaataacagctgtgttctgccattctagggtacagcatatttctctgcagaaacctgacaagccaggagagaagtggatgatgtattcaaagtaccaaaagaaaaaaaaattgtcagctaagcatgcgatacccagcaaatctacccttcagaaatgagagagaaagaaagtctcccagacaagtaaaaactgagggaattcatcaccactagactggctttacaagaaacagtcaagggagtcctgtatctggaagaaaaaagatgataatcattctcatgaaaacacacacaagtgtaaaactcgctggtagagcagatgcacaaaggagaaagagaaacaagagaaaaccttgttactgcagaaaaccaccaaactgcaatgatctcaaatatctttcctgaccacaatgaaatcaataacaagaggaacttttgaaattttacaaacacatggaaatggaagttaaacacgttcctgaatggtcaatgggtcaataaagaaattaagaaggaaaatgttaaatgtcttgaaagaaatgaaaatagacatacagcatatcaaaaacctatggtatacagcaaaagaagtgttaagaggaaaatgtatagcaatagatgcctacatccaaaaagtagaaggatttccaatmagcaacgtagcaatgtatctcaagaaactagaaaagcaagaacaagccaaatccaaaattagtagaaggaaagaaataatgatgaaagcagaaataaacaaaattcacggagatctggcagccaagatggctgaataggaacagctccggtctacagctcccagcgtgagcgacacagaagacgggtgatttctgcatttccctctgaggtaccggattcatctcactagggagtgcaagacagtgggcacaggacagtgggtgcagcgcaccatgcgcaagcctaagcagggcgaggcattgcctcactcgggaagtgcaaggggtcarggagttccctttcctagtcaaagaaaggggtgacagacggcacctggaaaattgggtcactcccaccctaatactgcacttttccaatgggcttaaaaaacggcacactaggagattatatcccgcacctggctcagagggtcctatgcccacagagtttcgctgattgctagcacagcagtctgagatcaaactgcaaggcggcagcgaggctgggggaggggcacccaccattgcccaggcttgcttaggtaaacaaagcagccaggaagctcaaacttggtggagcccaccacagctcaaggaggcctgcctgcctctgtaggctccacctctgggggcagggcacagacaaacaaaaagacatcagtaacatctgcagacttaaatatccctgtctgacagctttgaagagagcagtggttctcccagcacgcagctggagatctgagaacgggcagactgcctcctcaagtgggtccctgatccctgaaccccgagcaacctaaccgggaggcaccccccagtaggggcagactgacacctcacacggccgggtaytcctctgagacaaaacttccagaggaatgatcagacagcagcattcatggttcacgaaaatccgctgttctgcagccaccgctgctgatacccaggcaaacagggtctggagtggacctctagcaaactccaacagacctgcagctgagggtcctgtctgttagaaggaaaactaacaaacagaaaggacatccacaccaaaaacccatctgtacatcaccatcatcaaagaccaaaagcagataaagccacaaagatggggaaaaaacagagcagaaaaactggaaactctaaaaacagagcgcctctcctcttccaaaggaacgcagttccacaccagcaacggaacaaagctggacggagaattactttgacgagttgagaaaagaaggcttcagactatcaaactactctgagctacaggaggaaattcaaaccaaaggcaaagaagttaaaaactttgaaaaaaatttagacgaatgtataactagaataaccaatacagagaagtgcttaaaggagctgatggagctgaaagccaaggctcgagaactacatgaagaatgcagaagcctcaggagctgatgcaatcaactggaagaaagggtatcagtgatggaagatgaaatgaatgaaatgaagcgagaagggaagtttagagaaaaaagaataaaaagaaacgaacaaagcctccaagaaatatgggactatgtgaaaagaccaaatctacgtctgattggtgtacctgaaagtgacggggagaatggaagcaagttggaaaacactctgcaggatattatccaggagaacttccccaatctagcaaggcaggccaacattcagattcaggaaatacagaaaatgccacaaagatactcctcgagaagagcaactccaagacacataattgtcagattcatcaaagttgaaatgaaggaaaaaatgttaagggcagccagagagaaaggtcgggttacccacaaagggaagcccatcagactaacagcagatctcttggcagaaactctacaagccacaggagagtgggggccaatattcaacattcttaaagaaaagaattttcaacccagaatttcatatccagccaaactaagcttcataagtgaaggagaaataaaatactatacagacaagcaaatgctgagagattttgtcaccaccaggcctgtcctaaaagagctcctgaagcactaaacatggaaaggaacaatcggtaccagccgctgcaaaatcatgccaaattgtaaagaccatcgagrctaggaagaaactgcatcaactaacgagcaaaataaccagctaatatcataatgacaagatcaaattcacacataacaatattaactttaaatgtaaatgggctaaatgctccaattaaaagacacagactggcaaattggataaagagtcaagacccattagtgtgctgtattcaggaaacccatctcatgtgcagagacacacaaaggctcaaaataaaaggatggaggaagatctaccaagcaaatggaaaacaaaraaaggcaggggttgcaatcctastctctgataaaacagactttaaaccaacaaagatcaaaagagacaaagaaggccattacataatggtaaagggatcaattcaacaagaagagctaactatcctaaatatatatgcaaccaatacaggagcacccagatgcataaagcaagtcctgagtgacctacaaagagacttagactcccacacaataataataggagactttaacaccccactatcaacattaaacagatcaatgagacagaaagttaacaaagatacccaggaattgaactcagctctgcaccaagcggacctaatagacatctacagacctctccaccccaartcaacagaatatacatttttttcagcaccacaccacacctattccaaaattgaccacatagttggaagtaaagcactcctcagcaaatgtaatagaacagaaattataacaaactgtctctcagaccacagtgcaatcaaactagaactcaggattcagaaactcactcaaaactgctcaactacatggaaactgaacaacctactcctgaatgactactgggtacwtaacgaaatgaaggcagaagtaaagatgttctttgaaaccagcgagaacaaagacacaacataccagaatctctgggacacattcaaagcagtgtgtagtgggaaatttatagcactgaatgcccacaagagaaagcaggaaagatccaaaattgacaccctaacatcacaattaaaacaactagaaaagcaagagcaaacacattcaaaagctagcagaaggcaagaaataactaagatcagagcagaactgaaggagatagaggcacaaaaaacccttcaaaaaattaatgaatccaggagctggttttttgaaargatcaacaaaattgatagaccgctagcaagactaacaaagaagaaaagagagaagaatcaaatagacgcaataaaaaatgataaaggggatatcaccactgataccacagaaatacaaactaccatcagagaatactacaaacacctctatgcaaataaactagaaaatctagaagaaacggataaattactggatacgtacaccctcccaagactraaccaggaagaagttgaatctctgaatagaccaataacaggctctgaaattgtgacaataatcaatagcttaccaaccaaaaagagtccaagaccagttggattcacaaccaaattctaccagaggtacaaggaggaactggtaccattccttctgaaactattccaatcaatagaaaaagagagaatcctccctaactcattttatgagtccagcatcatcctgataccaaagccaggcagagacacaaccaaaaaagagaattttagaccaatatccttgatgaacattgatgcaaaaatcctcaataaaatactggcaaaccaaatccagcagcacatcaaaaagcttatccaccatgatcaagtgggcttcatccctgggatgcaaggctggttcaatatacgcaaatcaataaatgtaatccagcatataaccagaaccaaagacaaaaaccacatgattatctcaatagatgcagaaaaggcctttgacaaaactcaacaacacttcatgctaaaaactctcaataaattaggtattgatgggacgtatctcaaaataataagagctatctatgacaaacccacagccaatatactgaatgggcaaaaactggaagcattccctttgaaaactggcacaagacagggatgccctctctcaccactcctattcaacatagtgttggaagttctggccagggcaattaggcaggagaaggaaataaagggcattcaattaggaaaagaggaagtcaaattgtccctgtttgcagatgacatgattgtatatctagaaaaccccatcgtctcagccccaaatctccttaagctgataagcaacttcagcaaagtctcaggatgcaaaatcaatgtacaaaaatcacaagcattcttatacaccaataacagacaaacagagagccaaatcatgagtgarctcccattcacaattgcttcaaagagaataaaatacctaggaatccaacttacaagggatgtgaaggacctcttcaaggagaactacaaaccactgctcaakgaaataaaagaggatacaaacaaatggaagaacattccatgctcatggacaggaagaatcaatattgtgaaaatggccatactgcccaaggtaatttatagattcaatgccatccccatcaagctaccaatgactttcttcacagaattggaaaaaactaaagttcatatggaaccaaaaaararcccacattgccaagtcaatcctaagccaaaagaacaaagctggaggcatcacgctacctgacttcaaactatactacaaggctacagtaaccaaaacagcatggtactggtaccaaaacagagatatagatcaatggaacagaacagagccctcagaaataatgccgcttacctacaactatctgatctttgacaaacctgagaaaaacaagcaatggggaaaggattccccatttaataaatggtgctgggaaaactggctagccatatgtagaaagctgaaactggatcccttccttacaccttatacaaaaattaattcaagatggattaaagacttaaacgttagacctaaaaccataaaaacccgagaagaaaacctaggcattaccattcaggacataggcatgggcaaggacttcatgtctaaaacaccaaaagcaatggcaacaaaaaccaaaactgacaaatgggatctaattaaactaaagagcttctgcacagcaaaagaaactaccatcaaagtgaacaggcaaccttcagaatgggagaaaatttttgcaatctactcatctgacaaagggctaatatccagaatctacaatgaactcaaacaaatttacgagaaaaaacaaacaacgccatcaacaagtgggcaaaggataggaacagacgcttctcaaaagaagacatttatgcagccaaaagacacgtgaaaaaatgctcatcattactggccatcagagaaatgcaaatcaaaaccacaatgagataccgtctcacaccagttagaatggcaatcattaaaaagtcaggaaacaacaggtgctagagaggatgtggagaaatagaaatacttttgcactgttggtgggactgtaaactagttcaaccattgtggaagtcagtgtgatgattcctcagggatctagaactagactagaaataccatttgacccagccatcccattacggggtatatacccaaaggactataaatcatgctgctataaagacacatgcacacgtatgtttattgcrgcactattcacaatagcaaagacttggaaccaacccaaacgtccaacaatgatagactggattaagaaaatgtggcacatatacaccatggaatactatgcagccataaaaaatgatgagttcatgtcctttgtacggacatggatgaaattggaaaycatcattctcagtaaactatcgcaaggacaaaaaaccaaacaccgcatgttctcactcataggtgggaattgaacaatgagaacwcatggacacaggaaggggaacatcacactctggggagtgttgtggggtggggggaggggggaggatagcattaggagatatacctaatgctaaatgacgagttaatgggtgcagcacaacagcatggcacatgtatacatatgtaactaacctgcacattgtgcacatgtaccctaaaacttaaagtataataataataaaataataataataataaaataaaaaaaytcacgctaaaaaataatacaaaagatcgatgaaattaaaagttggtttttgaaacgattaacaaaactgacaaataattagctagatgaatcaagaatgtaaatggtccamataaaatcaccaacaaaaaaggagacattgcaactgataccatagaaatacaagtgatcatgagagactattatgaacaactatatgccaacaaattagaaaatctagtggaaatggataaattcatgtatacatgcaatgtgccatgattgaaccaagaagaaatagaaaacctgaatagaccaattataagtaatgagattgaatcttgtaataaaaagtctcccattgaagagaagcccaggacctgatgacytcattgcagaattctacaaaacatttaaagaactaataaaaattcttctcaaactcttccagaaaattgaagaggagggaattcttctaaacttattccacaagaccagcattatgttgataccaaaactagacagagatacaacaagaaaagaaaactttaggccagtatccccaatgaacatagacacacaaagcctcaacaaaatgctagcaaactgaatccagcaacacattaaaaagatcgttcacagccaggtgtggtgtctcatgcctgtaatctcagggctttgggaggccaaggcaggaggatcacttgaacctaggagttcaagaccagcctgggcarcagwgggagatcccatttctgcaaaaaatttaaaaattagccaggcatggtggcatgctcctatagcccaggtactagggaggctgaggtgggaggattgcttgagtctgggagattgagactgcaatgagccatgatcaagccactgtactccagtctgggcaacaaaatgagaccccatctcaaaaaataaaaataaakttaaaagatcattcaccattatcaagtgggatttatcccaaagttgcaagaatggttcaacrtatacaaatccataaacatgacacattacatcaacagaatgaagtataaaaaccacatgaccatctcaatagatacataaaaaggatttgatacaattcaacatcgcttcataatcaaaacastcaactaattagttatagaaggaccacagctcaacacrataaaggccatatatcataagcccatagcaaacatygcactgaatgggaaaaagttgacagcctttcccctaacatctgaaacaagacaacgatgctcacttttaccacttttgttcaacagagtaatggaagtcctagccagagcartcaggcaatagaaagaaataaaggacctccaaaatggaaaggaggatgtcaaattgtccctatttgcagatgatatcatcatatatacagaaaaccctaaaagctctaccaaaaaactcttacaactgataaacaaattcagtaaagttgcaggatacagaatcaacatacagaaatcagtagcatttctatatgccagcaacaagctagcagaagagaacacacaaaaaatgaaaagatatctcatattcatagatttgaagaataaatattgtgaaaatgatcttactaccaaaagcaatctrcagagtcartgcaatccctatctaaataccaataacattctcaacagaaattaaaaaatcctaaaatttacatgcacccacaaaagaccctatagccaaagcaatcctgaatgaaaagaacaaagttggaggcatcacactgccaggtttcaaaagatactataaaggtatagtaaccaatacagcatgttacttgtgtaaaatacagattcatataccaatggaacaaaatagagaacctagaaataaattcgtgtatgtatagcctamtgatccttgacaaaggcaccaagaacatttattgaggaagagacagtcttttcaataaatggtgctgggaaaattggatatccacatgcataaaaatgaaaccaaacctgtrtctctcaccatatataaaaatcaactcaaaatgggttaatgacttaaatataagacctgaagctatgaaactcctgaaagaaaacataggagaaatgcttcagaacattggtctgggcaaagattttatggagaagacctcaaaggcacaggcaacaaaagcaaaaatagacaaatgggattatatcaagctaaaatctcctgcacagcaaaggaaacaatcaacagagcaaatagacagcctgcataatgggagaaaatatttgctaactcttcattcaacaaaggattaatatccagaatatataaggaactgaaacaattcaacagaaaaaccccccaaataatccagtttaaaatgggtaaatgagctgaatagacacctctcaaaataagaaatacaaatggctagtagatttatttttaaaaatgctcaacatcactaatcatgagagaatgcaaatttaaaaccacgatgagatatgatctcaacccggttagaatggccattatcaaaaagttaaaaaataacagatcctggcgaggttgtagagaaaggggtactcttatccaccactggtgagaatgcaaattagtctagccattgtggaaaacaatatgaaggctcctcaaaaaactaaaaatagaactaccatatgatccagcaatcccgctactgggtatatatgcaaaggaaatgaaatcagtatatcaaggagatatgtgcactcccatatttattgcagtactattcacaatacccaakatatagaatcaacttaagggtccatcagtgggtgaatgaagaaaatatggtatatatacacaatggaatactctttagccataaaacaaaatgaaatcctgtcattcacagtaacatggatgaaactgaaggtcactatgttaagtgaaataagccaggcacagaaagataaataccacatgttctcatacatggaagctaaaaaacgttgatctcatagaagcaaagagtagagtagtgtttttcctgaggggtgggaagggtaggggagaggagaatagccaaaggttrgttaatggatataaaagtacaattaaataggaggaataaggtctagtgctctatagcactatagggtgactatcattaacaacaatttattgtatatttttgaaaagttacaagagtgaattttgaatgttcccaacacagagaaatgataaatatttgaggtgatggttatgctaattacactgacttatcattacacattgtacacatatattgaaatatactctagcccataaatatgtatatttatatgtcaattaaacataataaaaaaagaagataatgaagttggatctctacctcacagcatacacaaaaattaacttaaaatggatcatagacctaaatgtaagaattaaaactataaaactcttagaagaaaactcaggagtaaagctttgtgatcttgggtcagacagtagtttcttagataaaagcaacacargagaaaatacataagtcgaactacatcaaaatgcaaacttttattctcaaaatgatattctcaaggaagtgaaaaatcaacccacagaataggagaaaatattagcaaatcatgtatcagataagggacttgcaaatagaatatataaagaattcatgcaactcaatcataaaaagacaagtagccccattaaaatacgagcaaatgatctgaatagacatttctccaaagaggatatataaatggccaatacatacatgaaaagatgctcatcattaattattaggaaaatgcaaatcaaatcgcaatgagatatcactttacaccaactagaatggctacattcaaaaagacacattaataagtgttgtcaaagatgtggagaaattgaagcacttattcctggtgagagtgtgaaatggcgtagctgctttggaaaattgttcggcaagtcctcaaaatgttgtagagttaccatatgacctggcaattccactcctagttatagacccaagagatatgaaaacgaatgcccacacaaaaaattgtacatgaatgttcatagtaggattattcataatagccaaatattgaaaacaatcaaaatactaaccaagtaaatggataaagaaaatgtgatatcttcaagcaatgggatattatttagccatataaaggaatgaaatatttgatgcatgctaccacattgatgatccttgaaaacattatgctaagtgaaagaagccagccacaaaaggctaagtattgtgtggttccagttatatgaaatgtccagaataggcaaatctgtagagacagattaacaatcggctagggctggggaggggagtgaagtagaaaatgaagaatgactgctaatgggtacagtatttcttttgggaggataaaaatgttctaaaattagactgttgatgattgtgcaaccatgtgaatataccaaaaacatttaactgtgcagtttaaatgggtgattgtatggttttaaaattatacttcaataaagctaagtttgggtgcttttataaatctttatgcccaggctgaaactcagaactcagtctcctgggattgaacccatgcatcagtattttttaagagttcttcaggtgattgtattgtgcagccaaggttgagaatcattatgtttgaatcagccctaatccaaataagattttaatttaagagactccaaaagagttgagatcccatgtggaaggactccgggaggcttcctcaaaccatgatacctcaagtgtggttctgagaccagcagcatcaatgtcacctgggaaactgttagaaatgcagattattgggccccattcagttcaagtacatcaggatccacagtttaacaagctccccagatgattcatatgtacattaaggtttgggaagcactgcttaggagcagcggttcccatgcttggctgcacattggaatcatctggagagtccaaaagtaccaatgcttgggttccaccgccagtgatcttacgggtatgagatgcagcctgtgcatctgggatttaaaagcttcccaggtaattctaatgtacagcaaagtttgagaatgagtactgcaaaaaacaagatacctaatggcaaataagatggttaataaaattttcttattttgtttttaacagaaggatagakgaacatgcataagaaagtggagattattgatatcaaaaatttccagaggagtgaggaagggatggcagtgagacaacaatggaaaacgttttctctaaaaaaaaaaaaaagggaaaaaaamaaaaacaaaaacagaaaactcaccacacaccaggcattttccttctaaatccaagagagggatctttcatgtgattattggagactactcaaatttaagtggccaagaatttgtgggttcttaagagggtctttaatgctgaaaacatatgggtatttactgaacttccctttctttgaatttataaagagaaagtttattaatatggtggtgaacatttcttcccaagctgtgtacccatgtccagcttcttcggtctggggaaattttaactcctcagtagacagtgggccctgcgcagggtctggggcatgctcttcctatatatggcattcagccctgaggattctcctccccagcaatcggccatgtctctctaatgaccattgtctctgccrtttactggtcttttcaaaattatgactctgaaatatctcctaggcaaaattatgaggcttgcagagttagctttgagacttctcatcacccaccccttcccctccttccgacaagctccgtttctgtcccatgcccccagattgtcttctccaggtgacttgaacccaccttcttggttgcagtatcagtacactgtacccttgtctgcactgaaattaaccatgcagtttctgtgccttcttaagttgatgtgtgtgtgtgtgtgtgtgtggtggtggagggtataattacttgaatctgtgttaataaagtgttaactattaacggaaatccacaatccctctctacctccccctcaggaagtccctaatggtgtttggtcattgtttcaatcacttgtcatatattgtgttttcttggcccatatctctaaccacatccttatcaaaatattctgatgagtgcattttaaaagtagaatgacaacatacttaagatagttggaggggttggctcctatttgcatcatgatgattctgcctatgaagatttttcctaacaatcaactaggattatacacaacgcttggtttcaaaaaatcatctcatcgtattaaatttacttattttaaaatacctgtgactcttctgaataatgaaaaaaatgacatgaatgaagagtatgtatataaactctctctaaagttattaggaaaatgtttttatttaattgtgcctaatattttggggtattacagtgaactctacttttaaagctgcgtagttatgtattaatatactggccctgaaatttttgagttttcaacctatagtccagaaaaagcctttatttttaatagttgccctaaaaatttaacacaaaagttttacttagctaaatctaaatttaatcagtagctttaccccacttccaaacaatataaatactttaaaatgctttcatttgatttcctttccttgcttgctattattttccaggattttaactctgtttgcttggttttatttgtttgtttgttttaagacagagtctcactttgtcatctaggctggagtgcagtggtgtgatcatagctcactacagccttgaactcctgggctcaagggatcctcttgcctcagcctcctgtgttgctgggactacaggcatgcaccaccatgctcaaattattattwttattattakagtagtagtagtagtagtagtagtagtagtagtagtagtagtagtacagaccaggtctcagtatgttgcctaagcttgtctcaaactcctggctggcctcaagggatcctcccatctcagcctcccaaagtgctgggattataggcgtgagccattgtacctggcatacttgtttggttttaagcccacaaattagacatcatcatcattctatttagattttctcatatttaccattttctttacrtatcatttctacttccattcagagcttctgggatcaaaccgtagttcctggcattttggactggttgatagtctccaggatattcaggcagttaagtgtctccgaaagaaaatgagaaaagaaaggtcctgggaaatatgccccacccccacccctgcagtgctgccrctgctgtcccaggaccgtgggcacccctgaatgtttctcttccactgtctctgatcactgtgatttatggagtagagggggacaatgacatctgatagaataccaaagttaaatatgctcartttaaggarctgttatttattcagagatcstgtctttcctaccttttttgctgtttattttataaaataatggtgatggtagttgaagtttgttattttgttttgttttaaattaattcattaagatttgtttttatatttccttacttggcaaatacaaagttgtgaatcacaacccagattttttgaaattgtaytgggcattgaaatcccaaaccactgctatcaacagctaactgtgagtttggcgtgtggacactgggacacctgaaaccatgtcttggttacgtcrggagccttattgattatttatattatgtatgaatcctgtggtgttaacastactttgcaacctttagtacttagctgaactgtattagattatcagggagtcctcagtacaccctcaatgatttaaattgtttttagctacttctgtaaggctgagtctacactagcaaaatgacctgggtgcctattgtgctccctacatacatctggtgatgtttatgctcccaatttcttaagaacactgctttgagagtcacacaacccaatattctaccrataacttactatgtaccttcatcatttgtaagaagagggggttgaactaagcgatctccaagtcacttttcagcacaaatgtaggttgtgattgtatttgtgtgtacacattttttaaagccttaaagagatctaggtatttctcatgtatttatattaaatctaagatccgtgttgcaaatttggacatggaggacattaatttttctgatgtaggttactctttaagaggcatgttgcatctgtaatattggtgccaccattttggcagatgcagtttcttcatttactcgtaagtgttcagtatgaagtctatatgaggtgacttgagttctcatttctctggtgtaaaaaatggtcatgtttaaataaggccacaatatttatttcaaagggtcccagaatcattttttaaaatatcttcatatgcttgacactgaagttcttatgtaaagggttcggtcaatgtaaacaaacgatgactgcttgaagatgcaccagccgtgattgtggagacctccaaattcatgacagagttgttaactggcaggtttgttatttcctataagtacaaggaagggaagtattaaaataattcatgcccattagagagaggaaattmacattcccttaaaaattgttttccagtgaaggaarcccatcccccagaattgagctgctgcataatattgacccraacttcgtggactcttcaccgtgtgagtaccagtgcattgctactagattaaatctaattggcccaccaagatggtttgattacctagtgtgtctctagcctagctttctcttttttcctgagttgctataaaggtaaacagttcttcgggacatatctcccgctcatctcagagggcagtgtgctgtgaaagcaacaccagcttatgaaataagaaaggtgaattctattcttgctctgccgcttactagcctttaagccattgaactctccctgccccagccttccccatttacaaaagaagaactcatggcatctctgaggctccttctcactgtagatgtcatgttgctgccctgttcttacctgagagctccagagccaccttccagaaaactcacagtcagataagccacagttgggttccaggtagtgtgagcaaccacattatctgattgggctggtcaggtactgcccaacacctgctgggtgtcacaagtgtgactttcctagcagtcctggaagtgattccrcttgattctgcctcctgcctaaattaacctgtaaagagccttaccatttccttcagggcaggcatgcatgtagtgcttccagatcacaacggactgtaataggcctgtataaataccatgcgagtggccctaatgccctcagcatagtgagtttgggcatagaaagccttagcaattagaccctttgcccagctttcatcataatgctcatcttgcaaacagtgcccttatattcccttattcacatgggggctcccatccgctcctttctggacatactgctgcccacttagttcaggctctccttacttctttgttttttccaaactgcattatagctcaccacaaaatattctcattcagagattcctgctcagagaattaccccacagtcattctaaatgtgtcaccaggcactcgggccccacttgcccggcyagcctcactccaggcactccttgtcatgttctcacttcctagacacttgtcatctccatgcagatcatcgtactgtcatgaatatgcttttccctatgcctgaaacacattttccctacctgtctataatctctctcatcccttaaaaacccagccccatgtctccctctgtgaatgctttccagagccccagaaggagcagtcactccttcctgtgtgcatgtgtctccgtatagcatccctcacatgttcgtgtttgtgcctgcatttccaagctgagagctcctggaagtcagcatctcctgtatttttttatccttgtcagttaacacaaatactgggagcttgctaggcactcagtaatgattacttgatgactcagtggacaattggagagttgagatgcaataaagaccaagtggacacattaagacctggacaggaaagggccctgagacaggcgagaatggctacatcgtggagaaatttctatttcttttggagtaaacgcatgtcagtgagagaggyaagggcaaggtttgagccctaaggactgtaagaacagtctagatttgtgctgtccagtatagtagccacaggccacatgtggctgtcaggtacttaaaatatggctaactgtggattgagatgtgctgtgagtagaatatatacatccgattttcaagacttagtacacctatgtattatatgcatacaatattatagatttattatttgttgaaaggataatactttggatatattgaattaaatatattgttagtgttttacttctctcctcttcctttcttaatgtggctaatagaaaatttaattttaattaacttacataagtgacttgcattatatttctattggcctaaaaaccccttctagaaggtgctaggaagtaagttgatcagctgagctgatcacagagctgtgaatagttactgtgaggctacatcaatgactcctaaacttttctctaccccagtacacctaagagatacatttcagtcatatcaaagtctctaagggtggctggaagagaatagtggggaggcaggaayggctttaaaactttctgagtaatttaatgcactgcaaagcccagtataacctaggtctaggggatatgtggaatatgccacccacattataatggttgtaaatgtcttcacctgctaaattccacctacaaatgaaaaaccttaagacccctcactcactaagctgtattttggtttggcatttgaagtaggagcttgagaactatactcctatgtgatatggttgggatttgtgtcccacccaagtgtcatgtcgaattgtaatcccccatgctggaggaggggcccggcgggaggtgactggatcataggcatggattcccccttgctgttcttgtgatagtgagtgagttctcatgagatctggttgtttgaaagtgtgtggcacctcccccttcgctctcttcctcctgctccagccatgtaggacatacctgcctcctcttcaccttctgtcatgattgtaagttcctgaggcctccccagccatgattcctgtacagcctgtggaaccctgaaccaattaaacctctcttrtttatacctagtctcaggtagttctttataacaatgcaaggacggacgaatacactatcaccacagcactgtgtgctgcagggttcttggtgcaacttgctgtgctttctcctgtcttacctaaagggccctagcaaaataacagcacaggcaaaaggtttctccagagtaaaagttggtaagagcatggaaattagaatagaaaattttcctaatcttgccacccatagactgtaaggacatttacttctcttggactcagtttcctatgtattatgtggtagaattataagacccagtactgccgccacaaatttaggcatcctctttggccttctgctgctcttccttccctctctggagcccacccaggccttcatgttggcttccccaccagcttgggactcytgctctgactcctgcagataacgaaggacattgtcagctcttgcaaggatgtagaaccacattcactgttgcttcacacacacacagcgttctctgctgtctgtgcctgcaggtagcaaggtgccacccacctcctcacacatggcaatcccatgggccttttctgcccagtttttatattcacttcactctactgagaggcagaagaagaaacaagaagagctgtctttgggtgcctgctcatttttaggatgatgatacaagcccgtttccttttctatgcaattcatttatgaggaaaaattaaatccagctataaaaaaacatgtacttaggggacagccaagtctggatatcatattcatagagcacagaggcttttgtggagttaaatcagaagtagccaatctcgggtgtaaactgagggttaacaatggagtcagtgttatcacagaagcatttctgtggtttctcactccagctcttcccagatcgttggtgcttactgcgggagaagaaggtagcgttccacctccaccttccctaaagccacttcrtcagtttcctcacctgtggagtaaagaaggaattaaatgatctccaaggtccctctggcttcagtgttctgtgggtctctatatgaatgggacctcaaaggagcaaakctgcttactctgcttctctcctttttctgcctgctagaaggagtgtgtccattgataagcagtgatgttgccaaaggcatgatcataaatagataaacacaagtgcaaatgctagaaacattatatgcactagaggaatttgaattattttatgagtttcttattactatatcctggccacctttctgatttccgttccgaaacatcaccrtatcgatccgcttttctatctcctctttcccttagtgggtcatcctggggtttgttgaccaatgtctcctctgattgtgaatcatacgaataggcattacgcacttcccaggagatttctgccctctgcctagcaccacatgctcccagaagctggcctcttggatttcagcagctacacctcccccgctccctgccaacacacaccccattcccctagtcaaattatagggtgcccagaggcccatcctgctggtggagtcaggatttttttcatggtcacatgcacatggtaggttgtggcttggatactaacagtaaaaatactcaaagatcggcacaaaatattgatacacgtacacattcayagagaaacatgcacacacaccaggggtcaccaaatctctcatagatcaggagattcaccattctgcagtaaagcataaagtctcaaggatgcatacrtaaattataccattaggatgactacaatttaaaaaatgaaagaaagaaaaggagagagagtggaaaaaggaaggaagggagggagggagggaggggaaaataagaattgttgaggatgtagagaaattggaacccttrttcactgttaatgggaaagtaaaataatgtagcctctatggacaataacattgtgtgattactcaaaatattaaaaatagaattatcataggatccagcaatcccacttctgagtatrtacstaaaagaattaaaagcaggggcttgaacaggtrtttgtacactcatgtttgtagcagcattactcagcattactcagaacagccaaaaggtagtagcaacccaaatgtccatcagtgaatggatgaataaacaaaatgtggcatwtatatatatatatatatatatatatatatatatayayacacatatatataccatgaaatagtatccagcactaacagtgaaagaaattctaatacatgctacaacatggatgaaccttaaagacattatgctaagcaagtcacaaaaggaaaaactatatgactccacttacatgaggtacctaaagtggtcagattcatagggacagaaaatagaatggtggttgcctgaggttgtggggaggggagaatggggcatgattgttgagtgggtgtagagatggatggtgatgatgacagcataacaacgtgaatgtatttaatgccactggaccatacaattaaaartggttargatagtaaattttatgttgtttgtattttaccacaatttaaaaatataaaaaataaataaaacrtaactttccctccttccaaaactgaagagaaactgcatgagaatagggtctctatctttttcatttactgccatatgcacagtaaggtctccgtagcacagaacctaacatcrtagtaagttgttgggttaatatcagtaaatatctgctaatgaatgataaacagatcaacctgtcaaagtcattgttttattgtcttacagcctttcctgagcctaaaagtacctccagatggccacttayactccttttaaaccccaaacctaccttttgtgcytaagtaaaaataacttagaagctacaagtcacttattaagttgtaattgacattatatacagatgtttgaaactgttcattcagcttctaagtgcccaccctcatcgctccctgcattgaaaagatcggccagaaaagatgatgtgggatttccctgcccaacttcatcccttttcccagacctcctcaatagacaaatagagatttataaagcctttgcctctggcctggctcggcctgacttccctctgagtctggggctctgcctcttcttgctgttctgagttcggttctgctcctgttttctgggatgttccctctggttgtttcatcattcactggttatctcagtgccccaaccctagctctgcttttatccccttcctccctccmctgcctcccagcttcatgacctgtgtcagagtgtgggatgtaattgctttcctgtgtgctttgaggagactttttattcatttttgaaggctttgttctgaagtaaccttggaagtgctttggtctctgttcagatagtacccttctcttttcctttgttcccttctgagaaaactcctaagaattatttattcctccatgtctttaaaatacttctgtcttcgtccagcagcacagggtggtcagtgtaagaaacccgtgagagagcctggggaatagcaccattgaagctgattagtgggaaagcctggaaacctctaaagtggtgrggaacagccataatcccagggtaggcaagaggtcctgcaggtctgaattcagctctacatggttccaaggagagctccagccccaaattccacactcctgcaaggccccagcaagcatggctcagaccacaaggagaactgcttcaaaggcattattttgcctgaggaaaaacawatacacctatcctgcaggtgccgggcttgatcttggctgttctgcagtaatgatcctgccccatctgagaccacractcactttggaagtcagacgtggcattctatgatggctggaacacacatatccgatcatgtaacataggtgtatatatttaaaacgtacgcacacacaggagacacacacattctgctggtagaagcttgattatagatgaagggcagtgacagatgttagcattttccaccccaccaaaggccagctcttcaaagtgattccatacagctttgttactatttcakttaaaggccctcttctctttaaagtttctaatgagatgttatttctgctcctgattatagggtgaaagaacagccttcttcccaccctctcctctctcacacacacattttctgtggtgcaattgccaaatccatgcttgagatccaagartcgtccaggttggaatgcttggagctgctccctgtttcctcctcagagcgacattcagagccatttcccagtattatgttgccatttccaagattgtttattcagtaaataaataaacgatgatggcctgggatgcatgagrtactgttataaatactcgagatcagttaagctaaagccaaacctaaaggtctggctaaaacccagtctggaagagtctggaagagggcatggacacagcctctccccaccctgctggaaggctgttggtggttcccagctgtccactagcaagccctcctacaacgcccaccattcrgcaccattgcaatgccctccttcagtcctgtttatctcccttgttgccctgcgccttctgtagagttcagtgcacattcctactcctccgtgaagccctctctgattcttttgaacttgagtcccttgagtttctctggagcttcccaggacggtgagctcttgctgcctcatagtgcagtatttatattcacgtgttttccccatccggagctataaggagagcaaggcttcattgtatagttctctcggtgtcttatgtataagagattaatacatattgaaagaatgcaygctaataaatgaataatttatcatcagctgattcgattagaatcagtctaatgagaacaatagtaatttcatacatcattttcaaggcatttttatttctttttgggtctattagagaagtagtgacacagaggcatctttctttcagcctgaaattagatattaagcagaatcaagagttagggggaatgcatggggctcaccctgctacagattgctcagcattgcatagaatgccagaggctaagggccccttggcagtttgttcactctttataatccaagtgaagaaactgaggcaccaggtcatgcatgctgttaaatatcagagctggaactcagggctgttcagacccggcatgtacatcatgtcctactgatttcgcaggtctcatcgctttgtgtcctacccttgtcttgtgggagaagggcacccagatatgagttacgatcatctcacctatataatagcatgttgatgggacatgactcatttaaaggaggctggaaaaatgggtcgagtagtcacattagccttgctagattcacatgtaatctgactctgcagatggtggtagcttctgcttgtagagctagtcatggaagccctgtcagtgccttgtattcactccactggagggtgctggggggatgagggagctgtgtgtggggtgggcagtgtcacctagtaaaacaggtagagtttgggggtgccagaaagccctgggttttattcaataccagctctgacttatttcctgtgagcttgtgggtaagttcttccagccatctgtttcatcacctatacgttgggaacgattataacaatatctcctgtaaatatgtccaaacaacagtgaacaacaattacattctggctgctacgattggggcagggtgggaaagttgcacttttcactttatgtatttctctagttttaattttaaattatgagcacatrtgacttccttaatcaggaataaagccataaagctttatttgtgaaaaccacctccaaggagggttccggtaagcatggaatatctgaaatctgctgggttcttatagagtgggagttgctgcttccgtgcctgcctgtactaggtcagagcagttagaattttgtgtcgtctctagttgccaatatttgtctttagcagctcgtcaaattttccttggtgtgggttgctacatgccctcaatcacagagccaaaacacagatagctttctcctttttaattttcaaaggcttctagtctgccccctccgctttggggagcactaaagtctgtttggaaatgtggcctttttgatgccaaaggcagtcccacaagcctcgtatcccctccaccccacttcacacagcacatctcaaggagcacgcatgaaaccttcactgttaacacttggtgctggcatcctggctttcatcccgagaaaatacacaaaccaaaccaaatccacagcactttaaaaacactaattaactctcaccactggcctaggctacgcagaaatggcaaatcccgctgccccaattttatgtttggagaaatcagggtaagcaacattttctagggcttctctgagccagatcacagaagctgacctgaaggacttggcctggccctgcatctggagttaggccatttgatgaagggccagctgcctcaccagatcccttctctacagcaccacgtggttagtggcccataactccatttgtacatcagcgtttgtttttttttccccagggttactttgatgccaaactgtctcatgtccaactgaccatttatttatttgcttacttttctttaattctggtacagcctagaaattttagccatagcttccaagtgtagcctgttaattatagttgattaaaggttctatgctgattttgaatttcaacacaaaagcagactaacttccaaacagtccctctcaggtccagtggctccgccccttccgtcttccaccctggagcctccccaggtctggtaaagatttggtggtgtccagactccttttttcctctcccagtctggaccagtcattctcctacctcagttccccagtcttaccatctgtaaagataaatatatccatctttcttgaaagmgtctaccataaaattctgtaaaaacataaaacctcataaaattttagggaacatatccaatgaaattaaaatttacaaagtaaatctattttgtaaatatttattgatcttgtcagaatttttaggggttttagggtgcttgtgtataaggctgaaataaaacttttgaaaacatttctgggacgttgttgaaaacagactaaacggcctgtttagtaacccataatgtaagatgttagtaatcaggcatttatagactgaagtctgttacctctggcagaaaatacctagggaatgagtatatggcccctgcttctaaagattcttttgaatcagaggaaaacatatgcccaggaaaggatattaacacagttataaaataaagtagaacaaatgataagtgatataatataagcagtaaggacaaatgaagaagtgacagcatttgggagtgattaggaaaggtgttctcaaaaaggatatctttaaatttgtccattacttcaacaactttagttttatctttcttgattttaatgtgaatgaaggaaaagaatatttaacactattagttttctatcactgatcaaacaaattaccataaactcaatggcttaaaacaaccaatacttaaccatcactctattttcrtattttttgaatgttttcagttctgtaggtcagaagtctgacatgggtctcactggactaaatccagggtaccgattggcagggctgcagtcccttccaaaggctgaggggacatcccatttccttgccttttcctgcttctagaggctgcctacattccttggcccatggcctccttcctccatcttcaaagccagcaatggaaggttgggtccttttctagcacattckttgaacctggcttccatcatctcatcttgtctgacctgttctgcctccttcttcaacttttctggactcttgtgataacattgggcccacctggataaataatctagaatcacctccctatttgaaagtcagctgattagcaatcttaattccatctgcagcctgaatgcccctttgccgtgtaacctaacatattcacaggtcctggggattgggacgtggatatctttagggggccattattctgctaccacaaatacctgctgtgttgccctagacttcatgaaaaatacaacaagtcgcttataacctagttggagagaacaagaacatacaaaaagttaaaagaaaatcagataacagttgaaagctatggtggtagagacgttacaagttgtacttaattgtcagatcatttccatggagtctgatagttgctatgagagtgaaggagggctaaaacactcaggccctctttcacctccactgaacctcaaagagttcctaggtggaaaagaccatcaaaggaaatagaaaaggctgtgagcaaaaggtgtgtgagcctatttgggggacaaaggggaggcatgaaagaagagatgggaaagctaaacaaggacaatatgtcacactaaggagatgggatttcatcctgtatgcagcagggaagctccttttgtacaaataatagatgggggggtggtgcaagaaatttttaaaaatacagaaaagctcaaaatttttaaaaatacacacaaaaaaaatcaccctaarcctattattctgctacccagaaataagcattgttaatattttggtgggctttttctatttctatttagggagagctttcaacatttcaccgttcagtatgatatcgattgcagatttttttwatactctttatcagtgtaagaaaactccctcctattcttagtttgtagaatttttaaaacagctattgctgttgtccacaggaaagtccctttgtgtctgcactattttaatcccaaaataaagaaaaatctgctaattccacaggtggttatatagatgctggggtttcagcacttcctgtttgaccggaaactctcagtgaagtaaaaaaaaaaaaaaatcagaaattgtggaagtttatttgtagagactcttgttttgccgttaggactgtgggtcccagaattctttggaatgacagccctagtcaaagtctagccatttctctcccaattatccaaacaaaggctggtttaggcactgcctgaaaggacttgatagatgtaatccaagtcccatatccttaagtgcctcaaccaagrggaagtcctgggtgggcctgattcagtcatatgagtaaaatataaattttcctttgtaggctggtttttactaaaaatgatattgctggattatccttggaatccatctcagcaaagtgttagaataatctcaagtataaaggcaggaggggctgggcacagtggctcatgcttgtaatcccagcactttgggatgccaaggtgggtggattgcatgaggccaggagctcaagaccagcctggccaacatggcaaaaccccgtctttactaaaaaatacaaaaaagtagccgggcatggtggcacacacctgtagtcccagttactagggaggctaaggtgggaggattgcttgaaccggggaggcagaggttgcagtgagctgagagtgcaccactgcactccagcctgggcgacagagcaagactctatttcaaaaaaaaggcaggagaagtagtttatataagatatttataactagtttagtggtctaatagcctatggatgagaagtgactggtacagtgggccatcctagaaagagaaaatcatgtctaggtgggctctatttgatggagccgttgatctggggccaggtttacagtctcttgtcactatctggactctgttctaggtatgcagctggctgtgcccctattaggatgaaccccctgtaggtgccctttccttctgatatgccagggatgctctgggacttcctgtcataggtgattcctaatgctcctgacccatggcagccaaataggttcccccttggaggcttccattctgccctgttacctgcccttattttcaaatttggaatgtttgtagaagtctgttagtatctctctcacttattttgggggtatcatactgttttcacagcaaaagagcttgcagtcagctttagcttcttcctttaatacatgaggggtaacacctgtgctatttgttttctttcctaaatgccttcacagaagcagttttgaaccagagaatatacacaattaagtaaaaggagttgagagaaatcacatggagagcaataaagaaaagaaactaaccattgttgacagtgcactgtgttctaggcactgtgtagctaccccctgcccccagtacctgcctttctttagagcacatattattttttaaatatttatttatcatcctcctgtctccattaaaatacaagttccacgagggcagacaatttagtcttttgtgttcttttctatacccaaacatctagaacagtagcacaataagtagttgttgaataaatgtcttttcttaaagaaaaaatgaaaaaaggggccaggcatggtggctcatgcctgtaatcccagcactttgggaggctgagrcgagcagatcacaaggtcaggggtttaagaccagcctgaccaaaatggtgaaaccccatctctactgaaaatacaaaaagtagtcaggcatggtggtgcacgcctgtagtcccagctgcttgggaggctaaggcagaagaatcccttgaactcaggaggcagaggttgcagtgagccaagatcgtgccactgcactccagcctgggcaacagagcgagactccatcaaaaaaaaaaaaagaaagaaaaaggaaagacatggggttaacttttttaacctttaaaaaagatctatggaaaagattggatagatgtcagaggtacttgattgtaatagctaatgcttgtttgtaaagtgagacgtaagaaagcttagatttggcttaattgatggcaagtttaagagactgaggtttacttgagactgacattagtataaatttaaaatgacttaaagaggaagkcatgggtatttgaactatttatattcatttcagatcctttcttttacatcattttgtaaaaactccttcgaaaaaaatagttcagtgcttatagctgacttttagcttctttctcaaaaaagaaaaaaataataaaagaggaatgagaaagtcagcttaagtactaccttcccttatcttttgactgagatataagaattatttgtgacataaatacattttatttaaagaaagttgaagattggatctgggttattttttggacaagttagaatatagtacttgatttctaattgttaacaactaatgttttaaaaaacaaatgttagagactgaaaaggaatctaaacctttccctttttctaattgtaatcatattttcaaatgtatatgggatttttttcttagtctttccacaaattataaacagcagcatttaccctgcattgagctgaaatgaataaacattttttaaatgaaaataatgacagtgaaaaccaatttagaaaagaaaggaaaaagatgcccataaatcacagacacttggaagagcatgtaagaaaagctaagaactacatttttcatattttacattttctctttaaaatcgctttccaaattgttgatggtttggcagctccaaggatgacatcaactcttccattgtgcagtatctgcttgcttttagataacttggtggcactttatcaggttttggtgattaagctgaattaaaaaccaactggatttgagtttaaattctcctaactgctaaaccaaacacattcctgaccgtaggcctacttttgaatacttctgaaaacttattattacccataggctgttttacttctagaaacaaaagtaagcaagtgagagaaaaatgcactccttagagttactaaccacatctgtcaaaatgcagtatattaccagtgcagctgttaaaatgcttttaaaccagccatcttcttttctgcctatcttaacctgactgaaaaccaagaggacaataatcttggcattgttttcctacttcagaaaatcacagatagttatgagctactgtctctctcagcagttgggggcagattctgatgattagttaagtcatgatgaaaagataataccagaaattaggctattaatgaggaagaaaacagcaggctgtgaacaggtctgataactttcctgtatatcctaggaactcacctgggaatactaggtgaaaacattggcattccacacatctggtctattaccctacacttaaagcagtgcctttcatacctgaatgtgcacacgaatcacctgattcagtcaggctggggtggggcccaaattcagcatttctaacagactcctgagtggtgccaatactgctgggtctctgactacaatttgaatattgagcccctagtctagaggactttcacccaatttgaagctcaatctttagaatttaaaatatttgtataagtatttaagactaaatattttttctaagatatctaattaaagacagagatgtaagaccttgaatttcagaactgttttataaattgtattagtctgttttgcgttgctgtaaaggaatgtctgagactgggtaatttaaaagaggtttatttcgctcatgattctgcaggctgtacaagcatggcaccagcatctgctcagcttatgatgaggcctcagacagaaggcaaagggagagcaggtatgcacatggcaagagtggcagcaagagagatgccaggctcttttaaagaacagctctttaaaacatgaacagaacaagactcaaggagggcatcaagccatttatgagagatctgcccctatggcccaaacactccccactgtgccccccctccaacattggggatcacatttcaacatgagatttggaggaaacagatatccaaattatatcataagtatttataatctcttcccccacatttctatttaagctagttgtatagcaatttacattatctttcagattatccaaatgccaaaatgttttctgatcctaaagtaacatgatgcatttgctgaaaaaaagtttaagatatattcaagccagcaagacatgaagattttagagctcatcacagaagcttggtctcttttccttttgttcctggttttctccttatgtgaacattcagaaagaaaacccaagcttctaaaaaatggcaaggagctcagtatctaccaccctagaagaaggtccctggaaatcaagaatcaggtagcagatttcttctcctatgaacattcttggggaaacctacttaggctatgggttctgacttctttcaagtacttcctctgatcttgcggaagtactatggatgggtataggcaaaccccaaaaartccccagaaagagttttagtagagaaactaggtgattaggagtgccactactttgtgcaaaagaggaaaattccccatgctcatgcctcttaaatggctgagagatttctgtggcctggtattacacaccaggccaaagtagtcactgggacacccattggtcagttactgtgtctccaagggacacagagcatcttgcccagtgtcatcattatgtgagcttggcctgcctcctggactcagtgaacctgttttctcacctcccaaaaataaaagcaaaaacacacctacaatttcagagcatgtgaaaaatggatctaatcatcacattcatagggacaatggtagaatttattaatgttcctacagttttcctttaaagtgttttgagattagaaacaaaacattatatgcaatatttgagaggaaaaaccacaaaataataaaattttgtattcagtatctcagttgtgtaaaaataatatagacattaaaacaggattagaggccaggcgtgttggctcacgcctgtaatcccagcactttgggaggccgaggcgggcggatcatgaggtcaagagatcgagaccatcctggccaacatggtgaaaccctgcctctactaaaaatacaaaaattagctgggcatggtggcacacatctgtagtcccagctactcaggaggctgaggcaggagaatggcgtgaacccggaaggcagagcttgcagtaagccgagatcacgccactgcactccagcctgggtgacagagcaagactccgtctcaaaaaacaaacaaacgaagaaaaaaacaggattagaaagagaataccaaattgttataatggtcagttagctttagagggtgagattatgtataatttttagtatcgtttttattcaattcagtgtacctattacttttgcaactaaatttttgaaaaagaacaaagaaaaaaggcaacaaagcaacactgatcaggctgaaggtctcctgggcctaaacctcccaaccaccaagagtgtcaaaatctctgttcagggacttgggtctgtagttaattgttggatgtttttatgtggtataaatctgtgtactgccttgatgacagtaataaactagagtgtcttgataaagaccaaagtcatcaattttccaaaatctgtatttgattaattctccaaaggtccaggtcaakgttattcctcaaactttattattttaacatagaagcccaaagtttccaagtctgtcagaaaattcattatcactgtaaaacagcaaaaggtcacaaaatgtctctttctacaataaaatagcatataagaaaaaatctctttttctcaacaattcattaccccaacagaaaccaaaaaacctttgacatttcaggtctttttgcttcaggggaaataaatgttccatagatcatggagaaaaatgacaaacaaattaatgaaaaacaaatacactcctgcagtatccccagccacgccagaccaaacaagtcagagtcagcttttattcttgggtctttccaactctgaagagtgacagtttccataatggcatcagcagtttagttagagaaagctgtacacacaccaaagaaacacaaattaaagaaacatgtggtagaaaaacagaaagaggaattctgttatttcatgcatatttaaytctagtgggaaagtcattgctggcaaagtgttattgaaatcttgagctaataagtagaagcattctagaagatatgcaccgcctcctcatagtgctttatacaaaattgtaacttgactgaatttagcagtgctcaattttcccacattctaaaaattccttccttgaattctgcctcactctcaccactaaaccttgtcagaagtagtttgcatgtgctttctccatatcttcaatttccattcatttactaattttaacaccaaatacatttccattttcattatttgtttaaacacagccatacaaataaaaccaaaattggcccagtgcagtggctcacgcctgtaatcccagcactttgggaggctgaggtgggtggatcatctgaggtcaggagwtcgagaccaacctggctgacatggtgaaactctgtctctactaaaattacaaaaaaattagctgggcgtgctggtggatgcctgtaatcccagctactcaggaggctgaggcaggagaatagcttgaacccgggaggcagaggttgcagtgagctgagatcacgctattgcactctagcctgggtgacaagagcaaaactccgtctcagataaataaataaataaaacaaaacaaagttcactatgacccttattccctgtccccctccacagaggtgaccactgctaacagttttgactttatagaccactttagatgtgcttatgtatacaatatggatttatggagcagtggtgtgtacaatacttttttttttttacatagataatatcatataaaatgttgtggggttttttttttgccacatacttttttctgtcaatgatctgtcttggagatctttccagatccgtaagtataaatcagtggttttcaaccaggggctagtgagccccccaggggagatttggcaatttttgcaggcatttttggtggtcacgacctgagtggggaatgctattggcatctagtaggtagaagtcagggatgtactaaacatcccacaatgcacagaacagccctatgacaaagagttttccacctgaaatgtcaataatgctgaggctgagaaaccctgataaaggtctactttattcttttaactgctgcatggtattctgtagtttatttagccagtcatgtagcagtgtatatttacatgatttttttttcttttttgagttggagtcttgctctgttgcccaggctggagtgcagtggtgcgatttcgactcactgcaacctctacctcccgggttcaagcgattctcctgcctcagcctcccgagtaggtgggactataggcgtccaccaccacacccagctaatttctgtatttttagtagagacttttaaaaacatgtttatttgtagatatcagtgaatgtttcttccatttacttttgacccaactgcaatcaaccttstttcctaaatatccctaaatccattgctactgctttaacaaaataccacagactgggtaatttataaataataaaactttatttctcacagttctggaggctgggaagtctaagactgaggtgccggcagatttggtgtctggtgagggctcctttctgcttccaagatggtgccctgtggctgcatcttccagaggagagaaacattgagtcctcacgtggcagaagggacaaaaggggaaaagggaagaactctcttcctcaggttcttggataaaggcactaatcctatccatgagggtggagcccccagggcctaatcacttcccaatggccccacctcttaatgccatcaccttgggggttccaacatatggattttggagcaacaaaccatagcagccccctgcaggtgaccagtgggttttctgaatcccttggctccttttcagcatgagctgacttggcccttctgtgccatttgccagtgcttgtcctaaagcacttggcctcccaggccccttggctctgcctttttcctctctacctctgtggcccccttcagtctctgtggctctgccatctcctgagctcttgctgtcacagtgctaggcattagggatatgaagacgaactgtggaaggtcccagccctggagaccctccagtctagaagacaagcacatacacaaatctcccaaagggaagcatcacctagtcagggcacatttgaagtgtgctgagtgattgaataaataactaaatatagtagattttagaggacagtgggaaatgtttttccttcatgattcagaatttactgcatattttatcttcatgacaccttttctcacaacatacgttttgaaaaaaaataagtcacgaaaaagactttcctcatattttcccacccacagtctttttgtctgccttgaaacagcaactgcattgtttcacatacagggaatgcacttggtctttgccaaggcagagaacagatcaaatttgagaagcagccctgcttgctgctggctgagggatgggaagtgaggttggccctcggagcttccttcccctaccctttctttcaacctcctcatgatggtaggaccatcacctcccagcagccccttccttactcctgtggggagatttcagaagcagactgagtggcaactgccgcctggcccttttctccctggatcaagggatcttaagcacctacctgaaacctaacagcaaaggaaatctcaactataaatctaactccatgcagaaattaaactccttcaacgggtattcactgctcactgtgcaggccccagggaagtgtaaagatcaatgggacatggcctctgcccctaaggagccagagagggccagggcaagggtgggagggggcatctataaacaactgcttgcaatgcaaaacagaatcaagttagtcctaaaaaraggattgagcaaggttgcttaaggagaaaggaaggattcattatgataggagatcaagcaagacacttgaaaagcatgtcccttctggtagcgggygcctgaagtcccagctactcaaraggctgaggcaggagaatggcatggacccaggaggcggagcttgcagtgagccgagattgagatcacgccactgcactccagcctgggcgacagagcgagactctgtctcaaaaaaaaaaaaaaaaaaaaaaaaaaaaagagctttattttatgggttctttccatttaaacccaaggaaagtggggtttctgaaagaagaaatgaaatgcgaaccgtgcaagattctagatggccattctgctgagcaccatgtagtttgggtaaagccctgaaccttacaaatgggagtttttatctcagatatgtatctcagatgcaggacttttatctcagatataactaagagtatccaagattgcagctgtctcggccctagatgctcaagcctgtgcagccttagttgtrtatcagagatctacagagatcttagttgtrtatcagagatctacagagatcttagttgtgtatcagagatctacagagatcttagytgtatatcagagatcyacagagatcttaattgtatatcagagatctttctttggggggcggcacagggggacggagtcttgctctgtcacccaggctggagtgcagtggtgtgatcttggttcactgcaacctctgtctcctgggttcaagtcattctcctacctcagccagctgagtagctgggaccacaggtacgtgctgccatgcccagctaatttttttgtatttttagtagagacgaggatttaccatgttggccaggctggtcttgaactcctgacctcaagtgatccacctgccttggcctcccaaagtgttgggattacagatgtaagccactgtgcccagcccttagttgtatatcagagacattttttgttttgtttttttgggttttttgaggcagagtctcgctgtcactctgttgcccaggctggagtacagtggcgtactctcagctcgctgcaacccttgcctcccaggttcaggagattctcctgcctcagcctcctgagtagctgggagtacaggcatatggcaccacacccagctaattcttgtatttttagtagagaggtggtttcaccatattggtcaggctggtctcggactcctgaccttaggtgattcacccctcttggcctcccaaagtgctgggagtacaggtgtgagccaccgcgcccggcctatcagagatcttaatttgatttatttctgttcaaatcagatytgactcttaaaggcacccatttattgccccagacctgactgtagatattctgcaggatctacacatacttttatctttatytatatttctatttgcttatgttgaagccgagtgggtcctgggaacataaaggatatagctcaaggatagaggcttttaccataaattgccaaagctcacctagagaaagaacagagaggaagctgtgaaggatgtgtgggtttggggagggaagcataaaccagagagagtgaagcagttggattattggtcagtgaacaaggacaacagtggtcaccatagctgttgttattttgtgcctactaatgatcattctttatctctcccagtagagaactgattgaactgaagtccggaagacaaggagggtactgctacagaagggcccagagggctgctgcatttatttcctatcgctgtatagcaaattaccacaaatttagcagcttaaaataacacctgtttactacctcacagttctgtaggtctgaaggctgggcaggctcaactgggttctctgcttagggtctcagagggctgaattcaaggtgtcagtcaggttgggctcttacctggaggctttgcagaagaaccttcttccaagcttgctcaggttgttggcagaattcagttgctgtggttgtaggactgaagtccctgttgtctccgcaaggactaccctcagcttctcaagttcttgtcccattgaccctttcatggtaaagtcagcaatggagaagcttcctcttgttgaatccctctcacaattagaatctctcaactgtaacaagaatctcgcttctgtaacaagctggagaaaattccctacttttaaaaggctcatgtgattaggttaggcccatgcagatgctctctgattagtaaccttaatggcatctgcagaattccttttcccaccaaacataacataatctcaggagtaacaccagggggtgaagaccatggagcccttggttccacctgaccttggaatgacacctggaaatccagggttcagggaccagaaatctgtgactgagggtggggctggggagtgacacacagaagggaaatattctccgggagccaaacagagaaggacttttggaggcagaatttgctgacagagctaatcaagcccccttaatcagtaagagtctttgttgagcaccttcttttctaggccctgttaggcactagaataatgaaggagacagtccttgccctttaggaattcacagtctagtgagattgtaagaaatctcctggactagaaatgcagtcctgatacaaccgtaccctgagaaatctgtatatcttcaggaaagtcattttgtgtgttttacagactggcctgagtgctcgctgctgttgtagctaccaccaactttctactgaagatgataacccagggcataagaaatgacttcagacccaaggttctgaaagggcccctcaaggcctcgggtggctcctgcagaagtggcagaagaggcgggaactaggaacctggcatcataggaaaagtgccttctccaagaaagaaggggccccaggaggctgtcttacttagatcaaccataaactaccacagatgggtcatttcttataytatttcaaaatatctttgaagatgagaattcatttgtgtccttcatagaccaaagttctttgtgttaccttttcccaaaagtaaattcctttccctttattcattccttgtggaaataaaatgcaagccctttatacttgtcttacagtaatatggcacatgtagcttacttttgagcatcccagtgaataatgtttggaacttttcttattacctaatagcatatagagaagagtgaagtcagctaaaaacagaaattttgaaaagccatcttcaggaaaatgtaggcccagatgctttcctccaccttttttgacaggctgccacatacagtttcacaggttgctaactgcacaggggcacagcctgtcctccatttgccaagtcacactttctggcacagagaggggtgtcttgttctaatttgtctttgtggcctgctctcttctgttcttgaagctgcaagccacagtgagatgagtgaaaagcagtcagtctcatagaaaaaagcagggaaaaagcaatagagacaagaaggaaagccaaggaaaggattcttggggaaggtcaacagggaagggtggagaaggggaaaggagatgaccattatgatcttctaattaggagtttaggggagatcgtttgccttattcagcaaccatgcgactagaaaataagcaatctctttaaaataatgctttactacagtcaacttcaataatcttttcgataattgggttgtgattaaacttacaggcacaagactaaataatcccaacgcctttaactttgcacattgttttttgtttgtttggttggttttgttgttttagtttggggttttttttactttgtgtgcccttatatattcaacaaatacttcttggtacccattctattcatagcactctcttagtccttgtatacaggggtcctcaatccttgatgtgaattaaagtcacctgggcagcatgctgaaaatgcagcttcctaggccctcccttcatgcagcttcaggatctctcagctatattttgatcaaacatccaaggaatttctggtgattcaaggaccacactttgaggaagsttgctgtagacatggaaagcatataatccatagttctttgtcctgtaagaccgtataactgagttagggaacaggaggtagacatacataaagataacgaacaacacccaacagtgggtgctacagaagcaagtgagtaacagagaaaatgatgaaccagtgacatattaggtgggaagaggaagaatgttcctacatggaattccctgaagacttcaaaaaaaagagtgggcctttaaaagagaggagagaccatttcagttgggaaaaatatgtaaataaaggcgcagtagctttatgtggtgagagacttagggaaagactgactcaacatctcttggcttcatgatgatcctttttgacccacaggttctttctcctttcttattaggttgcttttaagactatttcataagggatcgcagatgtgcatgtaaaaagagattaatcactattgaaatgtatgtgctgactgatttgtgtgttacactattgaaaaactgtatagactccaaatggcatctgattattaaattcagatgccagagtctttgattaacagcatgtctttttgctctgtatattttccttcagaagtagcagggcttgcagacatctcaagctatgccacagaagagtcaaacagaggaagtggtcatgaaattaaatgtgaagacagtctattaacttttgcaatacagaacctttgtttactcataaaatccatatttggagctcattctttccaaatggattattatctaagtgtttttattggagactgtttggtacttgtgttttatagttctttttctttcactcaaacaattttgtatattagaaaacaatttcagcaaatattttatatttaaaaaatcagaagaaaatgaagatgaccctctcttttgccagtactcataataaatacaaaatgagaagagatttttatagtactgcatgactctattatctggagtacaaatcactgcttttttttttgttttgtgagacagggtctccctctgtcctccaggatgagcacaaaggcatcctctcrgctcactgcagccttgagctccctggctcaagtgatcctcccacctcagcctcctgaatagctgggaccacaggcatgtgctaccatgcccaactaattttttattttttgtagagatggggactcactttgctgcccaggctggtcttgaattcctggactcaagtaatcctcctacctcagcctcacaaagtgttgggattacaggtgtgagtcactgtgcctggccttgcattttttaaaagtgataagtaaatgctatatgacttcaggtagagattatatctcatgtttaatttgtataactgcataagtagaaaaactgttcatgaaaatatattggctgggcgtggtggatcacacctgtaaactcagcactttgggaggctgaggtgggtggatctcctgaggtcaggagttcaagactagcctggccaacatggagaaaccccatctctactaaaaatacaaaaattagccggtgtggtggcacatgcctgtaatcccagctacctgggaggctgaggcaggagaatcacttgaacccgggaggcagaggttgcagtgagccgagattgcaccactgcactccagcctgggtgacagagcaagagaaaaaaaaaagaaaggaaggaaggaagaaatttacttattccatctctgtacacataatttgtaaacttttttatcatcaattattattataaattttttgagacagggtctcactgtgttgcccaggctggagcgtagtggtgtgagcacggctcactgcagcctcgatcacctgggctccagcaatcctcccatatcagcctcctgagtaactgagactataggcacatgccaccatgcccggttaatttttgtattttgtagagacagggtttcgccatgttacccaggctggtcttgaactcytgagctcaagcaatccacctgcctcagcctcccaaagtgctgggattacaggcatgagccaccacatcagcccatcaattattattaaactcatgtgtaccagtacaatttcaagccctctaagctgcatttaatgctaaattgtgatatcatgtgtgtgtgtgtgtgtgtgtgtgtgtgtgtgtgtgtttgaacagaatgttcatatgacttcatttctataataatgtgataatacaaatatttggggtcattttaatcgtattagcatttatctttaccaaattgatttgattgttgtgtagccacttctcatctgttacatatacacgttttacatatcattcaaacttgaaatttccttaaacaactttcccagcctggtttcggatgattgcttgttgagactttgtccatgctctgtcctcccctccccactgtaaatactcttcttttgggctagggggctgtgccctccagggtattgttttccttcctgttcagtgcccatgctcttgcctgtgtttctcctgtacctttcccaggacctagcagacagccgagcacctgcccactgctctgtaaatactgacctgcatctcaagtggggtagcctttgtgtactttcccatttccaagttgatttgcctgtgaatcccatatgtgaacacatatgcagatgtccctgatgtgctctttcctgcttggaggcacatgcaaggatgtggcactttttctaattgcttgaacagtcaagtggatctctcttaggcagcacttggccaaaaattctgaatatttaatcactggtacaggattagttcagttggccaaaaagaaaaaaaaaatgtatggatgaaatgtgaatacactgttaactttttcatctgcctttataattagtgttttttcaatattaagtttctgctttttatactgagtttttagggaaaaaatatgggaaggattccatattcattgcttcacacgatctatagttcctgagataactatataattatgaatgttgatacacccataagagactttgctttttcctctcacacatctgttttgctttaggcaagagaactttctcatgccagaatggctgcagtggatgtaggcaatctgctttatgttgagccgctacaattcacagatgcaaatgtttaaaaggttaacatggttatttcttcatctgaaacaaacgtccctagtcactacttttgtcctttaaaaaaaattgtattcttttataaatccattgtgtgtaatccttatacccttgtctcataatcctcatatcagagctgaattaactcttttgtggcctcctgtgatgaatttcagttgtcctactagtttctcttgctggtgtgattgtgtcctcttgatggaatttaggttcttagggagagaatgagggaagcagcttctctacccagaacagaatcccactaaccgaaagaatgctgccctgcaaaaaagtttctagtgtatccatgtgtgatctcaattatttaatcaacaaacattccagagcatccattgtttcactgtactaggaaatgggggcaagaccaggatagtatacggaggctaacctcagcaactgcagtccagttggaaagatgaaacctaacatgatgataggatggcagcgggttgtgagtgtcaaacgcatgcttctgtactgcgctcctgctgcctccaaaagcagggggagccttcagttcatcacacctacagctctggacattttttcatgttgttaaattaatctaacattgtaggatctgaattttctatagaaactttacctaacttttcttgtattgctaatttgttgtattgagtaagccttctgtgtagaaaacagtttaactatgttaacaacactatgtcaaagattcaaagcctttgagagcttaggagaaatccaaccccagtcattttctgacacaactgaacacagtactctgtggttgaaagttcctgaaactcccaaagcacaggaaggctgactacagatcctaaagatgtttaactcacatagtccttggtggcacttactgtttgcagctggagggccttgtattttcttaaaatgcatcctaaataaaaactcaaaagccattcaatgctaattcaagtttcatggttaaaggcgcagctttgctggcatctagaattagaaccgtgtggtgtgtcccccagaaaacgagctctcatggcaaaaacagacaaactctaccccctgccaaactaactgtcagcagaaatctggtctgctttctgaaatgggatgtaggtttccaaattctctagacaatctctttccaaagcaaaggagaaacaaataactcacaggcaccaactgcattttctgttcaaagcaagaagggttttcactgtgctgtttttacctgtcatttcacaactcagttctctctggagcacttgtaccaagggtacaagaaagtcatgagatcagagagctggttttggacatgcacttaatcactcccatccttatttcccctgcttccctgatgcccctgaatagcaggctctgtccccgaaagagaaatgagagttaaagaaatgaccacttaaccttttcctttggtagggaggttctaggaggccagtgaagcttgcgggggtcgggaaatttgagaagtgaatggagattaggagaacagagtttgctccagatgagctttggagctgtgccttttcttctggaactcactaccggatcaaggggtctagtggggtgcccaccacactggccaccagaccaggcttgatggaaagggcccagagatgggtcctgcttgtgcagtctacaactgccagcatcagctgccccctattcctctctgtggcccatggtcagccagaatcagagggccaaagcaatgggcctgtagcttgagaagcatgtcagcaggctggggttcaaggccaggcctacaggcccgcagtggagagggcaaggctggctccaggtccgatgggcaggttgccaggacgtgattttcagagcaggaaagtggagtgaagcgtgactggcagtgagtgtgagcagacagctgcagagtcgtctctgcctagtgttaggcctggccgcaggctctggcggccctcagcctgaccgtaggatgggtctcccagcttcagctgaaggcaagaagtgccgctgacttggggagctgagccagacctggctcctgccctcctccctgaacgtgctccaggatcatctgtctgcctgttgttcctcactctttttagctctccacggggctggcctttgttgtagacagagaagagaggcactgtgttatgtgccgaaagctctgtcacaagacacctacaccaccaatgtgctgccgtgcttttcctcatgctgttcccgttgcccaagtgacctttcctgcctttctgtgcctggtaaaatctggcttgttctttgagatccagttcaaatgtaagcttccttggcaagtccttcccagccgctctgaccaccacctttcctggcaggattgcatactgattgcaaccccctcggtgcccgctcagcgtgttctatgcacctgtagctctagcccattatgatagagttatttattcacattctttgttagatgctgaatctgtccaagacagggacctggacatctgtccattcatctctgtatccctcccagcacagtggctgaaacacagtttgtcatttatacatgtctgttttgcaaatccgttatctgagatgaaagcctgtagatttcattaacatcttagctctgactagttgagaaatcaaaagtagggcacatggcacagctaacacatattggcgtcttgctgtgtgctgccctagacaccccgtgtccagcaaaaagtcacacatcgttgacccgagcagagggagcccagggggccatcctgtgtccctccagcatcactgcaaacagggtgggggcaccagtggaggcaggagcgctgacctgtcttgaaggctgagagtaagatgggtcccttgtggccttcaaaagtatttggacttctgaagctgcctgtggctccggaaattagggaaatgctttagtgggagtgcttctgtgtgcggggaggtgtaagtgcaacatgaactgaatctcactccacccagtacaggatgtgcccggagagcatgctgagctaccctgtgccagctacgtgctctagaacagcatcctcccagccacccaggaggtcatgcaggcctcgtcatcagaaaagtggcttaaaaaccatgtggagtcagaccatttgaacactaactagaaatgggaggctattagggaattattgtgaatgttctaggaaacattgctcatctttgcacattaaattcctactaatataatagtatcatgattatgaggggtttatttttttaaggatccttgtcttttagggatatatgccaaaatatttaccgatgaaatatgatggttggaatttgcttggaaataatatggggaggagggggtgggaggtaaagataaagaaaattggccacaagttgatgattgttgggtacatggtgtttattatgatgctcagtctacttctgtgcatgtttgacatttttcatggcaaggtgttttttttttttttttttttttttttgagacggagtctcgctctgtcgcccaggctggagtgcagtggcgggatctcggctcactgcaagctccgcctcccgggttcacgccattctcctgcctcagcctcccaagtagctgggactacaggcgcccgccactacgcccggctaattttttgtatttttagtagagacggggtttcaccgttttagccgggatggtctcgatctcctgacctcgtgatccgcccgcctcggcctcccaaagtgctgggattacaggcgtgagccaccgcgcccggcctatgttttttaagtatttgagagattaaggggaaacagtattttgttctcatcccctcgtttcttggatttgctttattgtcccttttcctcacccctggttacctctgaggatctcctagttagagaagagggtccaaattgttgttctatctacccttttggtaccttcttaaaaggccttcccttaaggttccccaaatatgtttaaaagtctttggaaattaggtgcatttcctcccattggctcaggaaggggtggggagcagcatatggtactggaaaccaggctcccttgaagtgctccttgcccgggcttaggctctgttgaggtgaatcacttgcctccctccaatgaggagtatgctttcctgaggttgtagaagagaaatgtgccattttcactgtgcctgtacccaagggagccagaatgggagcattttaaaagaaagacactttcatatgactaaatcaacctggaagccaactgatgaagatgtgctatctgatagagcttggggaccaccaaccaactgggaacataaaatgtggagggcaggcttggccctggattattgactctctcaaatgtttctattatgtctcactcttaaggagggagactagaagctcttaagtccagtagcttaacatttttcagagtggatttttttcttggccttatttctaccaccctcgtgttcccaaaacaccccttccatcaccacaccccaacacggaatgctctgcactcactgtattgtcctcagccatttcccaccttcatggcccagctttctgccagtgcagaccacagatatggttgcaggaaagtggagaaagagtagctaatcggaggtgacagggagcggaagagtaagcatggcgagagcatgccagctggtggagtcttaaatggaactgtagagttcttggggatgtctgcccatttgaggtaaccgtcttgtctagcttcctgtccacatggcacattccggtggtgtgacttgaaggaagctaccaaaaccatatttatcacattccagaggccagagggcctatgagtaatcgtgagtatggagacgatgaagttggaatccaggagaagctgatggtggagcataatgaggcaaatctaataggccagaatgtcatcaggtcaatgtagagtgctgtgcgtgggccacctgcaaagcgcagggtgaggaggagtgactgacaaggaacttaataggaggcaacagtgtgatgtggctgcacagacctacaaatgctttaaaatccagttgcatggatacaggaggctgaaagcatcaatcctgtaatatatccagawgagaagtgccagtccaggaatcacattttgttccctgtaagtttctgaagggggccatctcagtaaatgatggttgttcatatgaaagatattattatttctctgatggtatctgatactgcatgttgcatgcagaagaagatctctaaagatctttacatattaacagcctatgacatccttcaggtatacagttgttacacatgccaggggacactgtgactttgttattgttttgtattttctctgcatttgggttaattttgtttgattattgtcatccctttagttcctaacttacacactagggtgttagagaggaaggtaatccagaacagattttataataataacaataaaggccaccctattttctctctattgtattgctcagtactcatagcgcattagtgcatttaacgctcacagaaacccaatgaaggtaggtggtagtattagtctcattttacagaaaagtaaaatattagaaagttaagcaatttgcccccaaggccgcacagctagaaagcaacaaggcagggactctgggagcccaagctcacagtgcctctccctggtgttgctttttccacagcagtgaataactgctcccctgaagtgctccttgcctggggttcggcaccgcgaccagttccacaggcatcgtgtctaagtgtgactgtgccccggaacccacagagccacccggctgctcagtcgatgataatcaaaaattttaaatttgcttccattggacattcctgctcatccagccacttttcttatcagaagacaaaggcatgctgaccatatgtttattatcattcctcctctttcctgcttgtttttctagtcaaggtcagagaggaccagaaacacccagtgctgagaagagtgagccttgctttctcagaaatggttcctacctctgtggaaagcagtgaaagagcctccagtagcctcttcctggagtggtggagggtggatagaaggaaaaacaattagaagtaacaataacgaatagaaacagaaagacgtctttcttcctaacaacctcattttgttttccttctaatcttattaaattttcacatacttggtataaaatcacaacagtttaggttctgataatgtcttatagctgcctgtgtgcctcgttggctgacttatgctctgatatgtccctaatatggcagattctccatacagataagtggaaagtaactcctcctacaggtaaacttgatgggactgtaggattaagccttttgcttgttatgcgactcagcaattattaggaaaaggctgggtgttttcagcagcccctgggaaatgtgatttatgacatgacaacgttggttggtcggggtctctgtttcactctccagtgtgcactcatttgagtaagtctgtgaggaacttcccacttgtaagaaacagtatcttgcgtgttgctatcactaaaccctggaggccggatgctgtgtccctgctaatggtctctggttggcaaatatacatgtgactctttctgagcaaagtgctatgtgtaatatgaaaggagcttgaatgggtagtccctgccctcaagtggccttgattttacaggagacttgccatggacctggaagatgcatggagcacggggcagcatttgcccattccctcagcgtgcacaggtataatggccactgtccgggagctgggaggtcagaggccaatgactgcagccaaccatactggggacagaaaggccagtccctaccaggctatccacattggttaaaataggaaccacccatttttgtctcctctccaggctttgaaagcatttgggtaattacagcttgcctttctgcctttggttgttagttttagtgtcttaattatctgccatgtcaaaagatttctcctgatccctctgagctctctcccttttgctcctagtggtgttttcaccctgcttgataagttagaattgtacagtggtttccatttcttctgtcatataaacagtaggcagttctcaaccttcccatcctctctaacttactctctactttttttccttaagagaggcttatgtgatgacattgaccaagtaagtcctctaacctcagtgatagggtggttcggatggggtggcaaggaaaggaaaagggaattgaatcagttttgattttttaaaaatcatgctgagctgaagtgaaacacttttttttttccacaaaaactgagtctgaagggatctttttttttttttcattccacattttggttacatctgcagtgagcagttgcaaatcctgagagacttctcttccctggcatttgtttcattttgcaagagtctcactgtgcctgtgtcttatgtgagctccttgaaatgaaagaacgttaatggctgaagactgttagagccatttgggtgcctgcttatacctttcactcagcaggactgccaggggccctgtctggctctgccaggtgccctcgggtgggagaataagggcactgaaacaacaaataggcccttgaccagacctccagctccttgcctgcagggaatagcactggagtacaacgtctagtacaaagtaggtgttcaataaataaccatcaaatgggataaaaccagttcctagcccagcacaggtgcagggtagatgctcagtaaatatttgttgaagaaacgaatacattactatatcccatgggggaagacctctggtcttcatagcacttgcatcatttgtagctctgcaagggctctgggctggatcgactaggaaagcagcctgagcagggaagcagatggctgatcaagccctccagccgaggagaccagcactgtttctgtgggaacttggatgccactgacctcactcatggaagcttgcaagagtggtgcaggccccagtggaccaaggccagggctctgtctgctccctttggcagtcggaaagcagcacacacttagctttgccaggacccagcttcagcggccttcatagcccagtaattacctcgtgatcaagggagggagggatgtgtgtagaaatcactttttagtagcacatatttctcttggaaaagccccagtaagctgccgactttctctcaagtgttcaaaggataccagggaactgacgggctaatttaattgtattaatacaagaggcggccgtccctagtgcagaggggagtgcgttagggagaattgtctgtcgggaggctggagttccagcttcaacatggaagtgaaaacactctccaggaaagcagacgagtcccactggggaggaaactgactctctccatggcccacagggcctgctcttcatctgtctgaagaagcctctttattgcattcagataagtgtttcacttgaaggagagcaaacacaaccaaataatgacctagatgtcccttcctcatgttttcaaacagtcccccttctctttaatccctgcaggagaaaatgtcctggagttgagatcttaggagacattggttcatttaagtccattatgagaccttcacaaggcaccccttaaatctggcagtaggaccacagttttatcctggccacaaatttaaagactttgatcctattccctctcaggtatcaatgcaaacagaacaattctaacatttttagtatggccaccccaacgtggacaccaattagctaagccagggaactttacttctatttcctcatctatgcaaaggggagaacaggttagatgatgtctaaggcccctcaagaacttgagtgctcttcattctgtaatcattatctctctaattagtttctcttctctaaactttattctcctccacggcctctgtttaggggtggaaggtagatgctgtaccctagtgtgtgtttcccggggctgtttctcagcctgctgctctgttctctccactctctatctgtccctattgcgatcattctcaaatctaactgtgactgcagcactccagttcattcatttattccataatatttctcaaacacccacacggtgctaggtgctgaatgaacagtacactggtgaacaagagtcatgatccctgctttttttggatcatatacttttctagggagacatgtattaaatatatttaatttaatttaacaaatataatttaaataatattaaatatattaaatgaatatataatgataaattgtaagacgtgttatggaagatgaacaggggttgccctgatttaatttgggaggtcaaaaaatatctgctctgaggaagtgttatttgatctgagacctggaaaaggagttatcaggcaaggagttgtagaaagtgctccaggtagaggaaagagctaacacaaagacctttgcagcagggaagggctagactggatgaacagagcttcgtgtgcccaaagaactgaaggaaaccagtgtggttggaacatacacagtgagagcagtggggtgagatgagactgggagaatgacagattagttaagataacgctggctgctggaacaaaccaaaactgacattcgaacagtatagacatttatttctcatttgcagaagtgcaaactagatattcctgagcagttagatatccctgttcaaagcagtgtcttggagaccacagctcctttcattttgcagctctgccatttttaatgacctgccaaggccagcgtgcttctctgcatggaaggctgtgcatgagagggttttctgggcccaggcctgcctggaagtggtgctcccaaccgcactcacattcckccagcacacacccaactgcaagggaggccgagaaatgtggtcagagtgtgatcccaagaaggagacagggcagatgacgcagacactgtgggccatgttgcagtttcagttttattcctagcgtgctgaggagtgtgagtgagagtgcacctgtggcaaatccatcagcacttctaaacctacacgttcaattgctaatgtcatgcaattcatcttcctccaaaagcaacatctctcacgtgttcttccagtgatgccattccagacctagcagtcctttttcctgctctattcrtcgtctagacttacttgaccaatccaaccctggactggttcagtacttccccgactaggctcttcaattggtttctttctgctctgatacagaatgctaaggtacgtatttacaatgtagactatccccttccagtgacagagttattcctggctgttgtatagagcaacttttttgtactatcaggtcatcctagaaacttaattagtaatcagagtataatgaacatggagatgtgtctttctaaaacaggcctttcatccctgctaaaaaaaaattttacttgcttccaagtacctactgaataaagttctaacttctatatgttggaggtactaacgcaacccatcttttcctaacaattcttactttgtcctcctcaagccagccagggtgctcaactatccagagtccaaacaaacttggtgaattctcaccttgtactcttccacactctgcctgggatgtcctgttcctgctcatcctcctctctgaatcctactgatgttttagtgcaagccttcatcccctaagtctcaccttctctgggaagtctcccctccaaccaaccagaaatagactttccatctctggagttctgtagtgcttactcttcaaagtaattaatgcttaaattaacttgtgtcttaccactcctttggcatttatcatgtattgccttttattgacatttattctcccaattcattntaagcttnttaagtagagatacttttcctggtatctaaaacagtaccttgcacaccctccaaaaaattattaattaatttaatgtttttctgtaattcctgtgacaccttatacagtttnttaaacatggcagatgctcaaaaaattcttgttgatttgttattattgttattttaatgtataaccccctgtaaaatgcaaagtcttggtcagttaagggggagtgctttttctgggaattccagccccaaacggaggtctgggtaaaatgcatggtggagaggggagtctgtgagtgctcctccagcctctgtgcacagcttcctactttgctgctgctgctgctgcttttttttttttttttaattgagatggagtcttgctctgtcacccgggctggagtgcagtggtgtgatcttggtttactgcaacctctgcctcctgggttcaagcaatcttctcacctcagcctcctgagtagctgggactacaggtgcacaccaccacgcccagctaatttttgtatttttagtagaaatggggttttaccatgttggccaggctagtcttgaactcctgacctcaagtgatttgcctgcctcggcctcccaaagtgccgggattacagacgtgagccaccgcgactggccgctactttgcttctcttgctcattcagaaagccaactctgggtttgtcacagattgtttgcttacaaatattcccactttttcattcacaatccttctttccccaagaaagaggttggtcgcaaggtgtaggggtgttgccctggggctctgtctttccaattttcccttctatccagatttttcatctgccaaaccctatgagagccaggagagggcatcagatcaaccagccaaagcttcaaaatctgccttgactctgtggggttctgctcacctacacctttgtagggtaccatcctctagtaaaatgagcctctactatgatagcaggctcctgcattctatttctaaatctgcctgattctaaacattcttgtttgagtcagatgggaaatacagttctgtttcatttttctccccgtcttaattggttttccgtatgcgggttcagaagtaggattttgccrtacacatcatccttcatgtgagtaggygagcaccagcatcaggggaaggaaaagagacaaactgactgttagggagggagtctctctccagactcggctagccagcacagcttcagatcctgcccctcaagtgagtcacttcatgaatgtggctaaagtgtctaacggttggcatttctcaggaagcatgctgggattatggatgtgaaagttaacatgggttgagagaggactgaggcttcagcaatctcagaatgyctgtctgttgagcttcataaccaagctgccaaattcaaatctgcatctacagattcttgagcacttgaggcgggtgccctctgaagctggaccttttcaaagctgctctgaagagctgggtggcacctccttcatatttcattctaagtcaattgcagagctaagaaaccgtctttgcttactgtctcagatgtgtttccagttttcattggaaagagaaattgtgttctgaatcccagttcatgtgaaaccctgataacttctcaaaatataaaacrtccttactttcgggggctgctgtcaagaactagaggaggctggaaagagttgtctcaaatgtttgcttttttacctttggcaagcatcacctagtggccctcatgtcagtgactacagggtttgtgtaacatgcctgggtttgggccatggacagcaatgttgtggagggctgcccttggaagaacaccagccagcttcagttttctgcactgtaattgttgccactgctaccccagtatgggctcctggggtcaggagggatggcatcaccaagcttcccggagggggcaggcccacctgacagccattaaaaggctgattccgtgggcagggccctttttccaaattaagtattaaatgaacattatttcatccttatccaaaactgtgctcagagcctagacacgtctttcctgcacaccggaatatgaaccgtacaacacagggtgagctcagccttcagcaaggcgttttggatggtgaggctttgtggttgggattgcactaaatgccatgtagggggcgggggkgtctttctcctttcatcccttgccagagactcagcctgggccatgctcatcatcataatcacaggctgaagaggaatattttgggtttagtttccctttttttttttttttttacacacaatgcctatttataaccatttgttgacagactctaccaattacttaaaaaaacgtgtatttagacagagacagaccaaaaatgtgaattcaatggtggccctagttctgtattcgattagcatctgctggtgccagaactggagatggctgtctgttgtcactttaattggaggatgattagaaaaaaatacttgcttttcttccaatcttatctttgttgttaccagctcatcagatccgcaagttcatgtttattatggccattatatgttaaaagctcagtgcattttctgtctccacatcatctataacatcctgttgccaaatccagttatctcctttcctgctttctcatactttccctctctttgacattaaccattttctccatggagtatttcccctggcttctgaggccttcttctagtctaactcctccttctcagccttttagaggccccttcccctatgctttgcctttcaaatggtgtttctttccagaattccatcctcctccctgttcttttctcagtccatatattttttccaccttaaatacagccagaagaagtggagacaaggcacccagtttgagagtccaggacttggcagtgcacatcrgacattagagaggggttacccataaagctatcttaggggcagctgaatatacaggatctctgtgattcctacccttaccccaaaaagcaggatggctcacgggggcagcagaaaggtgatggagccagagagagtaggtaagctattgtccatggtggatacagggagagacaagctgaagaggttgaacctgttttgatggccaaggccagcagatggatgtcaatatccctatgtgaaatacaggagtggagcaccatcgaaggaatgatgtgagaaggaagtgagaaggctgggctttgttactgtgcaggttcacctgggctagaggcactatggttggatacacaaaacaacagtctgggttagagataagattctggagtctagaatacccagcgaaatgttgggcatggaaactagaggaacgaaaacattgaagagatgaacagtgaaaaaagaataagcaaatgaggctgaaaagaatggcaggtagaggccgggcgcagtggctcgtgcctgtaatcccggcactttcggagaccaaggcaggcggatcacaaggtcaagagatcgagacctgccgggcgcggtggctcacgcctgtaatcccagcactttgggaggccgaggcgggcggatcacgaggtcaggagatcgagaccatcccggctaaaacggtgaaaccccgtctctactaaaaaatacaaaaaattagccaggcatagtggcgggcgcctgtagtcccagctacttgggaggctgaggcaggagaatggcgtgaacccgggaggcggagcttgcagtgagccgagatcccgccactgcactccagcctgggcgacagagcgagactctgtctcaaaaaaaaaaaaaaaagagatcgagaccatcctggccaacatggtgaaaccccgtctctactaaaaatacaaaaattagctgggcatggtggcgtgtgcctgtagtcccagctactcgggaggctgaggcaggagaatcacttgaacccaggaggcagaggttgcagtgagccaagattgtgccaccgcactccagcctggtgacagagtgagactccgtcaaaaaaaaaagaatggcaggtagaaatgagactcccaaagatgaacccagatggagcattttctctatgccaggcactgcagtaagtgctttgcacgcattgtctcacttagagactgaaaaggggaaggacaccttagaaagaagaaaatttcaaaaagagagaccctccttctgccttgatcatatttgtcactctttctttacctattgcattggcctatccatagggctcttcctggatcctcctggggaattggtatgtcttttggaatctcctagcactttgtgcgttttatttattcaggcaacaaatgtttattccactattttagaatttatggtggttaaacaaaattattttattattacctgctgaactccagcttattcattctgaagatttagtgtctaacacatatagtgatcaacaacataggtatttgtttagtaagtaaatgaataatatgaaataagttattttttcaagactcaaatttaaaccaaagcatgagaagagctcttgtcaacctatttcaggtataggtggcttaatttactacaacggtcatgagttgaggattcattgaatggttgttttctgtcatttttggtttacactgctcaatcaacactgctggctgatgtcagaccttaaccaattgttgaagttccctgtaacaccagcacattctctgaatacttactatgcacaatgcaataatgattaacatttgaactctgtctaggctgagtaagccacatcaaagctcttttttcactaggacttttaaaatatcagatatgaactgagtgagtaggtgtcagagaaattgactttgtaaactgaaaatcataaacttaagattcatttgaaatacgtcatgtggagtgcatatataaaaattatgagcattttaatttgtcccctgtaggtaataaataacatctgcaatattcctcctcacctttttctgattagcttcatgtctggcatatttttcccaacactcctgtttcgtgttgtaagaatttctccaaggacagacaggattctaagtaagtagtgagggtctaacagaaaacttgcagcaaccaggttcaagttcagaaatgagggaagtatttaatggtggtcaggcctccctattttactcttctttggtacacgctggcagagctgcacaggccccgaggggtggcagtgcctgtgaaaggcacagtgcctgtgaaaggtctataatctagacccacaagccagccccctcctccccaaagctggtgtggctcccaggccccctcactccccacatgtacctgcacccacatgggggcatccagcagagtgccctaggccaccagcatccccctagggtccatggagctggagggacctctggagactcccaaagatgaaccaaggtggacattggccacctctgctgggcagctgcatagagtttgtttgggaggaagattttgtccttaaaagtttgaaaaccactgccttaactgtgtaatttcaataactactatatgatgatgataacaataatagctaacatttattgagagcttactctctgccagggaccctattatgggctttcaatgtactatctcatttaattctcccaaaaaaatctctgaggcacttactgattttatcagctagaaaacagaggctaagtaaaatgcccatggttacagagttatgaagtaggagagctggcccatttagtctggctccaaagccagggatctcaatcttgctgctaatactgctattaattagctctggtaaaagtgaagaggcagcctggacaactggaaaacagaacagcacatgtttagtaagtgcctatgacagtcaggcgttaaatgatgcttgagccttagttactctgagcttcactctatccctctcaccccagtggcctcacctaattttggaaaagttggacaagcagtgagacagacagggtaaaaagaaaaaattggcttgtaaatactccccgaatatcctgcctgataaaacattcttcctcctctccctcctcctccttcctatcacctctccctttgcctttctccccaaccccacctctcttctttgttttctgttttctttttgcctcccttatcggtcctgtcttctttgccttgtgttagattctttaggctcctatttcaggacaggtcacatttactcttgcttctacactaggacacaccctcccctcttactactcagtgttagttcactggcctcaataaacactggatgtttttattttatttcatgtttgtgcacttgaagactattgaattcattctgtgtgtttttttttccaaaatgatatatgaattagaattgcccttttgagccaagaaccctggtgggttttgttttgttttttaacagagccgcaagcccaggaatgagaaatcagttcataaaatcaatagcaagcaaatttagaatccactacagcacctatacccagcttatagtaagcctgagaagcagactcctacaggatgagattgattccagcagtgtggttagatatttggaaatgcctaaagaaatgtttatgctcaagttaaggttgcagcagaaaccatataacttgagaatttctggggcctaaatgtacgggctctacagaatgtactacgttgctttgtgcctctgcccagatcactattctccttttccactttcctcccatgctgcccccagcacacgcatacttgcctcatcgcctcaaaaaaaaaataataaaaattgaaatctttctaatgccaattcagccttccagtttcatctgagacatcacttcttcagggagatcttctcctttccctagactaatcaaggtccccaccttgccttcctagagcccccatccctagccacaacacccatcaaaattgatcatcactgcttgtctccttgccttcctccacctggctgtgtgcccagcaactaggactagttcaagaagtatttgttgacgaagtaaatcaatttagtttggggggaccatggccacaggatcnagacacttctcagctctctgctgtctccttactcttgctttccagactctgattcccgagcagttgggaagacatctttttgtttcttccattctgaaattcactgaccaactgcgtacatccatgctcataaacatttgatttagctataaaatctattttanataaaaatgccaattagagtagaaacttcctgctcctccctgtccccactatgtgtaaggtaagtgtggaggtgggaaaaagagcgttgtcttctaaggagtgggagttgaatgtctcctaggtgcccactgcaggcagcatgaaaataataggatggatactataggaggcacatttgagatctttcaaattgctccagctgaccatccatgacatgggctacctggtgaggcaggaagtcctgtgtgggactgtcctagggcaatagctgtgcaaagaccatcataagtgcaacagatgctgctgaagatggtaatttcaggcagcctatgttaggccagggctcagctgggctagactaagggaaccaaagacaggtatgaaagggactgtaggctccagtgaccccaaggcagaaccagaattgggaatctctgttctattgcactctgtttttacaattctggccagacctgtagtgtggcataccactacaggttatgtggggaaaatgttaccacatattccccacataattttctaacaatacctcgttccctttgcagctggttcagatctcacagtcataagagggttgagcagttggtcacaccttgacttgacagctgtcagtcagaggccataggttcaacatatattgaaatgatttctttcagttggtcagttggttttacctatttgcctgggcttatggcgaccaccgtggaaattcaagagacctgtacccagaatccgtgcacttatggtgcacagaatgctcactacgtgtagaatcttatttcctcttcacactcattctatttaggtagtattttggttctcatttttgcatacaaggaaacaggaactcagagtggttaaatgactttataagataagaaaaagagcttgttctaaaggctattgaaatgccagtgattgatttctctgagttacttttcagaactagagtgatggcatagggcaagcttattcaaacccatggcccacgggctgcacgtggcccaggatggccttgaatgcgtaactttttttttttttttttgcgacagattctcactctgtcgtccaggctggagtacagtgatgcgatctcggctcgctgcaacctccacctcctgggttcaagtgcttctcatgcctcagcctcctgagtagctgggattacaggcatgcaccgtcacacctggctaatttttgtatttttagtagagatggggttttaccacagtggcccggctggtctcgaactcctggcctcaagtgatctgcccgcctcagcctcccaaagtgctgggattacaggcgtgagccaccatgcctgtaaactttctgaaaattcataagctttcttaaaacattatgagttttcttgcaatttctttttttttttagctcatcagctgtcattagtgttagtgtattttatgtgtggcccaagacaattcttcttcttccagtgtggctcaaggaagccagaagattggacacgcctggcatacggcataccactgcgccatccaaaacagctgtgcacagccccacttcccagctgttaggggcttttttcatcttcaaaaattaagcaaagaggttcactaaagcatcagttcagagtgtggggcttctagtcagtgtattttagggaattaattttaggaanaaactatttttaggtccacgattatttttaaaaacaaaaatctagacaacagtgcatacatgcacgtctggatatgtaagcccttaccacacagcgagatgagagggtggccttggccaaagcctgcagttgttgggacattcaaaaccatgagcagactggagatttgagccacatgtgcaccagcgcagtcgctcagatgcggcctgggtgcgctgatctgggagggggactcacgggctctgggtctctgactagctggcacatgaaggaccttaatgacttgaacctcactttcagtttgagatcctttgaacttttgttagagtgagccataaagaagtggtcagccaatcagatgtttagtataaactgaactttagcgtaaataagctttaagagacacatttgatttacataataaataaacaagctacttttaggaacttttaagtacaaaagttgaagatagttgctaattaaacctaaatcttgcctgtacattaaaaacatactcgacagaatttccagtttagaaaactcctcaagaaccaaatttctgggacagctggggtgtttttctcacttagcccaagtgagtaagttttactgtaagtaaatatgcatacatcattaagtgaaggtggcatcacactggcagggaaagtcagatgggttattggcgaagaatgaaattttgctgatcttcataaattgtgaaatgataaaaaacaaatagaactcagtagaaatgaatggcaggccaaacaaaccggacagaaaaggggctacagactaaaagtggtaaattacagcttctacacataaatcctttttaccccaaccctctttaaattctggaacataaatgggggaacaaatatagaccctttctaaatccacaccagagaagtgactttggttgtttttttgtttggttttattttgtttttctgatataatagtgatttttgcctcctttcctcctctttgtaaggtcttgggtagaagaggttgtaaaagaaaatgaaactatattatactgatgataatagctaccattcagtgatagttattgacagatgttaatatctgtttcatagagcaaggattaaatgagttatacatagaacacttaaagcagtgttttatgtttataagcatgtagtatttaagtattagatattattatctttaatgttggcaattgtcttaacaatataacagatattctactaagcactatatatgtcttatctcacttgctactgttatgttaattttatagatagtaatctgaggcatgggaagtttaaaaagttgcctgagattgcacgggtggtaataactgcgcactttctatatgctgtacttagtactagacatttttaatgtatcgttgcatttagacctcacaacaatactgaaactgaggcctagggaggccagctaacaccaagatcacacagccagtgagtgatggagctgagattcaaacccaagcagtctggctccaaaagtgcatgttctatgctactgtgtactatggcctcctggagaagggctggtaggatgccacttcaatgatacagccctttcctccatcctcattaccatccctagcactgctttccttcagggtcacaacagtaggtcttcctaagccccattctccaatcatgtccagctcattgtacttgagcagcatttcggagaggaaatgcctctagaccctcccgttcaccctacagcgctgtttgtgccacgcttccctcaccaccctgccaagcccttgcttgcacacctctaatgccagaaaatcatcctcccaaggaaactcattctttctgtcttggggaagctctgtctggtggaaacatattcctcatattgacccaaatggtgctatgtgcctttaacctttctgtgcctcagtttattcatccatgggactttcacgaggattaaattagacaccaagtgcttaaaacaatgcctcatctgtattatgtttgctaaatattagctgctattactattttattattattagttctctctatggcttccaccccaaatgctttatagtacaaattgagtccttcttgaattcactctttttcacccttttgtcagctgcagcctgccctccaggatatgatggtggcctttgtgatgactttgtagactcaataccatatcactccagtctgctgtacatgcatcgttaagaactgtctttctgggatattgcttttgtacatcatttccctcttcagaagccaaactggttcttggttgctttcatactttggatggattattagattctctactaatttcttgctgatctctacccatgctcttctctctgagcatgaaaacttcctgtcttccatggactttcctcttcttatttgcaggtcagctcacatatttattttgtttaaacattatgtagttaaaagtctcaaaggctatatacgaaaatgttaacagcaactaataaattaacaggtcatttttattttccttttcatgtttttctgtgttttccaacatatatacaacaaacatataaattgcattgttatgaaaaatactgtgtttcctaaaagtacaatcatagactgtattatacaatactttccaaggtcaagaggatgccttgtgcagtcaagagagtaggattgcctttcatgaagatcagaagtatctccagccctcccctcagtcccttccctttttggtgaacccattggaatcactaattagtgtatttcaaactatatatattagccatagaccctttcttcaaacaaaaatgtaggccaggtgtggtggctcacacttataatacctcagcactttgggaagccaaggtgggaggatggcttgaggccaggagtttcagaccagccaggtaacgtagggaaacaattacaaaaatcatagtggcctctttaaaaattttttttctaatttttttwaaattagctaggtatggtagcacatgcctgtggtcctaaccactcaggaggctgaggtaggaggatcatttgagccaagaagttcaaggctgcagtaagctagtaagctgtgatctcaccactgtattttagcctgagcaacagtgtaagaccttatctcaaaaaataaaaaaataaattaaaaaaatgtagagaagtacaacatatttagcagatattatagattcttccttaaggagttgaactctgttgaaatggagatggtgaacctggaccccgacccactaactcaccatcctatttcaagacaacttctgagttacttccagaacctactttgggtctggagaacacagttctccactgaaaccaccaccaggccacctcattctggtaacaaacaactcccaatttctaggggttgctcagataaggagtgctgtaagtttactacgtattatgtaacatatttcatcagtcctaaaattttctgctgatctcctttttcccatccaaaatcaatacacacggctaatccatcttatagctgaatatttctgtctggccagaaagctttattatctcagaggtggctttcagctcagaaggaaacgagaaaaatttgtttgtttatacttctctcttaactccctagcttctgctcattcatcaagctaatagatggaatatttggctcttctgattcgccatctgaaaccctctgctctcttggcttctgtaatgtcctgtttaactggttcacttcctcatattattttcctctctactccgtttgctgttttcctttggccctcagtgctctgtttctgggcgtctgctttcttgcttccctccctaggcagcgaatccacttctagggttaagcaatcactgcattgcgggtggtgcttagtgtgtgcctcagtctgtcagacagaggccagtcctatagctccaatatgttgtggagccgtctaccttgagctcaagttaattcctaaaatcagtatgtctcattccagaatcctttactccccactatttcccgtctgaacatctctattctgccaatatcaacagtattctctcaatcaccaaactcaaaaccttggattttatttatcttttatattcttttgtcaccaaatatcttggctttcaccttgggaacttctcttagatgtctctttgctcatcacttcatgtcatggaattccagaacacagtgctgtattaccacatacagttgttaatcaacaaatatttcttaaattggcatctagtccaactctgtcaacgaaattttaaaagtttgttaacattctaagaaacctctgcctcctgtcttgggtcctgacagtttatccaatacactgtcaagttaatagtgaaaacacccagtgcggccaaagcaatcttgggaaaaaataaaagtgggaggactcaggcttgctgatttctaaggttactactaagcttgacaagtcctggtagtgtggtactggcataagaatagacatagatcagctatgtgtgtggctcacacctgtaatcccagcactttgggaggctggatcgcttgaggccaggagctagagaccagcctggccaacatagtgaaacctgtatctakatagatagatagatagatagatagatagatagatagatagatagatagatggttatcgattttttaataactatagatcaatggaatggcatcgagagtccagaaataaaccctcatgcttatggtcaattgggttttgacaaggataccaagacaattaaagaggaaaaaaatactctctcagacaaatggttctggagacaactgagatatctatatacaaaaggatgaaattgggtgggtatggtggctcatgcctgtaatcccagcactttggaaggctggagtgagaggattgcttgaggccagaagacaagcctgggtaacattgcaagacccccatctctataaaaaatcagctgggcatgatggcatgtgcctgtagtccccgctattctggaggctaaggtgagaggatcgcttgagcctaggagtttaaggatgcagtgagctaaagctaagatcgcactccagcctgggtgatggagtgagatcctgtctctaaaaagaataaaattgagaatgtaatacagaacacatttcagccattttttaatgctctgcagttactcgaaaggttaaacatagacttaccatataactcagcaattctgcttctagatatatacccaagagaggtgaagatgtacatccacactgaaattgtacatgaatgttaatggtacattactcgtagtcgccaaaaagtataaacaaagaagtgtccattaattgatgaataaagaaaatgtggtatatttttggcaatatacaggaatgaaaggaatattattcattatttaaaaagaatgaagtactgatacrtgctacaaaatgaatgaaccttgagaacattatgccaagtgaaagaagccagacacgaaaggccacatattgtctgatcctatttatataaaatgtccagaataggtaaatccagagcacaaagtgggttaagggttgcctagggctggagggtgtgggagtaaatggggattaactgccaatggtgcagggtttctttctggggtgataaaaatgttctaaaatatgttacagtgatggttatacaactttgtgaatatatcatactaaaaaccatagaattttacactaaaaatgggtgaatttgatcatatgtgaactatatgatatactctttaaaaaatatatttaaattcctcttatgtctccctattgattagaaggaaaagttgccacctctctgacccttcttctgcagccacatctccctctgaccataatcaagaagtactccttgcatttatgaactcatgtcattagatcgggcccatccagataaatctgagataatcctcacatcttacaggtcttacctataatcatacctgcagagtcccttatggcatggaaggtgatgtattcataggttctgggagattaggatgttgacattttgaggaaccattatcctgcctatcataccctgttttatacttctttctattgcataagagtctcacacatgttgacagatggatggaaaaaatatattatgcaggtactaacagcagcaacaatgacagctaaaaactgagctatcctatacatcagataaagtagatttaaaggaggaaagcactattagaattaaagagggagttttcaaaataattatccagtcatagaagagatttttaacatacctctctcagtaactgatagaacaagcaaacaaacaaaaatgtccataaagatataaaagatttgaacaccatagttaacaaacttgacctaaatgatatacagagcattgagcccaacaacttcagactacatgttttttacattggtgcttggataattcatagtccgtattagaaatgaaaatgttgaatatctgttattcaaaaggttataaaaaaaataacaaattaagcccaaagaaaataaaaggagggaaataataaagataaaagaagttaatgaaatagaaaacaaacatactacagataggatctacaaggccaaaagtttgttgtttgaaaagaccaataaaatcaggccaggtgcggtgactcacgcctgtaatcccagcactttgggaggccaaggcgggcggatcatgaggtcaggagttccagaccagcctggccaacatggtgaaactctgtctctactaaaaatacaaaaaattagctgggcatggtggcatgcacctgtaatcccagctactcaggaggctgaggcaggagaattgcttgaactccagaggcagaggttgcagtgagccaagatcgcaccactgcactccagcctgggtgacagagcaagactccatctaaaaaaaaaaaaaaaaaaagactaataaaatcaattaaacactagcaaaacgtatcttgggaaaaaatgaaaagcatgaattgccaatatcaggaataaacaggcaatattactacagatgctacaaacatttaaaagataatacaaaacaaaagttcacatgtactacacaaattcctaataaaatacaagttatcaaaactgacaaagggagaaatagaagatctaaatggtcctatacctgctcaggaaattaaatcaataatttcaaaccttcccacaaagaaaactctaggcctagatggctttaccaacaaactcttttttgtggatgaatagtattccattgtgtctatatatcacattttctttatccattcatctattgatggacacttaggttgattccatatcttgactattataaatagtgttgcaataaacatggaggtgcaggtaaccctttagtataccgatttcctttcgtttggataaatacctagtggtgggattactgcactgtatggtagttctatttttaattttttgaggaacctccatactgtcttccataatacctttactaatttacactcccaccaacagtacacacatacatttttaaagcataaaacagtgctatatattatcccttggcacatatgtattctgcattttaaaatggctgaaggatgcactgaagtcacaatagcagcagcctctagaggagtaaatgaaaggacagggtttgaggataagaacaaaggagacttcaacttcatttttattgtccagtttcttttattttttttaaaaaaaggcaaacatggtaaaatgttaacatctgttcattttgggtgatggctcatagggtgttagtcatattattctttgtaattttccctttgtttaatttctcaaaatgaaaacaataaagtcaagataatagtatctttcatagtttagtcttaggcttatttattgtttaggtattttatgttcctgtttgtcttaagaaaaaaatgtgtataaatataagtatagatgagatagttaaatttcctttttttgtttgtgttcacaaaacatgcttgttttatttaacattctttggtatcaaaatgtggccttcatacaaacttgtgaggagtaaaccatgagggttcacagttttaccacagtctgtatgttagcaaccatttcctgtgatagacatgctcatgcacctcaagtactagaagtatccatttgtattggagccaaaatatccgcaagcagagaaacaagaagtcaaaaatattttcctctttggtgctaaagatttgctgctgtgtgattgttgagactgaagttctgaaagcaccagtgtttgccggatctgtctccagcttgtctctacaaggtcatttccaaaagactgtcaaaagaatggcatgtcccgccttttccaccaccgacacaccctgcatgaaaaccccaggagcacagaagtcctgcttgggtgaggataagggctctctcaaagtctattatcgaaggaaggcagacagatgggttaaccactccaatggagtctatacttttacagacatatcacatattatgacaattaattattaggctggtggttcagcaacctttcgaagtgatcccaagatgattgctgtgaccatatttgaaaagctaacagataaatgtgggcttaaaacagactatatgttattcagctaggcctcaaccataggcataagtaggagtgaggtgagggcccttgtggacccaccagggtcttccacaagagtagaactcttgccttgttcactcctttcataatcaggcaaaggaaggagttattcaaaaggaggaactgagcatgttcaaccgagaccctttttgctgtccaatttccagccagcctgtcacctggatatatgtaagcactctggtctgctcttggctgtgtgctctaagggagcccactgggtgttcagcaagatcaatggtgaggattaaatctttctaagtcaagggtcagttacaaacaagatctctctgctacagatctgaagctgtattctctccagtcaattttgtcagtaacaaaagcagtattttttgttccatctgtctatcttctacctcttaattggtttcaaacttaagaggtggtagagattagtaattgctccccacaaaagcaaaaaaccaacctgatgatcaattaagatctcaaaaatgataaattaatataatccatgataccagccaaaaatttgtataccaaatttgttcttacccccatagttatcctgtctgaatagttaactgagcactgctcacttttagattccttaagagttgttaaaaaataagtctttgtactctatcatggcatgcatgaactctcatagcttgaaatgactgcatgaaaatgtacattttataatttcttatactatttacataggtataagtatacacagaaagtgtgtttaaatgtttaacagccaaaaacaaaaaccaaaaaaaagtcactctgctgtaacagaacactgttctgcatatggctagctgtacattggcagaacatagcgattttaaggatgaattagtgttgtaatctctttgggatttcctttatatttgcggtggtttatgactgacatttcatgtaactatagctttctgtttggatttaataaaagattcatttctgtggcaagatacacatttgcactccagtgttgaataaaagctactgttctgcaagggtataaaatgctgatttataacaacacgttccaataacagygatctaattctttcaaactatttcttcccaggtcccaggaacagcatggctccagcaaaggatgactcttctcttccakaatattcagcctttaacacatctgtccatgctgcaattagacatggaaattggaaactcctcacgggctacccaggtagagtccttagcttagcaaacttcccttcccgtggtagacaaagcagggctgtgtcctcagggcagtatctccagtctatctgccctcctgggatttgattcccacggccatttctctggaaagagaggacattatcactcttgttctaaccgtttcccacctcttcctctgtggctcctcctcaaggcccctaagccctaccacttacctcactttgctcagatacctgaaatcttaatttgtctttctaatctttcatgatccctcctgatatatgtcctagaaagacaactatttattcagggttttcttttcccaattctaagactccgcctgttcccaattacacagcttccatcattgtcatggtgcaagtaagctttcccagtggatcatcaaggagaagcttaccgaagtaacaaatgccttttgcaaaacatatctctggggctgctgaatgaggagataggaagaaatggtttaacctactcgtcctaaccaaaaaaaaaaaaaaaaaaaaaaaaagagagagagagagaaagacagagagaattaactgtagcaggggtgaaaggaagaaatgtcactcttatgcttcatggaaaatacggattttaaatatatgtggctatcaagcacagcacatttagctaacaaagagagtctctgagagctacaccctcaaccagtggtatagctggggaaggaggttgctcctctgattatattctctaagagtgatatcttttcaatacttttaaaatatgtgggatgatggttaaggctgtgatgtaattaatcaatgtttacaatgagaacatttttggcgtttgcaatatgacaagtcttttttgactgggattgtcccatgtattgcaagactttagcatcactagctcatgcccactaaatgccaggagcacccctatgccctagtccttgtgacaaggacatacacacatgcacacacgtttctgggtgtccttgcttgtgaagcagtgagacatgtctagttaaagcaccagaagtcaagtctgagaagcatctagagacagcatctagggccgcatctttttatgtttccacacccacaacccagtgcagccttggcctcagactccttccctgaaattagaacctgcctctgtgcttctscctcagtaaactgttttgttttctttgctaggctgtggttactggttccctccaccrtctcaatacaatgtttctgagataccctcatcagacccaccaaccaagaccctctggctctttgatattgatcgggaccctgargaaagacatgacctgtccagagaatatcctcacatcgtcacaaagcycctgtcccgcctayagttctaccataaacactcagtccccgtgtasttccctgcacaggacccccgctrtgatcccaaggccactggggtgtggggccsttggatgyaggatttcagggaggctagaaaacctttcaattggaagttggacctcaggccttttctcacractcttgtctcatttgttatcccaacctgggttcacttggcccttctcttgctcttaaaccacaccgaggtgtctaatttcaacccctaatgcatttaagaagctgataaaatctgcaacactcctgctgttggctggagcatgtgtctagaggtgggggtggctgggtttatccccctttcctaagccttgggacagctgggaacttaacttgaaataggaagttctcactgaatcctggaggctggaacagctggctcttttagactcacaagtcagacgttcgattcccctctgccaatagccagttttattggagtgaatcacatttcttacgcaaatgaagggagcagacagtgattaatggttctgttggccaaggcttctccctgtcggtgaaggatcatgttcaggcactccaagtgaaccacccctyttggttcaccccttactcacttatctcatcacagagcataaggcccattttgttgttcaggtcaacagcaaaatgcctgcaccatgactgtggcttttaaaataaagaaatgtgtttttatcgtaatttatttccccccagccattgctcactctgtctagacttcctgccacttccaattcttctgtggcttttcctgcctttccttttgacctcagtagtcctatccctgggaaggccactttgcttctctacctgagcacccctgatttctggaacgctgctgagccctgccttacttttgcccctagggctgaagctagaggcctccccgtaataggcggtggagttgctctgtgaggatgttcatggtagacactaagagggctgggtgggagatgcttggctctgtggcatctgttcagcgaggcttttcctatattgcatggagttagtcattgtgattgtagctttatttcataatatattaagacttgcactgctatttactagcagtgagaagaaacctcaggaaaggatatgaaaaagcaagtggccagtgtctgggatactgggccttggtaaagcagaggagggcacacccacagtcctcttattctctgttttactgcttgttttgaggttctggggtctggcaaagaggatgcagtttgacacctgcagccctttctcaatcccactaatgtcttactaatgtggaacagtccatattagctccagagagtgtcaaacccagagacatgtgtgcaaaaatgatactcttttctgcattagccccaccattgtgttcaccaatgcttggaacactgcctgaaggcactcattttttaatttttattttatttttaattttttatatctttatgagacgatctcactctgtcaccaggttggagtacagtggtacaatcacaactcaccgtagcctcaaactcctgggctcaagtgattctcccacctcaggcacccaaatagctggaactacaggcatataccgccacacccagctaattttattttttgaaaagacaaggttccctatgttgcccagctggtcttaaactcctgggctccagcaattatcccagcttgggctccaaaagtgctgggattacaggcatgagtcaccatgcctggcctcattttttaaaacaaatgaataaatggacaaatgagtaaatgagaaagtctcacaccatgaaagatgctagtccaatgagctgaatacagaggtaatataaatgtcttccagctgttgcttttctgttctcaagctgcccctcctggggtaggagcataatctacatcactgggcagtcacaggacactctatagcaaggttgtagcgtcctctccagtggggggagaaaaggaactgtgcctaccaaaggtactctcttgtcagcaatttccatttctatactttatgggacactagaaactaaaagcaacaaataatctgatataagtccttgtatagtcatccttcaattcagtagcaatattttctggtcactactaacctgtattgtattaaaatgagactattggaaggaaatggtgctaaaactaataacatctcttaccaacctttacccaactcctgggttggcaaacagctgaccaaactgccatcacctcccacttggaagtgtatggccgacagcatgaaatagctgagcccagatgttccttctgcatcctccgaatcccagggctgggtgtaggtagccgttggaggccatcgctacagggcacctatctgttatcgctgctgtcctcccaacagctgtctccagttctagttccttggttttcaggcacagtgggggatgttctgcacccagtggacttcaaaagagttttgaagacttaattttttgtaaaacaagtacttgagattttggtttatccataatagaatgtatttcattagattctctgattctatataagaatgtgaaaagattgatatattgttgttagaaataatgttatttctttccaattttttttttttttttttttgagatggagtctcgctctgtcacccaggctggagtgcagtggtgtgatctcggctcactgcagcctctaactcccaggttcaagctattctcctgcctcagcctcccaagtagctggattacaggcatacaccaccacgcctggctatgttttgtatttttcgtagagatagggtttcaccatgttggccaggctggtctcaaactcctgacctcaagtgatccacccacttcagcttcccaaagcactgggattacaggtgtgagccactgtgcccggcaaatttttttacctttacagaaggttttgcttatttaattgtgagctcatttttctttgttacttttgtccccccagatttgggggacaaaataaaattaatcttttaaaatgtgtcagccatatgtatggggcttccatttggggtgaggagaaagttctggaactagatagtggtcatggttatacaacatcataaatgcaattactgccactgaattgtatgttttaaagtggttaaaatgttaagttttatgttttattacaatttttaaatgtgtcaaccaactttatagtacataaattatatctcagtaaagctgttaaataaataaatatagtaaaaattttagaactaaaaaaagtgtcaatcattgccctaagaatataaactataaaataaggtattagagggaggtcaaggaagggtaggagtgaaaacaaagtgacagtaaaagagagtattagctctctattgctgcgtaacaaattaccccaaaacttagcagcttaaaacaataaacattcataacttcacacattctatgagggtaaggacactgggagtggtttagcccagtggttctggctcagggtctctcgtgagattgttgtcaagcaggcctgtggtcatctgaagacttgagtggggctgcaggctccacttttaagctgactcactcacaaggctcttggctggaggcctcagctccttgccatgtgggcatctccacaggctgcttggatgtcctcacacatggcagttaacttcctccagagcaaataaacagggagccacagggcctttcatgacctagtctctagaggtgtacactgtcacttataccatttttctatttgttagaaatgagtcactaaggccagcccatattctaggggaggaaaatcttacttttcaaagggagtgtcagatttgtggacttatttcacaccacatcagaggaaaatggtctcgtttagcctcctggggaatagattgtcaagtccacatgcatttatcaaatgctgctgtttgaaaagagatggtagaaaaagcattcaactttgctatttagcagtagactaaccatgaacaaatcacttcatcctctctgtgcctcggtttttttcctggtaaagtgatgagttgaattagataattgctaaagtctcatatccctagtgtccagaacaatgcctggcacacagatattctataaatgttggttgattggctctcaaatgactgaaatccaatgggaggatgtgaaataatactgtgctaaaaaaaatagcctgagattttctaaactcatttcctaaatctcattttctgaaagtattctaataaaagctgctaatttttttgagtgcttactatatgccaggcattgtactagctgctttaaaaagagtatcttgtttaacataatttttttcttgcctcttttttttttttttttttttgagacaggggtcttgctctatcacccaggctggtctcaaactcctgcactcaagaaatcctcccacctcagcctcccaaagtgctgggattataggtgtgagccaccatacccagcctttaatataatttttaaataactggaagtaatgtttacattcattcaatcttaattgtaaaaggcttacttggttttcatctcttccattttttcaatagccaatctttgttcaagtgtaaaatgatttatgtcaagaaaataaccaaaatgggcttgtaaacataaacatttgtgaataaaacattttaaatgatgcagaggaattcactatttgaagaaacctttttgtaaatctttttgtaaatgcaaatttttgcttttgtatttccaaaatctaaatacattgacttcggtttcctaaattgaggttttgctgcacaggttttcctgaagaaggattcatacccatgtatcaggtgctggggaggaggtatagtgaccagagaaatgatacaaacaaaactaaaggcatggcccctgcacctaagaggcttacaacctaattctatgatataaagttcttttcagcttaagtgtttttaagaaaattggccaggtgcagtggctcacacctgtaatcccaacatttggggagtctgaggcgggaggatcgcttaagccgaggagttcaaaaccagcctgggcaacatagtgaacccccgccatctctacaaaaaaatttaagaattagctgggcatggtggtgcatgcctgtagttccagctacttgggaggctgaggtgggaggattgcctgggaggtcgaggttgcagtgagccatgatcacaccactgcaccgcagcctggataagagtgagaccctgtctcaaaaaaaattaaaataaaatgccagctgtattagtccaggttctctagagggacaagactaataggatagatggatatatgaaagggagtttattaggagaattgagtcacatgatcacaaggtaacgccccacaatagactgtctgcaagctgaggagcaaggaagccagtccgagtcccaaaacctcaaaagtagggaagccaagagcctctggcaaatcaaaggtataggtccaagagtccaaaagctgaagaacttggagtctgatgtttgagggcaggaagcatccagcacgagagaaagatggaggccagaagacacagccagtctagtccttccatgttcctctccctgcttttatcctagctgcactggcagctgattagatggtgcccacccagattgagtgtgggcctgcctctcccagtccactgactcaaatattaacctccttcggcatcaccctcacagacacatgcaggaacaatactttgcatgcttcaatccaatcaagttgatactcaatattaaccatcatactggccgatactaaatatattgaaataattattatcctttgcagtgaccacttaaactttaaatcctattttttgttcaagtagagaatagtcatactgtgtatagactggttcctgctgaaaagccctgaccatccctgctacccaggtggattcagatggtatagaagtaaccaccacgtctcttgtacctttgccctggtgccatgggagccaccgccaggatggcagaagaggagagcggcaactccctgggcctgacatcagggatttgtggccatcaggaagctggagagatgttttcattctcaaactaattcaccaaagtcaccagtcattgactgcacttcagatatttcatttaatcacctttattacttttctgacaatagagataatacatattactattacaatttttaaaaatatagaaaacataacaaaattaaacaatccgtaaaccaccacctggagacagccatcgtgaacctttacacccctgtaacaagacagtaattaagtggccccttcccaggttggttttcaaatcctactgtgccctgctgagccctcttagagattcaagatggtaggtaaatgtcagtcagtcttcaggaaatcttccttttaatctcattaatgaggtccagatgttcccaggatattgactccaaagggccgtggtttcacactcacaccccaccctgtgctcactctcctccacgggcctcaggagggggcctggacaccgaggggccagtgtgtgatcattcaggccagcaaggaagggactctgcctctagtgcagaccagagccttgcagagccagacagaggagataaacacgcacgctcctccttcctcgggaaaacaggtaaacaggatttactgggcttttatttgcattaaatgaatcgaagtttagatttgccctttatgtcaacattttataggtgaaatcattcaagctcatgctgtaacatgcactgggtgaagataaaggcacccaagcccggccagaccccagcagggggtgagggggcatttgatgagtccctgctcccaggatgctcacttgcagcggagcacaaacgtgaggcttggaca

SEQ ID NO: 95706 - DNA, 38403 bp, Homo sapiens
gaccacatcacagggaggaacctacaccaaggcagtccaggcttaggtttcccagcaacctgtgacctggctggaaaatgtgaactgtgccaatccgattccctttgcctggaatccagactagaagcaaggtaagctttgccagttagccatgggaactgcagctgcaggatcatgagaaaggcaggaccacaagaacctctgccaattgacctgcatggaaaacaaagttgggcactgggagagctgaagaagcagagaaagtcagggttggttagaaggaagaagcagcatttagagttcagttgagtcatttcagtgggtaaatgctagaagagccagaaccaagctctctggaccctggcccagcaccatcccaggacagtcctcgtgaggacagcatttacagtaccttgtcctagagatcagggatggatggccccctggccttattgcttcataggtatccatttcacttgtgttagattttgagggaggggggttatctctgttttttgcaagtacaagagatttttctaaaacacttacttggcatcagtgttagaggggcgttggctcaaaaaagccatgaaggcgtagctttgtgataacagtagttggcaagatgataatgtccagatcatacacaaatattagctccactgaactctgatctcctcagaaccagagtacctgctttaaagggacatgagccaatgagaaatcatgcagatgaaggcagcaagtataatgagagggttggaaagtttctcacacaagtactgaagaaatacgagattttttactcgaaaaagtgaaaattagggagacaaaggatgtttctaatatatgtagagctgccacgtggaagatacaccagggttgcattttgttcctctaaaggcaagaactaggattggacagaagttataaggagctaggatttagcccagagtttccccacaatggaatgagagctgcaagatagggagtatacagcctctggaggtgttcaacaagaggccaattgaccagctaccttgtcccaggagaggggagtttgtactagagaatatctgatattatcttcagtgttaatacacaatgagtttatctacaatgactatgtatattacctctaggctctaaacaaacgctgctgaaagaagctgaakatcaagcagaccgtaaaatagatattcctccttatctctagaagactccaagtggtccagcaagagaggagtcatgaaatacctcagatcctctctcatctacatttgtctctggggctgttgagacaatgcctctgtcaggggaatgatgtcgtgggacctcctcttattgagattagcctctcagaagggtgtctgctcattgccttttaagcagatggaaaattctggaaaggaactttattttttgaagcttagaggaggtgccggttggtgccaattttccaaggataaaaaccaaattcaactaatttaccccccactgggggagtacaaaaaagcaggcaagctaagtctgaaagctctaacaatggtttagcaccacttatccatgggccttcaggcctaccacctaccaatcatgcaagtaagttcagattattgcaaagaccggacacctctgcggtcctgctagaacaaaccaaacaaaaatcattctctgtgtgtcttcttttctgtgcctgccttggtcacctccactatccacgtttaataatttggcaaaggacatggcaggtggagagaaatcccagtattctcactatatcagggatgctttctggacgtcctctcaggaaacaggaaacagcacagcagaaaacaacttctgggagtctgctagtcaaggcctgggagccaaggtgttgagcgggtaacctaccactcccactgatgacacgaatggtccgcttaccaacatccctagcaaaaaaaaaaaaaagtcctttttttgttatttccatactatgtcctcacacaaggattcgattccagatccagtaaaataggaaagtgccagaacagaatgccttcagatgaaagaagtgaacggatagggtttaaactgcagcagtgctaaattattgttagaaaccagaaccattttggagaatgatttggttttctgtcaaacaggccaggtccattgtgcagcacagaatgaagccccggagcaatccggcatccttctgtgatggtaaggcactcagcccagccccatgttaggtgcaacccaggtatctatgcatgtcctggccaaggtggcaagtccagcagcatttcccagagctcgtcctctcccagccctctttgtcttccattgcagagctgtgcattccactgcaaacagagcctgccattgagccatttttctctgcactgcacatagtttctgctgccaggatgagtcaccatgcaacacataccctcatcccctccacgctgtacttaaaatactctagggctggccaaacagaaccccactgtgagtgagcacgtgtgtgaaggtgggattggcagctcagccctgcggagccctctgaagagcagtctgcattgtgtttggcagagagattcagagagccaatatttggggaggggcagagaggggaaggtctgtttttcaaatctggttcgacctcatgcagcctgccaagttgcgccctctcttttgcaggcacccctcactttagcttctctgaacagaaggatcttactgctaggggttgatttgtcctgcctcttctcccagcccagcttctgactggccaccttgctacaaacaggactgctctgtcctgcttttacctgccagcctgtctgcctccagcgtagatttttcttcaatcgcaagagcatctattcatttcctgagttagaacatgtcatcctcactgggacggaggtctctcaccgctctcctgccattcctgctctccgcttcccctcatccacccacagagcactaaccttgggcagaaccaatcacaggactccagaaccatgcctcytccccagcctgcactgaaaaaagggattaaaaattgttctcttcctcctgagcctttaaactgaactgaataatttctttctcctttctgcagagaaacactgggtttccatacgcattgactgaaaagttgtcttagttccccatggtccacaccctcttccacgcccagccacacactccacctgccggggcacccctccctttggagaaccacacatgttcggctttcaacctgctgctacagcacccttcacagaaggggccttggaacaaaagcccagctcagcacagcccaacgggacataaagtacttgagttattcattacttgagttggaggaggtcacasagcaggaagcgcactggaaagcaaggggaaaggtggcagagagggtggggaatgcrtcagggtgaccttctaggggctgatgggaactcagagtcctggtatggggtgggtatcagagtgggaaggtgacaaagtcrtagcaacagccccaaggttagccaaggtcaaatggaaacagctgattataattaagctagctacttagctcttgccatgcctcaggcactgtgcttaacactttcccatatcgctccttttatccttgcaataatgtatcacttcaattttatgactgagggaacagycctggagagaacaagtgacttgcccaaggtcacccagctagcatgcatgttctgaagctgggaaggtgaatgtaggtctttaccagcttgttctgtgtgatgaagtggttagatgagtggtacaattccagatggtctagagtggcggggcaagtggagtctgagatgagctactgagataaatctggttcctatagggctgagatcatgttttccagcagcaatcccaggactgggtggaaacctggaggttttcaggaagcctggaggaggctggcttaggatgagctgctgcattggctgtgcagacgtgaccctcaggacttcatctgaacctgtgaagagtttccatgcagggaaggggggatgagtagagctagggacctaaaatttgagaggggaagatattccccagtggaagacagtaaatcaaagactagagaccaagcatcagtctactgggtgtttgctacacctctgaagagctaaggtaggacacttgttttaggaaaaaagaaaatctgtcactggagactctctttatatattttgtcttaccatatgcttcttttggaaggggggttgggaatcaaggtacaggaacggagtgggcacaagtaagggcaccaccaactcccagaaccgcctcatcccttcccatgctaccctttccccactcatctctttttgctgattctgcctacaggttttccctcctgttacagtaatggacactcaacaacacatacccttcccagcaacctgtcctgctggaaaactactcgataaggtaacttctgcctgaaggggaccagggtcatcatacccgcaagtgcagcatcttcctgcagctctcatactaccaagctggggtttttccaacataaacattacaggtgctaaacgagaggtggcttcctttctcaataagctgttctctctctcggatgcccttgacagagccctgcagcctcccccactggggcttggtggataggtggtcgcttctcccccgaatttcaggaatgtttaggtttgcacaggtcctgcaggcgagcttggagaaggattagaaaaatgctcattcttaatcagttcgggcttgtctttatgccagcgaggttgaccttggggacagaagggtggccaggataaggacaagcatcctggtattggggaattctctgatatggggctgggacgtcaagatgggccatgatggcccctggggatagggcttctctgcagtggaagcagaagcatcccggtgttttctgctgtgtcactgtcctcagagggatgtataaagctgcttgggggctcataggagagggatgaaaccaagagtttggctttccagcaacagcggacaaagagtgggaaggggtactctatgccccaggtctgcaacatcttgccctatgcgctaggttttcccaaaggtcctttggctccaagaattttacagcagaacaaagggatcgatacccccaagggggcataaaagcatgccaatgagaatacccgccgccgaccgggcaccaagaaagtcctcggtggctgggtcacgtgcagatattgttgcctggggtctagactggcctgagtctcaattggtttctacgggacaactcactgcgggctaccgccctgggtgggtttggcaattgtcctgctcgaggtggttcaggccgcccacaaggggcacagccgggcagtcaggaaccggggctgccggctgggctggcctgcaaagaagagggaagggccggaactgcaaccgcagtggcggggagtgcgagggggcggcaggtgcaggagcgggaggcggggcggagctgggcagagtcctcgccagtccggcgtcccggagtgaccttcccccaccccgccagcgcccaggaggrgtggacccacagcccagggaggccgaaagcgcgggcgggcaggcagaggcgtggaggctgggccaggactgccgggctggggtcctcgaggctccgggcgacccaggtgcggatcccccagccacggaaggggcggttcacgcccagccgggagctgggagggggctgcgcggcgctgcctgcgcgtccctcaccgccgcccccgcctcctcctcgccccgcgcccaacgccccgcgcccagcgatccaagcggcccctctagccccggcggctcctttgtgccggccccgaacccgccctctcgggccgagtccctgcccctggcgccggcgattggccaccgggccgctagagggcggggcgcacggccgccggggcgcggtatatagtaaaggtagggcgggcgcagccaattcctcggctcctggcgggagtgccggtggcgccccssagtccgcttgtccgtccttccctctctgactctcctaccccgggcctgtctctgcagaggtcaggggaggcgggggcccagcacacgtccccagtggcagcgggagcggcagctacgggttcgcggagcccccgaccccccaagggctagaggagcgctcggcggaccaaagaaagcccgcgagcggctgcgcgcccaccaataggtgcggggctcggagccgcgcagcctgcgccgtccctccctccgcccccgccccgccgccgccgccgccgccgcctccccctcctcctgctcctgccttggctcctccgccgcgcgtctcgcactccgagagccgcagcggcagcggcgcgtcctgcctgcagagagccaggccggagaagccgagcggcgcagaggacgccagggcgcgcgccgcagccacccaccctccggaccgcggcagctgctgacccgccatcgccatggcccgcgggaaagccaaggaggagggcagctggaagaaattcatctggaactcagagaagaaggagtttctgggcaggaccggtggcagttggtgtaagtacggggtccgcagctcccggccgccgcgtstgatctttcccsggcggcgcatcccctgcgcagggtccgcggccggttccgcacccaccgcgctggccggggtggcgggggcgagggtggtggacgctgctgggtcgcgccggcctgggcttgcagtcctgtgcggaatgcggtgtccccagagtggggcgcagggtcggggctggaacacgacaggcggaaggttatgcatatcgtagcgatcttggcttggtaatttgcagtctttcctaccgtgcatcggttgagccttttactcctgggaatagtcaggctctgcgagactacatttgtctctcccgtgtcctgagtccttaaaaaaaaaatgagatctggggtcttgagagaacctcgtgaggtgatgggatctaatgcagacgaggttgtgtgttacagcatctttcttctagtctaaatacgtatctcaaaagagaggaaagagaagggtggagaggaatccatccacaytgtagtatttcacagcgatggctaaggatttccctccatgacctcccctggagtcatcaccacccagaaatggttcaataagctccatttcaggactccgattcttagctttggcccgaaacctggcaaagtctggttgttttcaaggtctacacagacagttgtggatcagtcagtaggttgggttgattatggtgaagggaatataaacgcagagcagctgatcttaaaatattttgtgcagcctgttgcttggttggatagacttttttccatcgaaaattagatttcttgttttcagcctctccggaaaggtgacttttttttttttwaaaaaaaggtcattttgaagggcagagttgtaggcgaatctatgagtcgtgactgcgtgagggaaggagggagggaactccccctgctgcatcactgccccctcctcctccmacatcwtcatcatcatcatcatcatcatgaccatcaccaccaacaccactggcaccaccactgcagtcattcagggagtcctgaacagaggccgattggtgttcctgcttgggaggatctgtgggaatcggcaggagaatgagtcagggaaatagtgcttagctgacattttgaaatggaagaagctggaatatatgaatttttgtaaagaaaaaaaaatgcagcctgtgagtctctcttgattgaaaattaaagggttaataatgcatcacacttcaaggttagtcaaggtgaagcgtctttccaaggtgttactgggaagcataggtatccctgagccatggaaaatgtagttctttaatggcttttagcttttgttttatattttattttggggagacttcttcattgagattattgtcatagtgtctcaggcataaaggtagtttcctgtgttttactgtggaaaggaaaacctgaagaactgtggggtgtgtgtagaatgaacagctccctggcaactccttgtaacttgagggaggcctggaaggtgcactgcggtatgggcacccttctccccaggttagctggggcttccttctctggtggtctgaccctgctgcgtcacaggggcaggggctgcattgactctaggcacattgtgaaatttgccttcttgtctttttccccttagtataatatgcatctttgctcattccagtttcatgcttctcagaataatacttgctttagagggtaaggcagtatggactgactcatttttaagccgacatttaatgggcagcacctccatgagagagagaaagagagaccgtgtgtgtcaatttttatgtcttgatatcctatccagcaagctatcagtatgctgatttgtgaatgtagacccaggactgctgtacttgcctcctcttcccttccatgttccacggtacargtgctgggctaaaaatcccctttttgttttgtgctaatatgtctgcccctttctggcagtgtaaaaactgtcagagcctctcttaggtagaaaaggcggcagcaattaccgtctcctacggagaaaatgccccttttccagcactgggcccaacatggatgcccttggggcgagggcaggatgcccttggctcgattttgcttataggtagattttcaccaagatggacgcaggagactcgcctgtcacctgctggagaaatcacagcatgcaaatcactttgtgccttctgcctttttattaggttaatacagacattggtaggttttatatttacagctaggcctggatgcctgcctgtgaccttttgaagggtacacactgtttgtttgttcatttgtttgtttttccaaaaaaacctctgtattacttttttttaaaagaagaaaaattgcgtgaaagggagatgcctctgaagcctctcagctcccctcayagtgccaccccagatagttggtgtgacttatctagccttttttttggctagtggggagcccctggtggcctgtgtctgagtgagccactgcataggcccctctagtcctgagtgctccactctctcccagtgacctcacggcagtaactagggagattttatcaactaacatctcagagcaaaaagggaaaattcctcacttttcttaggatatcgtgtgggcagaatagaaaggctgtctgtttctgagcttaatcggcgtacttgcaaaatgacttgtttttccrttgctcttatttgtattttaaactgtagcctcaattatgtaccctcttatgttgttagaattaggcatctggagtccagggaatgagtatagagatgtttcagttgttcgaaggggcacatgtaggtaagstaagagcaccaagwtgaggtgggggtgggsggcagcaagaggaaacttgaatcagggctacgatagctgycttgctgactgttacaccaactcttgcacctcttaggagcattcactggaaaaattttccagatctcttgacgtcacmrcgttgccatttgcctactgctgcttggatacagaatgcagcacttaacccttgtcctgcggggagggagtgattgagttgggtgctgtagttctggattacacaaccttttctttcttccttatctttrcttctgtctttgcttttttccttgttatttgcttttgatagaggagaaaaaggattatgattaagcattttgctgtggttttgtgtgttttgcttgttttaacagctctgtagcctgatttcctttaactgtttagtgcctgataggaaarttgggcttttaaatgtatggacagggcaacaaggctaattcctgcagttgtgtacccactccctccctggccccctcctaccacatatacttcttttcaataatactgtttttcagtggcttttctccaagtaccctggcatttttaatgcatgagatctggacctttttagcagtaacctaaggctcctttgtgcagtcgtgcttctgactcgataaccttacagttcacttgttccctgtttygcattcacattgagtygtttggctggcacaggactgccaggcaatgcctagtacagcctgttactatgcagctaatcagggagataatccttgtaaaccagtaactgatagccaccctcattcccatctatgtgttgagtctttttttttttttttttttgcttttgcagctatttcagcctccatcctgttgtcttgttaactatgggaaaaagaaaatgcagcccagcaagtcagtcattattcttgttccagttccagaagatggaattaaaatgtgctggtcattttcactatagaattttctttttttccccttgtcttgtcctccgaggggaaagagtgtgctttgttgataatacaaaccaaagggagagtgatagtaaaaaaaacaggaggatatcatcactgggtttctcaggattcattgctctgccatagcaaaataaccctcaggcatctgagcatttggagaaacagcagagcttggattgtagtatttaaatgtcaagggatatgcaagcaaagaaaacataggtctctaagggagtatactgtcatattttaaattcattgcataagcatccaaacatagctctagattttattggtgatcttcatgattttttttataattttgagaataaaaaatatggatactttttttaaaatttagggaataaaaaaatataaggatcctagttctagctgaacattcctcctacccttaaccacctcccatacacactgcaagtggagggctgcccagcytctcgattttcaccctgtgtcagtggggtgaggtgcactcttgacgttggacaaggaagaaatcatgggaccgggggaaccaggaaggaagcttgttcatccgtgggaagattaaactttcattctgagcatatgactgcatcacagctttttgtttctgttcttcttgcagttaagatccttctattctacgtaatattttatggctgcctggctggcatcttcatcggaaccatccaagtgatgctgctcaccatcagtgaatttaagcccacatatcaggaccgagtggccccgccaggtaaaatccacatgaatagcttcatttccttcagagatagcatgggtgtcactttttctattgagaaaaaattctttggaaaattactctataatgtagtyttaaagcaaccatgaaaagggaaaagagaaacttctctcgkctgcagccagatgtcctacccgcattgcaggcagagctcccacgggttgcagacatcttatttgcccagttctagagtgagggtgaagcgtcctggttcttggccagcctgctacccaccagctatgtgactgtgaacagattgagttctgatgggggcctctgtcttctcatttttcatattctagggtttggttagtgggatcctttccagaccttttcaactctaacagacatttttttacttcttgaggggggctatgactcaggtaaattcttttaaaaaagtcacttgggctcctgttttaaaaggtgaacttatttttagagatgataagaagctgtggaatgggcagctactcacagggagaggagccatgactttaggggtctattgtcccacctgctgttaatttgcagtttgagcttgaacaaagtcactcttacttctcaatatttatacccattgatttaataagcatctcatttgccagctttctggtcccactttgtagtttaattaactgtctcytttagctcttaaaaacttgggtgaacaaaaagattatcataagaaatgcaaactgccacacgagtccctgstgtgacttgrgtgccatcagtgtagagctatgtgtgtccacaccagtcgtgaaaggcccatggccatcatgcctgatgctgataggacaaggcagtggaatagccacaaacgtgaatttaccatctggctgttgtaaaaatcattgtctggaggacctagagagaaagtgttgcataacttccgggctctcacttacgaatgaccttgaagctgctgctgagggatggcaatgacttgtcccttctctgctttcccttggcaaaggtttagtaacagctgtatttaggtgacaatcttcagatgatctacgtggccctgagcagcctagatcaagggctactgcctsscacaggcttttcctgcgtacctccttgaatgtgggaaggattcacagaggaagatcttcaaaatacggaggtggcaagcattgttgtgtagccctaagtcaaatagttctccactgtaagaaaaactcaaaatatttccagataaatttagagctgagggattggggaagtggaaaaaaaaaatcacgtaagtaaataacataacttaaacctgcttaataatccagtttccagcaactgttttccacaagaggtgggtctgtggaaaggttgaagcaagaattctggagtatgcagagaagctgaaacatgttttacgttgggtatggtgatagggaagcattgtgtcttttcatgtcctcttctgctagaactttgtggtaccattagttgtaattttaattggtgcggatattttgtttttgttctttgttatgccatttaaaagttattcttccatcatgatgtgattttataattcttttttttttttgagacagagttttgctctgtcacctaggctggagtgcagtggygcaatctcrgctcactgcagtctccgcctctcaggttcaagcgattctcctgtctcagcctcccaaatagctggrattataggcatgcaccaccatgcctggctaattytkgtatttttagtrragacarggttycaccaygttggccaggctggtctcgaactcctggcctcaggtgatccacccacttcggcctcccaaagtgctgggaggtgtgagcatgagctaccatgcctggcctgctgctgttttataattcttatactcaaagccaaatacgactacaaagtcaaatattttcttcaggaaatttcctagattaaaaaaaaaaatggtccttgactatataaactttgaggagtcagcctttaatgaaactaaaaattctctttgtgccctttgcagaaaggaaaatttaactttggaaaagaaatagccaaagggcccaaccttgtaagtaaggacttggaaatgaccttgcctgtaaatcaactggctgaagtgctcagtcctttccaacaccctctcacsgtgcctcccttcccttccttccatccccttcctaaaagacatgttcttagtacctatatttagtgtgctcacagcagttggactgacctgacaaaccctgacttctccaaaggaatgctggtggctcatcttggaaaaatgcattcctgtcctgtggtctgagtcacaggaaaagtcctcagtcctccatcttccttgttctttggcctggtaatttctgtctcttcttttcctcatcccttcccccatcacctttcaggagagtctaggccaggcccctcctcttcacctgccttaccctgtggggtttttcgggggcctttaccaagggacatgacattcatatgaaaatgacagtaaccttgatcaggccaggccagcagagtgccgaaccttgatcaggccaggccagcagagtgccggctgccacaaagtgcagctcttgggccaccccttatggccctgtgttgcctgaggaccctccttggcatttttcaatgccaaggaccctccttggcatttttcagagtacgtgttagaagtttgtattttgcataggaaataactccttaagtatgcagacaaacagtgtgtttaagaataccctgacaattttttggcttcacattagtatctttaaagcctccattttcatgtttagttaaagagggaaaattgtaaatttgagttagatacacctagtgggtgtgaaagtttgcatatgatttaaagatataaagacttactaataatattatcagctgaatttgaggcatgaatgcaaatccagcctgactgggtattgactgccctttgtacaccggaataccttgtagttggatctcttctcaataacgtgtgaatgtggccatatcaagcagtggcaattgtgcagtgagtgtatttgggcctgtatggcgataatattggataaactgagaggccaaacatgaaatctgagaggagagactaaactacagaatggaagtgaaatgtaagaaaaaatggtgaatgtgtacagcttcttggccctgaacaatggtggccgtttaatgcacatgatattccttacaaagtcgtgttgcagccggtgtggtagctcatgcctgtaatcccagcactttgagagactgaggcaggaggatcctttgaaggcaggggttcaagaccagcctgggcaacatagcaagaccccatatccacacacacasaaaaaatttttttaagtctcctgttaaaaaaaaaggggtggggccaggmgtggtgactcacgtctgtaatcccagcacttccgaggcaggcggatcatgaggtcaggagatcgagaccattctggctaacacagtgaaactccgtctctactaaaaaatacaaaaaattagcctgtcgtagtggcgggcacctgtagtcccagctactcggaaggctgaggcaggagaatggcrtgaacccgggaggcggagcttgcagtgagccgaaattgtgccattgcactccagcctgggtgacagagcgaagactccatctcaaaaaaaaaaaaaagaaaaaaaargggggtggggaatcatatgytctgtgagaactaaatgagatgataaacatatataaagcaaatagtactttatggtggcaaaaccaatggtattaagtgtagggtaactgttgagagcaacttctgtttttttctttttttcttttttttttttttcaagagggagtcttcttctgtcgcccaggctggagtgcagtggcatgatcttggctcactgcaacctcygccccctgggttmaagcrattctcctgcctcagcctcccgagtagctggggctacaggtgcgcgccaccatgcccagctawtttttgtatttttmgtagagayggggtttcaccatattggtcaggttggtgtcaaactcctgacctctggtgatccacccrcctcagcctcccaaagtgctggrattacaggcgtgagccaccgcacctggtccagggtttttatagccctatctttctactagaagcagcagtttcttctttttggacactaaatttccagatatgacagggatgctttgcacacttagattttcatggagtcaataaaaccttagctttccatggaaatgtttaagagacatttgggaaacatgtttttaaaaattttaaagtgaatttaaatggcattgtatttgttgtgcagtctctccctttaacaaaccyatgcttgttgggttagcgcctgccaagcttttctccagaggagacccccttaggcagtcctgcagtgctgctctgcagcatcgcttctcatctgttgatgcagttggatctggggagagacgcagcaattagctatgctggagagggctgagcaggcacaggcacgcacacccacgtgcatgcccacggacatgcaagcgtgcacacacacgcatgctcatggatatacacacacactcaggctaccaagccctggccctgatttgaccctgcttgccttgctgcctgcccagtggtgtaatggaaaagtctcttcttcacatccgccattgcccttcccccacctcaggctcacttagcaacagtggagtgaaatgaaggtcactgtgtgtcaatcggtgggtccgggagattcccagctggcttgcttcctggtaggcaggtatgaatgtatgctgctgttctctcttttaaggttgtgggtggctgtttgtttagctctgaagtatagacggctcagtgctagcagacacattttcaaagggtcatattcttggcttgttggtaatcagaatcgggcaggagaagtggggtggatgcagaccagctgaccacactggcaccaccagcagtttcagtttcatcttgattgtaaagaggaaatatctaatcttaaaactcattaggggcctggcgcagtggctcatacctgtattcccagcactttgggaggccgaggcagkcagatcacccgaggtcaggattttgagaccagcctggccaacrtggtgaaaccccrtctcwactaaaaatacaaaacttagctaggcgtgatggcaggcacctctaatcccagttacttgggaggytgaggcaggagaatcacttgaaccyggaaggcrgacgttgcagtgagccaagatcgtgccactgcactccagcctgggcaactagagcaagactccatctaaaaaaaaaaaaaccaaaaacaaaacaaacaaaaaacccattagggttcgagtcattatcattctatctcagcttgattaagtaaaattcctgagaagtcattatgtcagtctcagaatacctaatttttccrccccccgcaaactacctcatacttgtattactatctstcactcacacttcaaaggagaaataaggggaaattagaaacatttggcttccttatactttggaggggttgttagtgcaaagtgccagtaaggtgtttccagttagaatacactgctttgtaatctctcagctgacgcgatgtatctgtatacacccagctgtctctcactttccctctcctcctcccttcccaccctcaratggatcctgtctacctggtcccagaatttgtggatgagttagcattggtggcaattagatttccaaaagctactgcacagccttatgacttggtaaagggtttgtggggggaactctgtttggcttcaacaactcaactacccaggtggtgatttctttatttctaaagacaagggtacaactagtaagtcatctcttgggtacacaggaaacctaatgatttactttaaaatgttcttggagccacagaaaaacagatcttacattgtatgcccattgtatgatgaataagcagaacagagacctgataagtaggaaggaccaggtaacaaatctgtgggagtgatggtgggggaaaaaaaaaagctggatttgtgaagcttcatttaaggattttttgctgcattcacccaagggtcatagaaagtggggtggaaagagcagtagcctgacaggtccacttctaccataaaatctgatggggttattggactggttgctcttaactgttggtcagtgctctcatgctagtaatctgatgaccagctggtctgtcggatgcagtcaagactagtgagaagctggggagatgaagggaacagggatgtatcatccagctttttcccacatacatgcatgagtagatcttatcaaatgtcatgtagaatgcagtgtcttgtttcaggatattacttaacaaatgttatgttttatatctagataagtcaaatatactatatgtacttgctcttcagtttggccttgagcataattaatgtaaaatactaggatttatctatttgtttatgttattcttttataaaagtggcacctttcctttattgtattgagaataagcacaattatgagctatacaaaataccaaggatttgcccctatggaatatgcatttttaaagataggtcaactgaactaaataactccctgcttgcctgaaagtgaatatacagccacaggaagaagaggacggatcagagaagagcctaaatcagagttcacggcatttagcttasacaggaggaatgatttctttaccctgagtgttggtaaacatccagattggctgtagagacagtccggggattcagttttctaagactttgtaaagggagcagattctgagtgtcggagggtgtgaatgtgaccctgcctgcaggcagggagatttattccttgctaatctyagagcctgagtctgggagctggaggcagaaggtgagtcaaaggtggctagtttccagaaagtgcaaaggcgccttttttctgtgcctctccccttactttgctaggtaagttgataccaacycacagatgtaaaacaaaaataaacaaacaaaatccagaaatatcttaggtcctacagagtggcacttaaaggagaaatttctatctcatatatgtgcgtatgcatacatatgtgtgtgtttatgtgtacatayacgtgtgagtatgtatgaattcatacctctgtgtattttttttwaaattggaaattacttttcaactcggaatgtataggagacacatgatttgtgcatggctacatttaaaagcatttctttgcttcctgtgcccttctcagtcatatgggtaccttcctggaggtttccatgggaaatgattcctatttagagatttgatctagtgattyatcagatgtattaaatgacaggtgcaagcagctgtgcatttgaataacttacaaggttgaaatggctacattctagtttaaatactttaaactcacatgtagattgagaaatgatgaacttgctacattataaacctaaagaaacaaaatcctttccctcaagccttttcccccttgtgctrtcaacacttactaaagctaaacmtggaggatcttccttatttctcaagagatggggaccaaaggcaggtaaatrtgtctttgaaaagcaagtgggaagccagaagttttttctaaatctaaatcttatgtaaagttgaaayrctcattgaaaaccaaatattaaaattttmcatacccagattatgatttctgcctcttcaagtggctttgttaattaatgatatatagcttaaggcaaatgatcctatcagaacaaagctgtctctagagctcagggtggttaatgtaaattcaagtttagaagactggagagggaaaaggttagatttgtttcctggaatataacttgaaattgcgtgccagygattgggtgttctgctgtctttggccctctgggagttaccagtgcaaacagagctcatccttgtccagagtcataactaacaactttaagaagtgggcagtagaaagaggggcatgatgggagaaagcgtctggtctagtgtgaaatatgactcatgagaactccagtcagcaaggtgggatttgtgcagcccttggagaatgtcatggttggagaatttgggtgtggcctcaaaatgcagatgctcttcgatttaggatggggttaygttctartaacccattgtaagtcgaaaatactgtgagtcaaaaatgcatttactaaccctgctaaacccactgtgaagctgaaaaatcataaggcaaacattgtaagttgggaactgtctgtaataattaccaaatccaatcccattgctttctatctcttcttaacagtctgataatcctaaagtaaatgatttaaaggatttggacatcctttcaaaggtctttcatctttctcttgtgagtatctagttgctttagagaaataacttgagaagaggaatttttctaatctttggagaagacctcatcaaaaactgtcctaattaagactatccagaacagaacagacccgggggctgatctgtggtaatttccaggagaagttctcaggccatcaggcttcggataaagaaaagagaggaggcagagatagtgggtgatggagtgagagaccttgtggaaatgtgaggaaagagagcagaagagctactaaggaggcagcggccacttgactgtggcgtggcctcctggacatttgtttatgtagtaagcatgtgtgagctgattgcatgacctaaacccagaccatctgtttttttactggaaatgacgtttggatcaaaagctctgtatcttaaatgaatggtcattaaggcttatgttagttaccaccgtctaagacccctcagactccagagggaaacatgagctcacaaaacagtaagacatgactgagctttctggggtttatctgtcattcctcggctccttctaccaaggttctctgttacttaaaatggaaaggacagggcagaggctttggcctagggtctaatccagctgggcaagtcacagggttctaagactccgtgcttagctgtcttatgtttcaccccttgctttcttggtttcactagtttctgatgcttctgtaagagcaaagtcaagattcttcaagcagcctgcatctatgtttccctcacaaagtaattataaacttgactggcttagatcatgagctatgcttactgaaaaatttgggctttcaggttgaaagggatgtgattccattacttggttttcattatttcttatttgccccgtctagagagacatgaggccaattgtgtatataactctcttctgggccagtagtaccacttcatgtaacagtaatacctattattttcacaaatgtgatcttagatattttttttctttctctttttcttttcttttcttttttttttttttttgagacagagtctckctctgttgcccaggctggagtgcagtggtgctgtctcagctcactgcaacctctgcctcttgggctcaagcgattctcgtgcctcagcctcccaagtagctgggattacaggcatgtgctactatgcctggctaattttgtgtttttagtagagayggggtttcaccatgttgkccaggctggtctcraastcctggcctcaagtgatccacccaactcatcctcccaaagttctgggattacaggcattagccaccattcccggccatattcctagatgattaacaacagaggcacttacaagaaagatttgtcatagtctatcagtaaacatgaacttagttttggtcatagcccctaggctcctggggaatgcactagccttatcattttgttagtaaagagcccagaggactgagtgagagttgctgatgttttgagtytgacacatgtcccctggtcacttttaatagtggaaaccgtggacttgacatygtgaaggaatgaaaagcgctcagcataatacctcctcctgttcttactctccttttttttgtgtgggagaatctgagaaatggcatcactattcctcatactcatatcaaagtaatggaaccttgagcagccactggaagagagaatgcaagcagccagaaagtgagaggsaaaccactggagaggctcactgaagccaggccagggagaacaaggatgtttgtgacacttgcttcgcaatccaggttttaccatgttwactctcaacatgaccttctagggtcactcctcctttcagcttgttaggtgagactctccaaatctcagtatcaggcttgtttatattttggcttttgctgcatcccgccctctgctgatggaccacagcttgcataattgttgtttatcacaccaatgtccctatggtcccctggctgtgggtcttcccctgaccttccctgaaggtcagatgagatccctccttggtttctgacatttgctctccttcacttgtctagccatccaccaccctcctgccttgtctttcccaagcctggaaacactgtttaaccttgtgtacataagtccatttctgttcctgactcccaaacatcacacagaatacttggaggaggttcctgcagacctcctgcctgagcgatgcacaggcatttgtctctctctctggctgcctatgcactggctcttcgggtggcccctcagcatgaccgtccctcaaggctccattctctcytgactccaggattctcccattctgaattttgttgagcctctggctttgggtctgctggtgtacttcccccaggtccaggcaagtcaccttgacttaagtgtcttatttacaacttaaaccaggagtgaccctccctacccgacttccccatttcactgggtaactctgtttaccattgctgtctcaagcattaactatctgtggaagcttctgctcacctttatttttgcaggtatctcttctctttacaatactgctgttttgcaccataaatgatcacaatgccaattttaacatagaaaaagattgttcagggtatatttaaattgctttagaaatactaaaaaattatggcttgtaggcatttttacaaaattttaaactgtaatctgtgtttattttaaactgaagatttttatgagcaaattctgctacttcccctttgattcatttctatcactgttgaaatttttgtcccccataattcttcaggttctacatcatccttttcaggatgattttttttttttttttttttttttaaattgcgatagagtcttgctaggttgcctgggctggtcttgaactcctgggctcaagcgatccttccatcttggcctcccaaagtgctgtgattacaggcatgagccactgcacytggcctgaagatgattgttaatgtccttaagtcctttgccctgggcacccctgtgccttgctccagtgattacttgtcttcctctctatcccttccattcctctagggaactacatgtgtgaaaaagcatatctatacaaccccctgagcccacctcattatgtaaccacttttaaagcatcctcaatcactagaaagaatagcatttagtcgagccttactgatgcctgcttctcaagccctacaaatggtgctgcactctagttatcacttccacattcgttaacgtcgttgtcttcatatctgagtcactgttgccactctcagattataattccctagagaagcagttstaagccaagggtgtttaaagatcttttcgtacttattaaacagattctcaaatctctttcttagagattacgattttgcaggtctggaggggagtctctgagactgcatgtttgacaagcccctaaatgatagtgacataggtgctttcctgacctgctgggaggtgggggtgggaagccagggtagagtcacttatcaaggatagtgatgatgtgcctccttatgggccccacacagagaggggagatctgggagtgaggagtagaatcaagttgccagatttaataaataaaaatacagggtgcccacttaagtttgaatttcagttaaactatatctctctctctmtatatatatatatttatatatatctctatctatctatctatatatataggtttttttttttgagatagagtctctgtcacccagactggagtgcagtggyrygatctyggctcactgsracctccgcctcccgggttcaagtgattytycygcctcagcctcctgagtagctggaattacaggtgtgygycaccatgcctggctaatttttgtatttttagtagagacggrgtttyaccatgttggccaggctggtctcaaactctggatctcagrtgatccacccatcttggcctcccaaagtgttgggattataggcgtgagccaccatgcccggcctcagataaacaataatttttaaatgtaagtgtgtcccacatagcatttgggacatacttatatttttttaaaaaaatgttctttgcttatctaaaattcaaatgtaaccaggcatcttttatttggcagtcctacaataaaatgcagttgtgatggacttttccaaccattgctcctgagtagtgctgtgtagtgtggttcacatacccatctaggaagtctcatgaaggcagcggcttttggatattaaagaatgtaacagagttttagagagtgcaaacccaaggcatacggactttgaattttatctgaccggcactgacatgctgagactttcagattggaaagcatttgtggttactgcatgtatgtcccaaattcttcccgtttaggttaaaagatccaaagaaatatcttggttaggtaggcttgagtctagagaatttggaatggttatacatttactgacaataaggattataaaagaagacctctgtgtccaaggcttacaygtaattagggagggtaaagccacctgcacacaatgctagctagcagggtattttaaaaaactgtgcacgttggggtactagaaacrtaatgggctttggagtacagcacacctgggttggaattctggttctaccactttctgtgcagccttggcccaggtagttaatctttcagtgcaagcagtgttgtcattcataaaatggaggtgatgcctaccatgaagtgttgctatggaaattaactgatctgtgatattaaagcatagtcactggtacttggggttacctaatctaaatgccagaggagtgatttaacaagggaggcaagaccctttctktttagccaagtggagttagcaaagtatgttttgtatgtggaaagtctacttttgaattgtcttcgtttctgccttcctactaatgwttttctctctgcctggtctaggattaacacagattcctcagatccagaagactgaaatttcctttcgtcctaatgatcccaagagctatgaggcatatgtactgaacatagttagrttcctggaaaagtacaaagattcagcccagagggatgacatgatttttgaagattgtggcggtaagtagactcattgtagatgtctgtggctagttttctttctctttaactcttatttcccacttctattttttgtttaatgatcgagagataatcctgaaataatgaaagattgaactctggccatatttagacactttttttaaaaaaagcaggaagacacaatgaaaaacagtacagcytcaagtatgactgttttctgcattggaaaggtgtcttactttaaaacactcctaggtactattttttactattcagagccaagacagcaattccggttttctttctcttacatccgttgaaaagtacagctacttatttccttatcttcccccaaaaagttctccctatagaagagtgcacagggccttctctcatcagaaagaccttttggtgtgattagctatcactgcactggcattcatgaaggaggatgtatggtcagggtatacttttattgatcctggttgggatagataatgaaatatgtgttaggcagctgatcgttttggataaggaaatgacttatgaagggtaaagagaggctcttagtttcattaagtcattgacatgaatacatgtcctcactcttactacctggactgtgaattttccagtccatgttctcattctttccacaaaaaaatactctcgctgggtgcagtggctcatgcctgtaatccttgcactttgggaggctgaggagggaggattgcttgagcctaggagttcgagaccaacctgggcaacacartgagaccccatctctacaaaaaataagacaagttagctgggtgtggtggtrtgtgcccgtggtcccagctacttgggaggctgaagtgggaggatcacttsagcctgggaggtcgaggctgcaataagccatgatcacgccacagcactccagcctgggcaccagtgtgagaccctgtctcaaaaacgttaaaacaaacaaacaaacataaaacatctctctgagttttactaggtaatatcatcccttctgattcaattcaagcatttaccaactccagttctttataaggcaggctgtggcttggtcagagtatggggcgaattgccattttaagttattttggaaatatttagtaacttaaaagaacattttcagtgtgaatttttctcattagaatttaaatgaggttttcatcttactttgcagtaattaaaaggcctgagggataatcagggtgaatcacttcaaggagatagtctaaattcagactcttcgctatttgaagggaaaatagttcatttgtgaatttaaaaactatacataaattatggtttgcattattttcctccagcatgctatacattaactttgaattctatattcacttggtctttttctggcttttatatgaggattgaattaaaaatgccagaataaaatttctcagtccagcaaatgcttaatgcatagctttaaaaggcakaaactcaaatcaaaaaagcctgggcaacacagcaagaccccagtctctgcaaaattaaaaaaaactagccacagggtggcacacgcctgtagtcccagctactcaggatgctgaggygggaggatctttagagcccaggaggttgaggctgcagtgggccatgatcatgctgccgcactccaacctaggccacggagtgagaccctgtctcaaaaaaacccttaagtggtggttgaaaaggaaaataccagttcctttttaaaaattctgaccaaaaaaaaaacctagttctgaaaattattgacagtccttttgtattctgattataatatccctgttactgagctaagccagtgttgacagtgtgaatgatgctactcrygcagtgtgatccgtctcctttcagtcttctaaatagctgagtaatccattatttaaaagaagggaaatattgccagagactaaatattacgtgctgatcaagtactatgaagctttggtgtggggccatataccagctattccttttggtaaaatatcttttaatatgagtgaagaggtgagagatggttttcctggagatcttgcttaattcagatcatgcattaaatgcagaatagcgtactctcagaataggtaactatgacaaggaagacagtttctttttcttagaactgctaagggaattgctggtacaatataaaagttgtgtttttatttttagatgtgcccagtgaaccgaaagaacgaggagactttaatcatgaacgaggagagcgaaaggtctgcagattcaagcttgaatggctgggaaattgctctggattaaatgatgaaacttatggctacaaagagggcaaaccgtgcattattataaagctcaaccgagttctaggcttcaaacctaaggcaagtaatattttaaatgatagaatttagatgagtcatttacactaagtacttaattgatctgagaagacaatgtaagatagttttaaagtatactcagtgctgactttgaaacgtagccagtagagtaacaccaaaaacttctgtatccaccctgcaattcttgtagttaggacattaatctcattttctaaagttaaaggaattctgagaggcaaagctgcattctgaagtgagtctgtggcccttttcttaatactcctgctcagtatccagataacagtttctataacataaactctttaaaaaagtaaaaatggaaaaatatattttttccctggtggtctagtggttagagaaaaaaaaaagttttttattttttacttcataaagaatggattaaaaaaaawwttttaacccacttgcatgtatagtccagttttggtcctctggaagccacaggaacatttcaaaaaaattgataatctgaaaaaatattttttctgaatyttattgcgraagtagaagtttaacatcatctaggctgaattttgctagccatgctgttggctttttgtattactgcaacttataatggataaacattactctggatcactgaaaaatgagcaaattgccattgctcaccatttggtgagattatattctccataagaatggaaaatttatcgttgttgtctgcttttgtaaagctggtcatttcatcctctcctccagatcatgaattaatgctgtcctttccccttaagcctggcttcttctggcaggtttccccctaatcacccgtatatgagcrttggcattaygagtgttgtttctaattttgatagaaattgactgcagtatattgagttatgtgaacaaactcatttcrtttctgaaatctggcacttttgttcattaattttctattgaatgctattaatttatttctacaatgcttgttacccatgaataatattttcaaaagaaaatcaacacagagataaaaagttttgttaactgaaggatgcatcaaagttcctttattgccatcagaggcaaaaatgagtaggtggggatggatggttgcctggctggctagtttgatggactgctggcagaaattaatgtacctctcaaaaggattttaagcttctttccacatagacaggatataatggaagaaaaacggtgagaaccattatgccaaaatgtatttgatattcatattgctggggaatacttcactgagatcaatcagctatttagcagcaaaagaaattgttgtggcatggccaagagaagactcatcccatactttctgagtaccttgcttttgacattactcatcgtagacactgaatgacatttggaccccacagaggcagtctagtctattgtgattgatttcttcccacatctttagagttacttggttcagtgataaattcagctactctttcttttcagtcctttttttcttttttctttggtctctacttggttatccattgccactgcctaattcatcacctccacccaaatctccaactattttggagttatttttgtcagagatcagagtatcccagcatctcactatcctcaccattggaggatagattytggcaacttcttagtgagcattttctctacatatttttaaagacaaatacattgctggcagaaacgtcccaaagagtcaaatctagacgatcattttcttgcatccaaaacagagtagtagcaaaatagtagttccttcctgatgtggaactaatattttatctgactttgattagactatgtatgtgttacatctcacatcaagactcacttgctgtgctgatctgagtaagcaagtgactgtcttccagcgaagtatgttcatcacacttctgagatagatttgagccatgggtgtagaagaggaggctctggatatttcatgacagcagtaattttcagactgtcctctgggtcccttcagtggattcaccccttcaagaccacccttcctcttagggcagtgacacctctgccttttttacatattggactttcctaagaaaattgcaaagaaacgctycttaaatggcagtctccccgactggagattaaaacaacaaaaaaggaaagcctacttgaagtcatgcttgagggaaaaggatgacattatttattcatgactcaggaggaaagcccacgctttataaaaacagaaatgtcaatcatctttctcatgtaatctaatcttagcaaataacgagcattatattttgggttgacttagttttcagtgtctttaagcaaagcttataatgggctactattaaaagttccatttagtactggtttgcatcacagcttaattgtagtcgttataamcttgggcacttattttcatttcarcaaaatcacaaacatgaccttaaattggttaggggagtcattcattctgctgtcctgatgtcttttgttattttggttgacttactgtgaccagtgtgtacttgtttggactacggagtagttttatttttcagaaacttaagaaatcatttacaatctactgawcataatgggttttatttttagcctcccaagaatgagtccttggagacttacccagtgatgaagtataacccaaatgtccttcccgttcagtgcactggcaaggtaaagacaaatttagggttactggggtggtggaagggtaggcagaggaagaggggagaatgaagaagactgtttaagtgacaggtagaattttaatagaagaaataagaaacattgctttcaagtataagtctcagtgagatgaattgtagctrtactaggtaaaactttttaaaagaacagaaagatgtaatcagaataagactgatgtcagtttctccactggcataagaaactcaaatatctgaatttaatacattgggatatttgcttatcagaactgagaggtgaattagcccacagaagtacttctctggcccacagcatgtattaaaaatttggggccaacattaaaaaaaaattaatgtcacataaaaattagtggtttgggcttctcttttaaaaatattgaaatatcgcctggtgcagtggctcackcctgtaatcctagcactttgggaggccgagatgggcagataatgaggtcaagagtttgagaccagcctggccaacatggtgaaaccctgtctctactacacatacaaaaattagctgggcgtggcggcgcgtgcctgtaatcccagctgaggacctgaggcaggagaatcgcttgraccyrggaggcggaggttgcagtgagmygagatcacgccattgcactccagcctggggacagagcaagactatctcaaaaaaaaaaaaaaaaaaaaaaaaaaattgaaagactaaggtaacaattagtgcatgtttcctttggatccaaaaaytaatggaccgtttagagagaaaggcagaacaaagaaagggagttcccagacagtgctagcaccaagcaaggaartggagattgatttctcaacaagaaaatgagaggcaagtagtaaactttggagataatatcactagacagatyatttactgggccaacagcaaggtgtttctgcctttcaatgttggccttgtttctaggaggcttgaagaatgcttatttggcatttgactcagcttccccatccatttgcacattgagaatagtctcttcttatgaccatttctcaaggctgcaatggaatagactgagtagatgttctttcctctctcagtagtttgcaaactactgtgtagattgagtcttgtttttgagtacacatagtgatgcatgatgtgagccattaaaatttcatttcattctggatttcagcgagatgaagataaggataaagttggaaatgtggagtattttggactgggcaactcccctggttttcctctgcagtattatccgtactatggcaaactcctgcagcccaaatacctgcagcccctgctggccgtacagttcaccaatcttaccatggacactgaaattcgcatagagtgtaaggcgtacggtgagaacattgggtacagtgagaaagaccgttttcagggacgttttgatgtaaaaattgaagttaagagctgatcacaagcacaaatctttccmactagccatttaataagttaaaaaaagatacaaaaacaaaaacctactagtcttgaacaaactgtcatacgtatgggacctacacttaatctatatgctttacactagctttctgcatttaataggttagaatgtaaattaaagtgtagcaatagcaacaaaatatttattctactgtaaatgacaaaagaaaaagaaaaattgagccttgggacgtgcccatttttactgtaaattatgattccrtaactgacttgtagtaagcagtgtttctggcccctaagtattgctgccttgtgtattttatttagtgtacagtactacaggtgcatactctggtcatttttcaagccatgttttattgtatctgttttctactttatgtgagcaaggtttgctgtccaaggtgtaaatattcaacgggaataaaactggcatggtaattttttttttttttktkttttttgttttttggctctttcaaaggtaatggcccatcgatgagcatttttaacatactccatagtcttttcctgtggtgttaggtctttwtttttwtttttttcctgggggctggggtgggggtttgtcatgggggaactgccctttaaattttaagtgacactacagaaaaacacaaaaaggtgatgggttgtgttatgcttgtattgaatgctgtcttgacatctcttgccttgtcctccggtatgttytaaagctgtgtctgagatctggatctgcccatcactttggctagtgacagggctaattaatttgctttatacattttcttttactttccttttttcctttctggaggcatcacatgctggtgctgtgtctttatgaatgttttaaccattttcatggtggaagaattttatatttatgcagttgtacaattttatttttttctgcaagaaaaagtgtaatgtatgaaataaaccaaagtcacttgtttgaaaataaatctttattttgaactttataaaaagcaatgcagtaccccatagactggtgttaaatgttgtctacagtgcaaaatccatgttctaacatatgtaataattgccakgagtacagtgctcttgttgatcttgtattcagtcaggttaaaacaayggacaataaaagaatgaacmcattcctcgtgtgtgattcactcttgtctaaatgtcccaacctgtgacttctttactttccacaccactaattatccaagatcttgaagaagtattgaacctgaaacggagaaacacataatttcttagttcagacaaattttggtcttttccacttaacagagtccaagaggttggtcaggacttcagacactggcataccccttcccaaagacactaaaagttaatcaatcaatcagaggcagagaatcgatgaagctccagtttgaagttccatttaaaaaaatcatcttgcagtgctactgctacttcactcagtttagaaaacatgaagtgttggttcctgctattgcttcactagacatatgtgttaaaaaaaaaagttgttagcacttcagtttttaaaaaatgaggttaggtttgtggttcagtaaattaaggttcataccttgctttttggttcagggattggcctaagtccttatttagctgtatttaaaaattagccttagtgtgaaagaagataaaaaagctttccaaaaaacattttccagctataattattaaagatttagtatcacttaactaacatgggaaatgcccacactaaaatcagggcattgtatttctgaaacggaaacctttcgcaaagcctgtgcaggcagaggagctcacacacatccttgacgtggcactgtgtcttcaggggtgctgccctcttacagagagacagacctggaggccatggccgttttggtgagaaatgccagaaacagcttcagtttccacctactgcttcatatttataatcacagtaatctatttctcgttttgctatttctagagcaacaaattgtgtgatgcgaaattagtaccagaggaacaatgactccacttaacaaaaaaatagcaagggaactatgaaaaatggcacaactgcttaactttaatagttgaagtctttaggagacttcagtagttgaaatgacacagaaaaatcctcaaactaacatacctacatgaaactgagtttctcaaagtaacccacatttatggaaatagaagtttgtcttgcagaaacatcagctcattttgtaaggtgtatgtgatatttaaatttgtgatgcttgtgaataagggaatggggctttaggtctgaggaaaggggagcattcattcaaactggagggtattttgcatttttaaggctgctataaggtcacgaccttggtgagacttgacctgttttcgtatgtattgtgtactttctgttctaagccattgtgtgtgtctgtaactttctccaagattctctccaaatcttgcttctcttaatttctccagattgtgccaacctatttcccactcctgatctttagtgttatatcaccactaggagactggggaatgtggtttgtgttcttagactcaacagatacctaccatatgccaagcattcttctaacagctagtgagagatctatcagtgaacaaaacagacaaaactccatcttttttcctctgctgctcatattctagtgttaaccatttgcatatttctcagactcttcaatacatttattatttctttttaatcagtttattctgaccctcagtagatgacatatttcatgggtgtagggacagtgccatctatctcccttggggtgttcttacattcaagaaatgggttttcacacaagtcctgtcaaatacttaattccttacacaatataaagggattgagtttttcaaagataggctgactacttggaatgaaaagcatttaaatactgaagagagaaaaaggattctcttttcaacccttcatattctcggaaggaaaactgaaataccgagttagtatgtcctcaaccctggttaatttcccttgcaaacaaagagggacaggccttggtgtcagaagctttgccataagatgttacctagctaggatttttaaactggttttcattgtattttattaccttcaattaagaatagtttaaaacaagtagttttccatttatagcagtaaaataaatttgttcaagtatagcactgaatggatttaaagaaaaatagtaaaatttcaggtggtaaatatgataaaaagcatggaagtgataaatggttggctaaaatttaggactctgcttgacagtatagcattttaggccaggcacagtggctcatgcctgtatcctaacactttaagagtctgaggttggaggatcacttgagcccaggagttcaagatcagcctagacaacataaggagatccccccgtctctacaaaaaaaaaaaaaaaaaaaaaaaaaaaaaaaaatagccgagcatggtggtacacgcctgtgatctcagctacttggacgtctggggtggtaggacagcttgagtccaggaggttcaagtcttcaaggcttcggtaagcctgggcaacagagtgagaccctgtcttgaaaaacaaaaacaaaaaaaacaaccaaaaacggcattacccagaacctatctactttagaacaatagcatgccctgtctgctccagctgcacctaataccagagggaactgctccaactccaaattaaaaacattatcagtgatcagaaacaaaagttccgttatgagaacctttcaaagctcagtaatagcttaaactcctggcttcttaaaggattagtaacactttgatatctgtgtatatttggctcacagaggagaaccaaataacattaccttgaaaatctaggactaagggaccttatgaatacagagggaaactatccaaggaacagacaatagcagttttaattgagtgaataaagtgatcttggtttcaaattcaactgagaaaacatgactttctccttttttctttaagagggggctactgttaaccagacatgttatctgtagtcccctgggctctacactgagaaagatgatcaagaaatagataagcctgttattcttccaaccgatggttccaatgagcacccatatcctagtcatgtgaaacaaaggggtgaaacaaggcgggtatcttggttcatgctttaattctctatttttctctgagggactttcagcatcagtcctttctgagggattaagtatcttactaaggtgttgactcttattgactacagaattcagctctttcatttagtcacaaaggcatcctagaccctaagagaatgcccatattgtagtaaagcatactatctgtagctagctttatcacaaagcctttacaaaacttggatttcataaaatcataggcggcctctagggctatcttttccaaggagacacatacattcccccttagtgttgaccctatacagaccaggcaggaggtgacacgggttaatttaaaacagccagccacagtgcccgatatagtcattacttggtctgtcttttggagtgcttcaaggagtatggaacaatcctgcaggaataggacataggatcctttccttttgataaggagcaggggttctgaaataaccagcaggtaaagattaggccttggggaggttctgatgagtctgctttggagcctctagacagcaagagaatagtataatagtataatacaactcaggttatactgcagaaaatgaaacataatagatggagaagtccatgcctaccataaacctttgaaacctttgcctagagcaggcctttcttttctttcatttgcaaatttctcctgagccacctactatgtacccagcactgacaatgaaatgttggggtggggtagaggtagggggtcacaggggagtgtccaaacacactaggtcctcatgaaatttttacttttgtacttctaaacgtcttacatggtctaaactattctcatcgataccacttccttcccctccttcttctgccattcatgtaacatattcaacatatccaacggataatgatacttgactacctataagattaagttgaaggctcgttctgtctttatcaccattaaatttaaataagaacaatagcttacatttatttactactttatagtgcatagtctaatttcacatataaatctcatttccttcccaatagctttgtgaagcttgttattctttcattagtgtatcagacactttagaggtggaatgcaggcatctattttccaatggtttttaatgttgattgagtatcagaaatgcctatggagttatattttcttttaaataagagtacagatgtgcttgaacacttagagaatctatcgcacagttgtggaattccagcaccaaattaaaatatgtgtgcctgtgtcactacactagatttttggataaaatctagtcagtttgattgaagtgcaattttgttagtgttccaataatatgatactgagttttaaatatatcagtgtatttagtagatgaccaactttcaactcacttgggccccttacagccaaggctggctgcatgggcctgcagtctgtgcacggggccacatgcctagaagagccttgtgtttggtttaatgctctgctgctgctgtcttgaaattcttaatgaattttgaaaaaaaggcctgacatttttattctgcaccagttctgcttaaagccaagggcgtctactgtagggttgctttagcatggttgtcctaatgactgaatgaaaaatgtggttgaaaaggctgcttttaaaataagcaatgaacagatcgatggttgagagttgggcgggttggggaaggtgcagggtgaggcagattatggaaggtgtgagctggcagactcagcgggcatggaacagaggccctgtgatggcgctctgcagccttgggcaggggtgaggaggggagggcttatgctgtggggatggcaagaggcagctaccagtaggggatgcacatgtgagccttgaatgaacctttgctgggctccctttccctttttgtcttccctctccaaggcactacttacttttcagctcccaaaatatggggctcagaagtggtcaatagtgaggaaaggagtggtaactgaaagaagtctagggttctctgggtggaaagactcagaggaaacattcaaaccttgatagaaaggagatgaaaaatccatccttgcctattgttgtagctatagaaccccaaaagcccttgggctgcagatgtaccccccacaaatctatttatggtctaattaaaaaattaagttgaacttaatcataacagtgtcttcttcagatatgcttatcttctccgtaggtttagttgacatatttgaaatgttttaagactaaatgagccgggtgcagtggctcatgcctgtaatcccagcactttgggaggcctaggcgggtggatcacctgaggtcaggagtttgagaccagcctggccaacatggcgaaacctcgtttctactaaaaatacaaaaattagctgtgcgtggtactgcatgcttgtaatcccagctactagggaggctgaggcaggagaattgcttgaaccccgggggtggaggttgcagtgagctgagattgtgccactgcactccaacctgggtgacagggcgagactcctcaaaaaaataaataaataaaaataaaaaaaagactaaatgaaaatgtcacattaaaatgactatacatttttctaattctggaaacccaatgtcttcagagttctcttttaaaaacctcaaggccaggtgcagtggctcacacctgtaatcccagcattttgggaggccaaggcaggaggatcacttgagcccaggagttcgaaactagcctgggcaacatagaaagactctgtctctacaaaaaaattaacaacaaaaaaaattagctgggtgtggtggtgcacacctgtagtcccagccgcttgggaggctgaggtgaggggatcacttgagcctgggaagtcgaggatgtaatgagctaagatcatgccagtgcactccagcctgggtgacagagcaagacccactctctaaaatatatatagat

SEQ ID NO: 95707 - DNA, 247636 bp, Homo sapiens
attaataaaaaccatcaacaataaaaacacgcactacagccatggttcaggcccactgaggctgaggaaataaaaaacaggtgtgatacttccattatggtcaaataaaatttctaggcaagctgtaacatttttgagttggaattttaagtaacagagattcaagaacaaattacaaaatgattaaagttaaatttaaaaggcaaagaaccattaataggtatttaacagaaatctctttttgaacaaaataccttgttggaaaatcaagaagttcaaccaacttgtttccaccccaatttactcttaactttatttaaactgttctacttactcaagcatttatgaatatcaaagttgtattatatattacgtgagagctcccgctcagtaataactatgattctagctaatgtgcataggtaaacaggccgtaagagccagggcttaacattttctcacctggtaactttcgtaattcgatttttccttgtgacatacctagaaacctttattacatatgcagtaggcacaatccaggacacatttmcgaataattaccttctctcaattgggaagacaaggacctatggtaacagctccataattatgagtaacgcttaagtcaagaaaaacaccaatccttattcttccccactatttgaagggaaccaacaaaacaatccttaaattattcatcatcattacttccacctgtgatcaattatcaatgaattaaaacatatctaaggtttgctcattcgtattgcctaccaggattggtgaaatgtagggaaagaacaaagaaggtcactagtctaacattctaggatgggagctggcaaactttttctgtaaaggaccagagagtaaatattttaggctttgtgaaccaaaaggtaaaattgaggataccatgtaagtatttaataagagaaaaaaaatttattgatgaaattcaaactataacaacaataattgaaaacaattttttgataacataggtctaataatgggaagaacagatttttttttaattcaggataatgtttggcttaaatagtgttaatgtccactattatcaaactgattgcagatattctcaggaggctgagggccacaatttgccaacccttgctctagaatattgaggcaaaaaaaaatttattgtctgtcattgaacaaatatttctcttttattcataaaacttcaatctatgatgagaggtactctaagtcagcagaatggggtagtgaaaagaaatctaactcactagagcctgagttaaaataacttaagtccctactgccatgtattgtgtgaccttggacaaagcacttaacctcatcctcctcccatcccttggtgctttcagagtaatgcaaacatggtagtatatattttaaaaataatttgtttctcttgtagactagactgttgggagctcttcagggtatggaccgcctcctaatctttgtgtcatgaactaataaaatggtccttgtcacagagaaaatgaataaatgcttactgaagctcattagtctgttaatacactacctagagtgtttcatttttaacatccaaaaactaacccatttaaaaactgctttattttttttcctctaccctaaatcattaattcctaacttggttatagtctgaaagactttccagaacatatacaaattcagctatgatacagttaaacaaattagggattgtcatgtggtaattttaaatcaagagtctttttaaatgtcacccatatcacctaataaagtttagttattattaaattagtaaaataagttacatacaatggacttaagagtaacatcgagatttactgaagtggaatctaagcattcttcttaccacaggctctatggatagagatccctggtcaaataagtgtgggcaatgttgcatactgcatctctacagagtttcaatgtacattagtattaaagttatactataggactctgagaggtcccatagtatagcctctcttttaatacagcatttatcaaatttatctgctcatggaatatcttttttacctaacacctattattctacagaactagtgttagactattttatggaatcaaaaatatttaaatgtctcagacctttctatttggtctactattactaaactagttgactttaatagctttattttcaattttaatcccacatccaagaaaagctttggattttaagtttctaattgttactatttactgtatgtttccctttcagaaacagcactagcagccatgatacaaccctcttatgatgacagtgctgctcaaatgtcttctgagaggaagttctgttgctataccaaacaaccgtacttatctcctgaggcagttacaggaagcacagacaactgacaaatgtcaaccaagtacaccttttcacaggccatgcaatacaagtaacttttgttcactaacatcagatgacagattaaatagaaatatggctaatagaattattttccttactggataattaagatcacacaaaataatgtttgttaaagtgccttataactctaatcctcattaaaaacaagtaataataaatattaaaaagtaatttaatttcacagagaacttgccagtacttctaatgactaatcataatattgtatttagtttttgctttttgacaagcaccatgttggttgctttcacattaattatttaactgctcttatttcccattaatccccagtttattactttcattacagtctctgacttgcttatctaatggtataaaagccttctggtgacttatgaaatgctgttgcaaagctgaattaaattcaattaaatatttattagcatgatctttcttccttgtttcttaaacttatttcaacctgcttttagagagggtttgtggctggaggtcagtttgctgaaaaattggcatctagaaaacagttttccatctttaactgatggttctagcatgcagaactcaacccatccaaagaataagctgggtcaggagaagttcactatgggacatgttaaaattgttgcctacagctatgtgaagatggccagtaggcagtagtctataagggtatgaatcataaagaaggagattagggatatagatagatttggaagtcatttatatagataattactgaagtcatgagagtagaaaagaaacagtggtggaaagtgttgatatttaaaagataaataagaaggagaagaggctgaaaaagaaagagagaagatacagctacagcagggctgtccaacagaattttcttcaatgattgaaatagctactcgccatatttgcctaccgaccacttgaagtttggcaagcgtcattgagaaactgaatttttaatttttaaaaaatattaatttaaattcaaatagccacatgtaattaccgcattggacagtgaaaggctacagagtagactgaaaataaaagtgatgtcatggaagtcatcaaaagaacgtatctcaaaaggcagggaatggtcaacagtattaaatattagagaggacaaatcagctaggactaaaaagtgactactgtatttagcaatttaggggttgaattgtgtcccccaaatctttatttgttgaagtactaaccccccactacctcagaatgagacttcatttggaaacaggatcactgcagatgtaattagttaagatgaaatcatacaggagtagactgggttccttttttcaatatgactgctgtctttataaaaagggtaaatttagacacagaaacatgcacatagggagaatgccatgtgaatatgaaggcggagataagggtggtacgtctacaagacaaggagcaccaaagactgccagcaagccactggaagctaggagagtgtctctaatgccttccgaaggagcacagccttgttgacattttcatcttggacttctagcctccagaactgagagaatacattttgttgttcaagccatgcagtttgtggtactttgttacagcaaccccagcaaactaatacaacatgaaagagatctttgatacaccctagttgctttgtctatctacttaaatctttaaaatgtgtattcttatttaaatcgtaatcttctagtgtatagggaatatagctgttaaaaactttgcattaacattaaatgtttaagagtagtcacctaataaattctaactaatgatgttaaatttcacttgtacatctaaagtactgaaatataaacactgcactaaaaaataaacataaagggatctgaaataacaaatgattcccaagggggtccatgagatctagttatctggctcaaacgttccttcacatcgtcataaatgtcatgttttaaaaacaattataaaaaagccacttacctttggtttctaaatttttagtagtcattttttcaccttaaccactgaaaatgcactccaagacttctgctgaacaacctagaaatgtatgcatatgaaataattttaaaaatatcatataaacacatagagtacctccaatttaaaagttatgatattttaattgcttctgtatttagtacgcatgcatttagaaagagaaatgtcccttatatcccattctcacagaaggcattgttatgtctactaaaagtctcaaaaaaaaaaattaggggtggtttacttctaaatactccgtttcaccatcctcaccaatacactctaaattgtcagaagtatgtcctgaattttagccaagcaaagggaatgaagttactgtggtggttttgtcatccatatgacaagaggaattttaaagtaattactttcttaggagacataccgacacaatttgtatacacacacacacatatcaaaaaggagcttctgtttagatgtttaacaaacgacaaaaaatattactcaagataacataatttatacttttttggtaataaaaagttaaaattaaaatagtgtagctccaaaagtaaaaagagaaacatatcgagcccatgctttcagaaatgtatacattgtcttacagtacagactcagatttaccagagaacatataagaaggtgatgctactgcaatgatataaatatgacaaactgtacactagatgacaactggtttcactacaaaaaaagatcgttctcagtactagatacaactcagttcaattagtgaacccgacgactaactttcttaacagtcacaaacttttctacacttacactctactgctccgaaaagaggtatccaaaaaacccttcgtaagagtaacgatccctgaaactgcccttgatagctgctctgcgaaacgtacaggcacagcgagtgcctgctggcaaatgccaaatgaagcggagggggtgaagaagtaagtagggggagtgagcaggtatgaaagcgataggccgggaagcgacaagcctgtcaactttgctgtccggggaagtcgaaacctaagtttcatccctgtctgaaaaagtcttcccggaacaatctttccctaaatccaaagctactggccaccgagctccagccagacctccgtccctttccaacatccttagttatacctgcttgtcctcggatttacctctaagattcttattctccgtatttcagggggcttcacttgataggctcttcggatcggtatcaccaggttaacttctcacagacctcttccattcggaagccgacccgcccagtccctccgcatatccagcagctctctcactcctaaccacttccgattactcagggtttcgcttccggaatacgtttccaaaagagcaggrtaaacaaattctgcagtgcgtataaactcaagtaacacagaacacacactgtaaggcctccgtaagtgaaaagcggacagatttctactttaaaataaaataccgtacagcaacttttggagcccaagccgcatattcacttaaacttccgggccagctgttaaacaaacggaagtaaaactgccggaaacagaataatggcgtctcgtagccccaggcgacagcgtggaggggcgggtctgtcgattggatgaacgcagctgagattactcccagccactaaggacgaagaggtggggcggtggcgtcccaygcctcgtgcgacagtgggcggggctttgttgcctgagtaaccgtatgatggtggtggtggtggtgtcttcctgtctcaacgatacctattttctagtgctgagatcctgagacaatggtgagtgccaggggatgccagaagaacggctctggggtcctacttacttagctttccaagtcttcgggcggatgggcacttaaagttgtccggtcctcccgaccttctccccgttatctctttcccccttcccacgggctgttcctgcagtctcctcgctctccgtatttcttacagcaccctgaattccactaatgttactaagtctctagagtaatgaaacagaaaatttagggtaaggcatcgagtctaataacctgttttgaacaaacattatgtgtttgcattgttcatcatggcatttttcatgttcacagattcacattaaygcgctttattaagagtatggggtggtgtgtatgtgactgtctcaacactgatytgaatctccctagatcttggagtctttttgcttttctgagtggcagagcactgccccacgcccccacgagggccattaacaggtgtatgttggatcagcgctcttctatccagttggttaccttctaggtctgtgcttgcttttcttttctcttttcttttctttcttcttcttttttttttaaacagaaatttctcctgggattgcttggagagcttctggamttcactgtttgggcttcacccctggaaattctgaatgaaaggaatggagctcggtatttgcattttaaataagcctatagrttattttaattcacccctatgtttgagagggttctagttaattcacttaactaccatatcttttaagcacttatggataacggactggaggatagaaagatctttagatagttatagctatgaatttagaaacagagccctcacccaccaccccttgtttcttcatactactcagcaatccttttggttaccccagttttcccctgacccattctctgtgaagacattttcaaaccttccctttacaaaccctgtcttttgccctcttcatttctcctttctaaacatgatggagtataacaggccatttcttcaacctcatgcccccaacctacacattgctctatatttttgccgagcctttagtcttgtatttctagtgtagagaaagggatattaaaggataatccatccatctttgctcttgatctcatttgcttccatctgttacatttcgcttccagttgtttttttctttcctgtgcgttcagccttttcctctccagtttcttctcttcagtgctcaagtcacacatcttatgaaaattaaataaagcaaaaccatgtcctccatcctgtgtttatccagttatttcctagtcctcctatctatcagtaaacttcttgaaaggatattatttttacttatatcaaacagacaaaagtcttctgtctggcttctttaatggcttcaagaaagttgttcttgcttaagtttctaatggccttttaaataccaaatacagtaattacttctcaaaatttacattacttagtctctttgtgacaactgaggttcatagtcattaattccttttactggctgtgcctggtttttgaatgtcattctttggaattaactccttgattactttcatttcttagtctagacattttccttgggtgattttgtccactcacatggattctactaacacctttgattttgcttctaaatttcaattttcctctcagatctactaatgcctaactcagttgcttccyggacacatctgtctcaaatgtccttcaaacttaatatgaccaaaactgaacttgctatctttcctcctggtttctcctattttcaccaagttaaataatgctactactatattataacctaaactagaaatcagagttatyctacattcctccctcttctatttctcccatattcagttgttcactagatcaaattttagtttgtcatctcctcatttcrtgattattttaatagtgacttttacagtctggtctggaaattctccaatccattattttctctgccacaagaaggaatttttaaaaacccaacctgttgatttactcacctccttaaaactctagattccctatttcctacagtaaaatgtctagaatggcacacaagttcctccatgaacaagcacttttctgtctagcttttgcctttccctttccatacttaaaaaaaaaaaattctcttgccttttagctacttgcttttcattgwacataccaagcaacttcaaactggtagtatgcctcctctttctactttgcacttgcaattccttctacacagaatacttgcaccctcttgttgcttgccaaacttatttattctcctattacaggccaacgtgttcttcttgcccacttcccagaaaggccaaacattgagaatgcaggagttgcagcagagaaagagtttaatggaggcaaggcagttgagtggaaggatgggaaatatttctaaaatccgcctccctgacagcttggaagttgtggttttcaaggataattttgtgggcaggttggtagggaatgggcgctgctgattggttggggatgaatttataggtgtttccaaactgtcttcctgtgctgagtcagttgtctaggtgagagtcataggactagtagagtcagtttcttggtatgaggcatgtatctgggtggcatcaggaggtttgccagaatgcagaagcctgaaaaatatctcaagaccaatcttaggttttacaatagtgatgttatctaaaggagcaattggtgaagttacaaatcttgtgacctctggctacatgacttctgaatagtaagaaattatagaaaagcaaggaacagtagctggttattgcttacctatgcctatattttagcagattttaggtccctcccatagtcctaaccttgcggccttctattagtcttacaaggctgttttagtccctagagggggtcagttttggaagggactattaccatccttgcttcaaagttaaactataaatttctcccatagttagcttgcctatgcccaggtatgagcaagggcagttagctttgtgaggttagaagcaatatggagtcagttagrttagatttctctcactgttayaatttttgcaaaggtggattcacttccagacccagtgyaggtgtcttttctgtgatgccttccttccctactcaaagagggttgagtcgagtcaggtgcggtggcatatgtgtgtagtcccagctattgaagaggctgaggtcagaggattgcttgaggccaagagttcaaggccagcctgagcaacatagcgagaccttgtctctaaaaaagtataaataaatacaaatttaaaatctatgcagatattcagagctttcccctccacactgtgaaatcaagaaaaaaagaaaaagaggttgattgttcattctttttgtcaccattttatgtagtatacatctctcctattgtacttgcctcattcggttgaaattatttgtttatagatctgtcactcttactaaaatgtgaactgttggaggaattcatgcttatgttgttcacagtattgcctagatcatattaggcactcaaatgtttgcggaatgaatacaaaataagaaagaatgcgctaagtggtctgagagaatacaaagtaatwgggggcaaattgtacaattgagtccctgcttctcagtcagagtcagaaaagttgtcatgaagaaaatggaatagaatttcaatagttagaattctatgacctgtgcaatggcatagggaggtagaaagtgacatttgctcaatactgtttttggtttttgcctgtcttacattatgttatcaaacttcccaggaatgctaagggcaatgaatgaactcctgttcccactcctcctgccgggattgcaggctggggctctttcaaattaggtggtcaatgaaggcctctctgtggaaagaacttttatattgagacctgcataatataatacaaagtgcagtgatctggaggagtccaggccacgctaacaacaagatcaaataccctgaggcagaaaagagattggtatattttaggaacttatggttcartgtaataaaataatagaaactgggtggtgggatggtgcaggggtggctgcagtagggaaaatatggtgcaaaataccatgaaatgtggttagggaggtaggcagaggccagaccacacgtatacgtacagcagtgtttctcaaactgtacctgatgactcattactcaaatttgtggtatgtagccagcattaaaaagatgacataaaatagcaacttaacatattcactacatgttgtaagggtaacgttcatgaacttttgtttaattgtatatgtattggatgtgtactggattctgatgtaaaatatatttcttactgtgastcctgatccacaaagttcaagacacagggtactttgaataatatatactttatttgttttatcttattattttatttttatttatttattttttttgagacaggatattgccctgtcacccagcaggaatgtagtggtgagatcatggctcactgcagcctcaacctcccaagttcaagtgatcctccagcctcagccttccgagcagctaggataataggtgtgtgccatgatgcccagctaattttttttttttttcagagacagggtctcactatgctgcccagcctggtcttggacccctgggctcaagtgatcctcccaccttggcctctcaaagtgttgggattatgtttatgttagccaccacgttcagctaatatatagtttaaaaggcaaaatagttgaaatctcaaggcctgcagatattcttattcctcttttgatctagtgaaaatgttcttgttgtrtggcagatacagctttgaattaacgaaagcctaaaattggctagagtaaaattttcaagtttctttgtgcatccagatcactctcctccatatttgccatcaatcatttatgagaaagaacaggcctaagaaacagatgtcccttctctgtgttcagtctagccactgttgtatgtattgcagcaaaggattatggcctctcaataagcagctgaagatggaggttgtttgctctgttggtgaggcttcctgaccactgcagtttatctaatcagcttctgtcttcatctagtttgttayagttgaggcttccaaattctggaatcacctttatattgtgaagcagagatagggaaccatagtttagcatgtttctcatacacctcatttaagatgaagcgtatgctggactcatcaatttcttttacatattataaagaggacagagaaggtaattctaagatatatttgacaaagatattaatattatgtatcttctaaaatatagcatttattagaatatcattactccagatgaactgttagtgtaataaaggactttaaagattattagctatgttccataagaactaatctaaacctttgaagtaaaatgtctcaaagttgtttgtttgtttatgtatttatttatttttgagacacagtctcactctatcaccctggctggagtgcagtggtgtgatctcgggtcactgcaacytctgcctcctgggttcaagcgattctcctgcctccaccttgtgagtaacttggattacaggcatgtgccaccatgcctggctaatttttgtgtttttrgtggagacagrgtttcaccatgttggccaggctggtctcgarctcctgacctcaagtgatccacttgcctcggcttccccaagtgctgggattacaggcatgagtcaaagttgtttttaacagagytttcaaagacagtttcataattactgaagaacaaaattttattccatgaaatgaaatgcttttcagtttccaactttatgacgtttctcctaatagcttttctggttttgtttttagsacctgcctttttttttttttagacagagttttgttctgtcgacccggctgtggagtgcagtggcgcgatttccactcactgcaacctctgcctcctgggttcaagcaattcttgtgccccagcctcccgagtagctgggactactggcgcatgccaccacgcctggctaacttttgtatttttagtagagacggggtttcgccattttggccaggctagtctcaaactcctgatctcaggtcatccgcctgcctcggccttccaaactgctgggattataggcatgaagcttggcacccagacagcatctgctttttagtcatccagaattccttttgttacttgaattgctgatttggaagaattgcagttccaaagatccacaggattttatttacaaaaagtgaatcagaaagcacagggcataaattgcagatatgaaactcttaaaagyttattttcctatatattgtattacaaatgcagtttagagcctgttatattcttgtttagtaggaaacagtggtatttggagaacggaatagtaagtggttaatataatgccataatttttttcatgtagctttttatttatttttgctttcctttttctgcctttttattcccaattctttctcattcaccagttattcttctattcgagaaagtatttattgagtactttccatatactggtaactggtgggtatacattgattaataagatagcacacagtggcccctaactcatggaatttatggagaaaaacagatattggaaaataaattacaagtataagttggattacaaaagaaaaatgacaaggtgaggtggaagttagtaataaaatagagtgatctgaactagcctggggtggtgagggaaagtctctttgatgataaaactctttaattgtttttttccttagtttgagagaaaaacagtttacatgaataaataaacgaatgatgacctcatatgatgataagtactatgaggaaaattaaactaagtaatgcaatattggttggttccaagagcaagtagccttgagtaggacaatcagggacggtcctcatgaggatgtgacttttaagctgagatgtcaatgatagaaagcagcttgccaggtgaaacctaggagaagagcattccaggcagagtcaatagtgagcacagaggtgcattagaggaacaggagggagctagtgtggctggggcctagggaatgagaggacagctggaggrgaagagatctgagaggcaggaaggagccaggaatactgagacttatggaacttgggagggattttggattttattctaaatgcagtagtattatacatcttatatattttacctattccatcaaaatattttattttccttggatttgccttaaacttttgccatattaatttggtctcttggtgcttatttttatcttatctgtaaaatttatgatcttataagctttgggaaatatttttctgagcttcttttgtctttgaacttcagagactcctaatttcatcccttatagttgccatttcataatttattttcccatttctggacttattttttgtttctataatatctactctaaggtgtggcgagcagagctacatattccagatgggtatgcattatagtttcaacatgggagttatgtttgctgctgtgatcttcacctagtacctttcttgatgctgctatagcatatgattgaagtatcttactttccagaagtatctccagcattcccaatgaactttgtattcacatttttttcaaaaactgcctaaacttcttcacttccaaagttgtcaatatttaaaactttctgttaattagatgtgagaaactgtagctattaaaatgtactgcttaattcacatttattttctgatactggacactttgccttaataagttgctgttgttctctctcctgactcatcttatgtgctgtgccttcttcatatttctatactctttaaaatgtatcttcatatgcacacataatggctctagagctctctgatagatgtaaattcaacttttatcctttgttttccatagtttcaatatttacatgatacatatatatgctatatatgttttatatatgtttataaagatatttaacttattctgttgtagaaatataggaaaattacttagtcatttttagaaatgagaaaatataaaagtaaaagtaataaaattacatttatctataataacactgcctgtatacaatcgctattaatatttttgtgtaatatcctggtcacatatatactcatacatatatacacacacacamagagatacatatcctttaaaatatgattctattatattcattgtttagaaatctgttttatcccacttaatatatcttttgcatttttccagatcagttttaagaactacagccagccctgggtagccatgggttctgcatccagattcaaccaattgaggattgaaaatatttgaaaaaaaaaaataacaatacaatgataaaaaatacaaataaaaacaaagcactataacaagtatttacatagcatttgcattgtattasgtgttgtaagtaatttagagatgaattaaaatatactgraggatatgcataggttatatgcaaatgctatatcattgtatgtaagggacttgagcgtctaaggattctggtatctgtaggagtcctggaaccaatcccctgcaaatactgagggacagctctacgttttattctttcatttactctgatttaaccaatccatttattaatttgttctgttaacacaatactaacatatttttgygaacacatttttatagacatccataattatttccttacaataaattaaaaaggaaataactaggtgcgagaggtcatgtgcatttttaggctttcaatatacattgccagactactcccaaaatagttttgccagtgaatactctgctagcagtataccatggtgcctgtttcttctaaactctaaactggtatttctatacattacatacatatgtctaacaatagatttgaacttttaataaaactgtcacctgctttgctcagaatattgagagaaatataaattactgtatgttctatagatgaaaggcactgttaatacttacctacaatatttctttgtaattattgttttacatctattataaattgttaaaattcaaggtttattgtctgactgtagtgaagaatattaagttggcctttttttaactattatttgtagacagattttccagtcctctcttgtgtacttattttcaagatgtagcttgttgaagtacaaacaaactgatgtagagctagaaatctaaaatttcagtctttattccagtcctggcttaagcacttatgagctgtgtgttatgtaatctttttggatagttattttctcatccataaaatcaaaataatactttctgtttagattaccttaaagcattttttgtgaagatcaaataagttaatatgaaagtaatttataaactgtaatatacatatgaaatgtgttattttcatattaaccagattgctgcctaatgagaagatagttgaggaaaatggaagagattaaaatatcaaccttcaaaaataaatatttgaggttaatggtgttatgcaattttgtggctattgaaaaatttacttttatatattaaattccctcttcctaaatttctcttatagattcattttcctaatggaaataagaaaaagctggtaaaagggagggaaatggcagagattggtcttgagaccagtttcaataatggtcatatacttttgtggataggggcagctaaacatgtgtgatatgtatttagcaggtattaggtgtgagatccctgaatatctactcaatttaaatggattagctgggaacatttacttttattgctggtcatgtgagattttattattcagtaatttgactgtgaaagtacaatgagaccgttcagacccagtctgtttcttgccacttagactcagaaattcggctctggaaaaactgaaaatcccttcatctagtggcaagtacagttttatcatttatgttaaaccatattgccttttaggtaccttattggattttactgcatgcactgagatctctaaaaggtgaatatctgtctatcttagatatctgaatatttttcataattaaaaatgttcaagtttttatgcaaagaatgaatggcttctataatattatgatcactttttctagcatttccacataaaaattagtattggcctgatgattttatcttgtctcccaatacccttaacacctaggttgtggcatgcattattagaacacttctagaatcaaacttgacataataagcatttatattcagatatagagcagaggctcttgaactcatctttctgcccacttttgggttcttgcaacatgctatatatatgagatacaaagatgaacaagactagatttcttttttaaaaagctcacagtcttggaggaagaaaaaagagaagaagagaaatacatgatacactgtaacattgtaatactaacttagagaaattcaatttcttcatttgtaaaatgaggataataataataataataatactagttcccttatagggatattattataattaaatgataaactgtttagcccaatgctttatacactgtaagcatccaaaaaatgtttgctgttattactgttactactgctgttgttatttccaagtgttaagatagagacctactgaatgtgggaacacagaagagaggctaatgactgaaagaacgctaattaaaaacaagattagttgactttactgctttttctctgcaatttttcattcactgagcttcaggttttctttaacatgtgaatatgtataaatccaaaattaaacttatgcatattaatgtcaacattgattccctaaagttactggaacgcatttggaaatgaagtaggaaactccgtcattgtggttcattcttcagggttcagcctagtgtcctgtacaattaagtgcttcacagatgctgccccctaccccactttcttttaaacatttttgttcattgacccagatgtccctttgggtgagttttgagaggacacaagatacacagagttggtgactattcagaattatttgaggtagttcttattcatataatttttaagcaattctttttggtttagccttctgagatatacattttcaaagtttacatctttttttttccagttttacatacacttcagctgcacttactattccatttgcctgaaatgctcctacacgttttttcagatgtatgttcaaatgacacctcatcagagaggacttccttgtccacctttctaaagtaacaactccagttgctctctgtccccctaccagcttcaccttcttttttcactttagcacctgacaaaagctttgcaaatctgccattttaacgatagtgcctgacacttagagaatgttttctatttttaaaggcatttaagattcttaactaattgatagtgtccttggaagtaggtattgtatttacagagaaaagatatcaatatcatcagggagcagaaaggcacaaacatccaaggaagaaagataatcctctgaaaagacagttgagaagaaaggaaggtaactttccactgaatttccctgctagttacttggtagagaccaggagtggacaaacagttttgatcaagggctgttcacctctagagaaaaatctagaattatgggtcaaaaacagtggactcttttattctgagagagagctctagcttcattcattcaacaattatttttaagtttctcttgagtgccaggcastgttctgagcaatcagtgacaaagtcccacccttatggagctaaaatttctggggagatgcagaataaacaaatatgtagtataatttgaggttttgataagtgttatggaaaaaaaatcaaacaagacagagagtgaagaagttggtatttagttagctggtcagagaagcctccttacattgctgacatatgartggagacctgaatgaagtgatgatgtggagagccctgggaatcctagccctagagctgtctaggtagaggaaatagtacatccaaagaccctgaggtgggagcctgcttggtttatttagtaaccagcaagaaggccrgtgtaactggagcagagaaggtgagggagagggtggcagaggcaggtgaggcagatgagataaagaggtagcctgagaccagatcatacaaggcttatgtggcatgaaatcagtcttttttaaacaaaattaaaatttttatgggtacatagcaggtatatgtgtgtgtgtgtgtgtgtgtgtgtgtgtgataatatatatttaatatatataatataatatacaatatattatatataatatacaatatattatatataatatacaatatattatatataatatacaatatattatatataatatacaatatattatatataatatacartatattatatataatatacartatattatatataatatacaatatattatatataatatacartatattatatataatatacwrtatattatatatagatataatatataatatattatatattatatctataatatataatatataatatataatatattatatctataatatatagtatattatatattatatctataatatataatatattatatattatatctataatatataatatattatatattatatctataatatataatatataattatatataaacatatataatatataatacataatagatatattatatattttattatatttattttatattatattcattatatattattatgtttataattatatatctattatataatataatatatctattatgtattatatatattatatctwttatatataatagatatgtgcacacacatatatatatataaaacatatatacacacccatagtatactaggtgtgtgtatgtgtgtatatatatawgtatacatttatatatacccactatatataatatttataaatatataagtatatatttaatactttaatatataaatatgtacaccagatattttggtacaggcatgcaatgcataataaacatattgtggaaaatttggtatccatttcctcaagtatttattctttgtgttaacaaacaatcaagttacactcttctagttattttaaaatgtataattaaattattattgactatagtcaccctgttatgctattgaatactaggtcttactcactctttcaattttttttgtacccattaaccatcctcaactccacaaccccctactacctttcccagccttctactctctatctccatgagttcaattgttttgattttcacatctcacaagtaagggagaacatgcaatgtttttgtgcctggcttatttcacttaacataatgacctttaattccattatgtttttgcaaatgacagaatcacatttttttatggctggatagtacttcatttggtatatgtaccatattttccttttccattctttagatggacacttaggttgcttccaaattttgactgttgtcaatagtgctgcaataaacatgggagtgcagataactctttgttgtactgatttcttttgggtatagacccggtggtgggattgttggattataaagtagctctatttttagttttttgaagaagctctaaactgttctcaatagtggttgtactaatttacattcccaacaacagtgtatgagtgttcccttttctccacatccttgccagcatttgttactgcctgtcctttggataaaacttttttaaaatggggtgaggtgatacctcattgtagttttgatttgcatttttctcatgatcaatgatattgagcaacttttcatatccctgtttgccactggttgtcttcttttgagaaacgtatattgagattttttgcccaatttttagtcagattattagattttttttcctgtagagttgtttgagctccttgtgtattctgattattaatgtcttgttagatggttagtttgcaaatattttgtcctattctgtgggttgtctcttgactttgttgattgtttcctgtgctatgcagaagctttttaacttgatgtgccccaatttatccatgattgctttggttgcctgtgcctgtgtggtggtggtcaagaaatttttgcccagaccaataccttgggaattttcctcaatgttttcttgtagtagtttcatagttagaggtattaaatttaagtctttaatccaaatccattttgattttatttttgtatatgaccagagaaaggggtcttgttccattcttctgtgtataaatacccagtttttccagtaccatttattgaagaggctgtcttctccaatataygttcttggaaactttgttgaaaatgagttcattgtagatgtatggatttgtttcagggttctctattctgttccattgatctatgtgtctgtttttatgccagtaccacgctgttttggttactatagctctgtagtataatttgaagtcagatagtgtgatttttttcagttttcatctttttacttaggatggttttggctattctgagtcttttataaattttaggattgttttttctatttctactctttgaagaatatcattgatattttgatagtgattgcattgaatctgtagattgctttaggtagtatggacattttaacaatattgattctttccataaacatggaatctttcaattttttagtggctttttcaatttcttttatctgtgttttaaagttttcattgtataaatctttcacttcttttgttaattcctatgtattttattttgttcatgactattgtaaataggataacttaaaaaattttttttcagattgttcactgttggcatatagaaatgctactgatatttgtatgattttgtatcctgcaactttactggatttatcagttctaagagtcttttggtggagtctttaggtttttccaaaggtaagctcatatcatctgcaaacaaagattctttgacttcttcctttccaatttggatgccctttctctcatctgattgccatagctaggacctcctatgttgaataacagtggtgaaagtgtataaccttgtcatgttccagatctgagaggaaatgctttcagtttttcccctttcattgtgatactagctgtggggctgtcatatatggcttttattatgttgaagtatatgttccttctatatccaattttttgatgtttttaacaagaagggatgttgaattttatcaaatgctttttcggcatcaatggaaatgattgtatggtttctgttctacattctgttgatatgatgtatcacattgattgatttgcatgtgttgtaccatccctgcatctcagggataaatcccacttggtcatgatgaatgatatttttaacgtgttactgaattcagttttctagcatttttgaagatttctgcatcaatattagagatattgttctgtagttttctttttcattcttttttttttgatgtgttgttgtctggttttggtatcagggtaatactgagctcatagaatgagcttggaaatattacctcttcctctattttttggaatagtttgaataggattggtattagttctttatatgtttggtagaattcagcagtgaagccatcaggtcctgggcttttctttactcagagactttttattatggctttgatcttgttactcattattggtgttttcatgttttggatttcttcccagttcaatcttggtaggttttatgtgtgtaggaagtttttgattttttacagatttttaaatttattggcatatagttgctcatagtagccatcaatgatcttttgaatttctgcagtatcatttgtaatgtttcctttttcatctctgattttatttgtttgggccttctgtctatttttcttactctgactaaaggattatcaattgtgtttatcttttcaaggaaccaactttttgtttcattgatcttttgtatttttttttcatttcaaattcatttatttctgccatgatcttattatttcttttcctctaattttggtttcagtttgctccaggttttgtaattttctaaggttcatcattaggctatttatttgaagtttttctctctttttttttaatgtaggcacttagagctataaatttccctcttaatactgctttcactgaattccctagctagtagcattccataactaatagtatattgtgtttcctttatcgtttgtatcaagaaaatttgcaattttctttttaatttcttcattgacccactggtcattcaagtcataaagtcttagatctgaaagagacctttgattttggttaacatcagtgattatgaaattgaggttatgatgtatcactggattgtaggcgctaaattgtaagtaatagacagcttttaaaaaaaggtataaaaatatcagtacatttcacatattgagaataagaattgtttttgagaattttattccagttgtagggcatgtgtgtgtgtggttgtgggtggatgtgggtgtgggtgtgtattggtcccaatggaaactgtggttcttactataggttaagaaataggggaaaaagaaaaaagaaaaaaaagaaagaaaaaaggaaacaggaaaatgtttttgaactattgatctagtcttattcccaaattttatagctaaagaaactagttgggacatactgaaaggcccacatgtcttctacctcagtgtgatgatcccatttacatgtgatgtgcatgtctgtatgtgtatatgactattccacattgaagtaattctaatttccaaacgaaggaaagaaattacaaagtttatttagttaataccatatcagtaagtgctcacatcacttctctatttttaatctcttttatgtttgccttatttttctttttttccctcttttcttgaatatccttctatttctctaggaaagaaagatatacaacgtgaagctagagagagggagagaaagaaatccaggaccaataaagagggagagggacagacatccaaaatctaggagacaaaagagagaaacatccagggccaagcagaagtagaggcatctctgccccatcactcctgctttcttcaagatcccctctgcgttttgcacaggctgtagtcttctgggaaggcagtgctggtggagaatggatccatctactttcaaagacatgcattgggaatttattaatacctctctatcctgctgtctggctctctgagttgggactcagtaatgtactaaggagagtgagctccttgagagcagggctctttccttccttccttccttccttccttccttccttccttccttccttccttcyttccttctttctttctttcttttctccctttctttcctttctttccttcctttccttcctttccttcctttctttcttctttctttctttcttggcacgatcttgggtcactgcaacctccaccttccaggttcragtgattctcctgcctcagcctccygmgtagctgggattacaggcacccaccaccacactcmgctatgtttttgtagttttagtagaggcagggtgtcactatgttggccaggctggtctcgaactcctgtcctcaggcaatccatctgcctcggcctcccaaagtgctgggattacaggcatgagacaccatggaggtagggcttatttcttactcactcttgtagtccctcagtaatagcttgcttagaaaactattctaattaatacactgagcttttgagatactgttccttttatacagttacattcttactaatacaaatgagaaatctatagccttaaagaaaggattaggctaaaaagggacttaattttggaaaatttgtaaggagcttgataaaatgaatccagggttttaaaaaaagaggttctgttacacacacaacacacacacactaaatagacatacattgtggattaaaccttttttaaaaatgtcatgagaaagatattcttgaaatgatttaatagcattttttaaattattgtttttaattgtttaagatactgttatgtaatttgttagatgttagaaagcaagcgaaaggaatttattagatgttagaaagcaatggaagagaattcactgaatgtcacgcatattccataagagtggctgtttgataatttcatcaataaatttaaaaactttaaacttatttggggctgactgggcaaaggataacccccccaccccagattgggtcctcttttatgcaaggaattagagagaaatgaaattgttgacctggcacaagctatcctttcattaaaatgtttcctaaagtcccgatgactggaggggatatrttaaaaacaaaaggaggctgctcttcctatggagtaggcattcttttattcctttactttcttaataaacttgctctcacttttctttaaaaaaagaaacttattaacttattctttaaaaaagaatgggaaatctctttttcttaatagttaatatctatcacttattgaatgcctactgtatattcttttcacataaggaaacctcagttttttaaaatacccaagattatacgctagaaagcggtagggcccaaatttgaacctatttagcctagaacctcatgttctttctagcctactacttagggtcacgatgtttaaaatttttttttttttttgagttaactctttcttttgcttttatgtagctatagaaatttaacttccttttcaaaaactcagtttctagtggatataggtgatatacatttttttcaggaattcataattcatattttgatacttgactagggctctgcaaaattactatggtttaatgaataactacagggctaaaattgagggtatttgtgaaatggctttgtgaaatggctttgtgaaatggctttttgggcaggatatgttaaatccacattgaacactaggtggcactcttccatcattggacactttcaggaaaagctatcctttatggattttattagttgcttattaattttaatcatattgaagtggcattcgaatgctattcatctagaaatcacagatgtacacagtatcacagattatttctcataaagtcaaagacacacgtttttctttcctaaattagaaaactttagcctaaatgatgaaacaaatggtcatctttgggattaagcttgaaaatgtgggtttttttttttttttgcttttttttggaatctgttactttaccaaaatatcctttgacttatttttaaaaacttaatcaggaaactacaaaataaaaataatgtttgaattacatgaggtaatataggcaaatgcattccaaagaaaacactgtcttaatatcttcttcagatagactgtctgatgatcactacttctaacacktgtggatgtatttaagacttttaccacttttataaaggtacattagtggttacagccacttaagtctgtatcactttattgtaaacacagtattttctccattgactaatattcaaaaagactcattctttttctcatgatgaaaatgctatcagaatcagtagccaactgtagctaatgcagaatagtagtaatttgcaatgcatgtaaatctatatgtatatttagcatctgcagcatttggtatatgacatacaggaaaaaatggaaccattttggtttgcatattttgcatagagctacttttctctatctctgcaaccagggctgctacatactacatataggacattgcacaattatgagtgagttgctgatattcttatttattacgtatttttctaacacgtggcagtaaagtgttctcaggaaggcacaactttttctgtttgcacaggagtactagatggactaaagaatagtcttttcagatttcttagcaatgatactgctcgtctatgccattggctcttattcttgaaagaaaaaagaatacgagaggagggagcacaggagagagaaggtgatataaaagtaccattccaggatgcatctaatttactacaaatgtcagggtgggtttagggcctctacaatggacagatgccacaggatgccatcccactgtatcttctcctcatactctaccttcaaatcatactggctttgtttgttaaacttgccaacgtccatcttcctcccaaagctttatactttttgtctacctggaatgtatttttaccccaggtttctgcatgactggcttttcctcatcccgttttgacatctcagatcaagtgtagttgttattctagttgaaggggtactccctagctcactaccccaataattggcatgtttacctatttatcctattgtttttgtaacacaatttatttatttacttacatttttagagatggcgtctcactgtgtcggtcaggctggagcgcaggggtatggtcataactccaactcctgggctcaagtgatcttcgtgcctcagcctcctgagtagctgcaattacaggcacgagctatgatgtctggctataacacatattattacaagaattatatatattttttatttttacattctataaggagagacagaaaattagtaagtaagctccatgtcaacagggccttgtctgtcttctgtcttgaatatccccagtgtctgttgcagtgcctggcaaagagaagccattcagtatttgttgaatgaatgaaggcatgaataaattcaacttttaaggcataactaatatttcaattgatgatagctagcagagttctgctttctaaatttattcattcaacaaatacttaatagatatctgatatatgcaatgcatatacctagtcccttgggatgcatccataaataaaacagacaaaagtctctgccctaaaagggcttgcattcttttggggcagatatgcaataagcaataaacatatgaagtatagtatacattatatttgaaggtaaataagtgctacgggaaaaaaatgagcagggtaatgaatgttgggggtactgatagtggtgttgaatgtaatttaaagggaagtggccagagttagtcttgtggagaagatgatgatacctgagcaaagtcttgagggtgagaaaagataagccatgtaaatattggggaaaaagtattccaggaaataagacagtcagcggacagacttttttaggtgggagcatgccgtatgttcaagaaacagtgtggctaaggcaaagtaagcaagagtgacagttgtgggagatgaagtcagacggatcactggaggccagatcttggagggctytgtgggctattgaaagtgggttgacattattctcataggctgagttggcaaattttaagcagaggaatgaggtgatacaatttatatttttacagaatcctctctggctgtatttttttgagagaagctgtagggggcaaagatggaagtagagaggttagttatgaggctataatctaggtgagggagtatggtggcttggagtagggggtttgcagtggaggtagtaaagtggctagaatgtgtatatgttttgcaggtagatctaataggatttcctgatgaattagatctatggtctgagagaaaatgagtcaaggatagagttaaaagatgaccctaggattttgtcctgagcaatggtaaggatagcgttgctgttaactaagatgcggaagactggtgaagaagccaatttgtgttagggggctgggagcaggatttcaacttggggcttgttaaactagagctgtctaacatctaagataaaaggcagttggatagatatatgcaactaaaatttagagggagtggtctggcctgagcactgtcaatatgtagattatatttaaagccatgagactagataagatgataacagagtgagtgtagctaaagattaagggtccaaagaccaagttgtagagtatgctgacactctaacatcaagaaaccaaggagaaatgcctgtactggaatagaagagaggtttcaaatcagcaacttaaggttctaccttaaaacaaaaaacaaaaaaaggcagagtgtgatggttcactcatgtaatcccagcacttagggaggcaaagttagagaatcacttgaggccaggagtttgaaactagcctagacaacatagtgagacccccccatctctactagaaaataaaaagagaacagaaaaagaaaaataagaacaaattaaacctaaaggaaatagaaaagaaaggagataagtattggagtagaaaacagtaaaatagaaaatggagaaaatcaatgaaactaaaaattagttattggaaacaattaacataggcaaaactttggttagactgaccaagaaaaaagactgaagatacaaattatcaaaatcrggaatgaaagaggagacatcgctcctatccctgcagaaattaaaaggattataagggaatactatgaacaactttatcccattaaattagacaacttagaggaaatgggcaaaatcattgaaagacataactactaaaactcaagaagaaatagagaatctgaatagagttatactaaataaagcaattgaattagtaactaaaaatcattctacaaagctcatacccagatgactactctcatgaattctattcaacatttaaataataaataatagcaatctttcacaaacttttctggaaaacagaggaggaagtacaactcactcagcgaagccagtattgtcctataccaagccagatgaagacattgcaagaaaagaaaactgcagaccaacatcatgaatagaggtgaaaaaatcttcagtaaaatatcagcaatattagcaatacatagaatggattatataccatgatccagtgggatttatgccaaaaagatttaacatcaaaaatcaatgaatataacacaaaaaatagtgaaataaaggataaaacacacataattatcgttagacacagaaaaacactttacaaaatcaaataccattcataataaaaattctcaacaaattagaagtagaagtgaactttgaactaaggggattcatgaaaaagctgcagctagcaacatatttaaatggcaagtgtgaatgctttcttcctgagattgggaacaaggctaggmtgtstgctctcacaattttatacaacactggaatggaagttctagctggtacagtcaggcaagaaataaatgaaagacatctagaccggagaggataaaactgcctttattcacagaggatgtgaccctgtatatagaaaatcctaaggattccacaaaaaagttactacaactaatgtgttcatcaaagttgcagaatacaagaccaattgatttcacaaaaattaattatatttccatatactataatgaacactctgaaaaagagattaagaaattaactccacttacaatgacaccaaaagaatactcaggaataactgaaagaattgtacactgaaaactacaaaacattgctgagtaaaattaaagacctaaataaatggaaacattcaaacttcatggattagaagacttaatgtggttaaggtggtgattctctctaaattagtagatagatttagtgcaattcctatcaaaatcccagtgggcatttttgcagaaattgacgagctgatcctaaatttgatatggaaatgtgaagggcccagattagccaaggtgttttaaacaagaacaacaaaactggaagacttatactttctggtttcaaaacttactacaaagctacagtaatcaattcaatgtgggccaagtgcagtggctcatgcctataatcccagcactttgggaggccgaggcaggargatcacttgaggtcaggagtttgagaccagcccggccaacatggtgaagccctgtctgctataaaaatacaaaaaaaattagccaggcatggtggcryrtgcctgtagtcccagctactcgggargctgaggcaggagaattgcttgaactggggaggmagaggttgcagtgaaccaagatcatgccattgcactccagcctgggyaacaagagtgaaactctrtctcaaaaaaaaaaaaaaagagacaatgtaatggcatagcatagggatagacatatagattagtggaacagaattgagagtctagaaataaacccttcatggtaaattgatttttgacaaaaatgtcaataccattcaatgaggagtagtcttttcaacagatggtgctagggcaattatatatctacatgtagaaagagcaatttcgactaatctcacaccatgcatgaaaaggagttcaaaatggatcatagacctaaatgtaagggctataactataaagctctgagaagaaactatagaaatatatatatctctgtatccttgggtcaggcaaagccttcttagatatgacaccaaaacacaagtgaccaaaggttgccattccctccccaacaaaaaatcgtgtggaactggcaatgtgagacaggaaggacctctatcccaaaggatcattctgagtcctagctggacacaggtatgtatatatatatatgcatatatatatatatatactaatacaagtatatatatgtacttgtatatatatatatatactaatacaagtatatatatgtacttgtatatatatatatacactatatatatgtacttgtatatatrtatayayactatatatatgtacttgtatatatatatactatatatatatgtacttgtatatatatatactatatatatatgtacttgtatatatatatactatatatatatgtacttgtatatatatatactatatatatgtacttgtatatatatatactatatatatatgtacttgtatatatatatactatatatatgtacttgtatatatatatactatatatatatgtacttgtatatatatatactatatatatgtacttgtatatatatatactatatatatgtacttgtatatatatatatactatatatatgtacttgtatatatatatatactatatatatgtacttgtatatatatactatatatatatgtacttgtatatatatatatactaatacaagtatatatatgtacttgtattagtccatgttcacactgctataaaggtactacgtgagactgggtaatttwtaaagaaaagasgtttaattgactcacagttccacatggctgsggaggcctcaggaaacttacaatcatgccagaaggcaaaggggaagcaggcatctttttcacaaggtggcaggagagagagaatgtgcaggggaagcttccacttttaaaaccattagatctcatgaggactccctcactatcaygagaacagcatgggggaaactgcccccatgatccagtcacctcccactaggtccctgcctcaacatgtggggattacaattcgaaatgagatttgggtggggatacagagccaaaccatattattccacccctggcccctcccaaatctcatgtccttttcaaatttcaaaaccaatcatgcctttccaatagtcccccaaagccttaactcattccagcattagctcaagagtccaagtccaaagtctcatctgagacaaggcaagtcttttctacctgtgagcctataaaatcaaaagcaagttagttagttctaagatacagtgggggcacaggcattgggtaaatgttcccattcgaaatgggagaaattggccaaaccaaagaggccacaggccctatacaagtccaaaacctggcagggtacttgttaaaaaaatttttttttaattcattaaagctccagaatggtctcctctgattccatgtctcacaccyagggcatgctgatggaagaggtgagctcccagggcattggcagctccttccctgtggatctgtaggggacagtccccatggctgctttcaaaggctggcatcgagtgcccctggcttttccaggcacatggtgcaagctgtgagtggatctaccattctggggtctggaggacattggccctcttctcacagccccaccaggcagtgccccagtggggactctgtgtgggcaccctgaccccacattttccctctgcattgccctagtagaggctctccatgagggctctgccccagcagcagacttttgcctggacatccaggtgttttcatacatcctctgaaatctaggtggaggctcccaaagctcagctcttgtcttctgcgtacctgcaatcccaacaccatgtgtcggctgccaaggcttggggcttgcaccctttaaagcaatgccccaagctgtatcttggccccttttagcctcggcttgagctggagtgactgagacttagggtgtcacgccccagggccacacagagcagtggggccccaggcctagcccacaaaaccatttttctctcctagccttccaggtctgtgataggaggggctgccacgaagatctctgacacggcctggaggcattttccccattgtcttggtattaacattccgttcctcattttttatgcaaatttcttcagccagcttgaattcctccctagaaaatgggtttttcttttctaccacagggccaggctgcaagttttccaaacctttacataagttccaatctcaaaccatctctgtgaatacatctgactgaatgctttcagaaaatgccaggtcacctcttgaatgcttttctrcttagaaatttcttctgccagataccctaaatcatcttttgagttcaaagctccacagatctctaaggcagasgcaaaatgccgccagtctctttgctaaagcatagcatgagtgaccttcactccagttcccactaagtttctcatcttcatctgagaccacctcagcctggacttcattgtccatatcactgtcagcattttggtcaaaaccattcaacaattctttaggaagtccacaactttcccacatcttcttttcttctgagccttccaaacttttccaacccctgcctgttacccagttccaaagatgcttccacattgtcaggttatctttatagcagtaccccactctgctggtaccaattctctgaattagtccattttcacactgctgtaaagaatacctgaaactgggtaatttttgaaggtaagaggtttaactgactcacagttctgcatggctgtggaggcctcaggaaagttaacaatcatggcagtaggcaaaagggaagcaggcatcttcctcacaaggcggcaggagagagaaygtgcaggggaaactgccacttttaaaaccatcagatctcgtgagaacccgctatcacaagaacagcatgggggaaactgcccctgtaatccaatcaccttccaccaggcccctgtcttgacacatggggattataattcaagaggagatttggctggggacccagagccaaaccatgtcaatactcaaatggaataactgaagagtttactgaagggactagttacaaaggtatgggcagagtaagagaaactaacaagggatggtacaggaagcagaagtcagggttagtgacaacaggaagcctttactacttcttgacctatcagggaaaatggagagaactaccagagagcagctgtaatggaaaggctgtctgacatgagctgtggtcttcattgcagaggagaaacttaaccaatgtgatctggcaaggaggaggaagtagaataaatatcttggcctctctgttcttcctttgatttgtagccactggcttctactggccaaacccatgtaaaagtccaagggcaagggggtcctttgatgaagttcatggaggtcagctgaccaggcttagaacaggatggagaagagcagagtgaaggtctggagagacaaatggaaaatgacaaatggaaaatgtctagcacatccactttcagaccaagtagtacaatagctatgggataaaggaataacaagacttggctcagtgtgtttgtgaccttgacaacagttgcttttttggaaaaactcaaggttagcatttatattgttattttctgtgttatcatttgatttctagctcaataataaagtcaattttctatctgaacattgagtagtttataattgcttaaatattttcatgccattataattagacccagaatttatttattgattaagagccatctctctttttggaatattgtggttcagttaattgttggcaagtgatctctcatgggtaactcatgtcctggagttacttaatactttatcaagtatattcttttaagatggtagtcagagaagcccatacttaccaaaaaagtaagaaaagatgtcctctttgagaatctttctggaaatataagtaaacagacttacaaacaaataytagagtttgggggggagttttttgaatatggaagagtggatttttgccattttgtcaagatctattgctgtgcacatttatttactcctttagatctttattttggtaaatatttatttgagtattttatggtcccagaactaggagagccaccttgaagtttcaagagaaataaatgttacagcttctttgagaatttcataattttattagagagacaatttgtattgtataatacaaaattagacgacaacccagtgttctactgtgggaacatcagtctgcccgtgaagaaacaagggtccttgttaaactatgccacttaacaagtcaacatcatttttgccaagtcatttaacttatctgaccttctgtttcctcattgttaatgttcctttgatctctgaaattctgtgaaaatcaaattccaagtaacagaaatatacattggctggggttggtctgggaagacttcataataactgtgttttctttgagatgtctaaaggaaagttcaacctttttagagaggtttcccttgatagatggtgtgtggcattgttttttcactgggcagtgatctgcagaagtcagagagcaaaaattttcaagattatggggcccaaggtgaagaagtttaaaaagctgtttctcccctgaaactggatgtgtgcctttttaaacgattccatcttgtttgaccagcttcctgctatatattcatactgtggaaatggttcttttctggcatttttcactaacaaaatttagcaggagttaagttgaaagtgcatcttaaacatcacagttggggaaatacaggtgtttgtgttctgttcattgcatcactgacttttttctgtaaacacaaaaacaatgcattctatttctgagatattgtcttgaagtaacattaaaaaacacaatcttggaaatatgtggaattctgttgaaaatattttttcaaaagaaattttaaactgtaattttttaaaagcaaaaagtgattgcaatggtatacttagtgtttaaagaatttaagtgaaataggatagctaactaaatttaatgattcacctaacttttccttctgttataatttgttttcctttattaatgagaaatgctaagttggagttgacaaattagattcttcacacgtgaagaccctttttacttgagtttgccttctgtctgtctttacaagatagatttatgaagaaggaataggtctctgtgaacaacctggacaggctcaaaactggttatggtcacactaaagtaaggttaatatttgacactattcaatgtaagaaaatttcttggtctttgaaggaagccctggaggaagactatttgataaaggataggtacaaaacaagttagtgcttaaaatctagcctctgacaatgggataatataaaccttttccttgtgtttttatttctattgtacttatcactgtgacatctaagtaaagcaatgtgaattactatgcttgtttgcctactgtgtagataatacatttttaatgatctgctattgagaggtgacagcatgctggcagtcctcacagtcctcagtcgctcttggcacctcctctgcatgggctcccactttggcggcacttgaggagcccttcagcccaccgctgcgctgtgggagctcctttctgggctggccaaggccagagcccactccctcagcttgcagggaggtgtggagggagaggcgtgagcgggaaccagggctgtgtgcggcgcttgcgggccagctggagttcygggtggrcgtgggcttggcgggccctgcactgggagcagtcggccagccctgctggccctgggcaatgagggacttagcacccgggccagcagctgcrgagggtgtactgggtcccccagcagtgccagsccaccggcgctgcgctcgatttctcaccgcgtgccttagctgccttcccacggggcacggctcgggacctgcagcccgccatgcctgagcctcccacccactccgtgggttcctgtgcagcccgagcctcccctacaagcgccgccccctgctccatggcrcccagtcccatcgaccacccaagggctgaggagtgcgggcacacggcactgggactggcaggcagctccacctgcagccccggtgcgggatccactgggtgaagccagctgggttcctgagtctggtggggccttggaggacctttatgtctagctcagggattgtaaatacaccaatcggcactctgtatctagctcarggtttgtaaacacaccaatcagcaccctgtgtctagctcaaggtttgtgagtgcaccaatcgacactctgtatctagctgctctggtggggccttggagaatctttatgtctagctcagggatttaaatacaccartcagcacccagtgtttagcttaaggtttgcgattgcaccaatggacactctgtatctagctgctcttgtggggccttggagaacctttatgtctagctaagrgattgtaaatacaccagtcggcactctgtatctagctcaaggtttgtaaacacaccaatcagcaccctgtgtttagctcaaggtttgtgaatgcaccaatcgacactctgtatctagctgctctggtggggacttggagaacctgtgtgtccaaactctgtatctaactaatctgatggggacgtgaagaacctttgtatctagctcagggattgtaaacacaccaatcagtgccctgacaaaacaggccactcggctctaccaatcagcaggatgtgggtggggccasataagagaataaaagcaggctgcctgagctagctgtggaagggaaggtccccttccacactgtggaagctttgttctttcgctctttgcaataaatcttgctactgctcactctttgggtccatgctgcttttatgagctgtaacactcaccgygaagatctgcagcttcactcctgagcccagcgagaccacgagcccaccgggaggaacgaacaactccggacgcgctgtcttaagagctgtaacactcaccgcaaaggtctgcagcttcactccwgagccagcgagaccaygaacccaccaraaggaakaaactcygaacacatctgaacatcagaagrgacagactccrgatgcgccaccttaagagctgtaacactcactgcgagggtccacggcttcattcttgaagtcggtgagaccaagaacccaccaattccggacacactatgttctcagaatgttcaaggcaaagtgaaaatttccttgtttagaagccacttttcactcacccttactggaagcagctggcttgagggagcaggttcttagatggtgttgatttctttctatatatatgtatatatatatatctcttctgaaacayatatataaatatatatttaatatataaaagtatatattaaatatatattatttatttaatatatataawatatataaacatatatattatatatatttcttctaaaaaaatcaggatacatgtgcagaacgtgcaggtttgttacataggtacacrtgtgccatggtgatttgctgcacctattgactcgtcccctaagttcccttccctcatcccccaccccacaacaggccctggtatgtgttgttcccctctctatgtgttctcattgttcacctcccacttatgagtgagaatgtgtagtatttggttttctgttcgtgtgctagtttgctgaagatgatggcttccagcttcatccatgtcyctgcaaaggacaygatctcattccttgttatggctgcatagtattccatggtgtaratrtaccacattttctttatccagtctatcattgatggrcatttgggttggttccatktctttgctattgtaaatagtgctgcagaaaacatatgtgtgcatgtgtctttatagtagaataatttatattcctttgggtatatacccagtaatgggattrctgggtcaaatggtatttctggttctaaatccttgaggaatcaccatactgtcttccacaatggctgaactaatttacattcccaccaacaacgtaaaagcattcctatttctccacagcctcgccagcaccttgtttcctactttttaatcgtcattctaactggtgtgagatggtatctcattgtggtttggatttgcatttctctgatgattagtgatgttgagctttttttcatgtttgttggccacataaatgtcttctttygagaagtgtctgttcatatcctttgcccacttttggatggggttgtttgtttttttcttataaatatgtttaagttccttgtaaattctggatattagaccttttcagatgggtagattgcaaaaattttctcccattctataggttgcctgttcactctgatgatagtttcttttgctgtgcagaagctctttagtttaattaattagatcctattgtcaatttttgcttttgttgcaatcgcattcggcctttttgtcatgaagtctttgcccattcctatgtcctgaatggtattgtgtaggttttcctccagggtttttatggttttgggttttacatttaagtctttaatccatcttgagttaatttttctataaagtgtaaggaagcgttccagtttcatttttcygcatatggctagtcagtttgcccagcaccatttactgaataggagatcctttccccattgcttgtttttgtcaggtttgtcaaagatgagatggttgtagatgtgtggtattatttgtgaggtctctattctgctccattggtgtatgtgtctgttttgctacccataccatgctgttttgattactcatgctgttgatttctattataatgtcattcaaggtgaatgtgggttcatggagactcagactaaactttagaagcttgttgaactgtaacctttatcatctacataatttactccagaatgtctttgaagtcaaacagaagcagatacttggcttgaaatagattgactagttactgacccttcaacatgcaaatcatgaaaataagacttctagttagtttaagatatttctccatcatgcattatggaatccatttagtatgatttaaagaagggagcacttttgtatgaacaaaaatattttgctgcctattgtgaagtaatttttcctaaaatacagcattacaaaaatgcaatgtacatttttttcagtgcactgttagaattacaagtctgataagtatgtcctgatttttattgttgtggttgtgttggtttttaaaacctgatttgtcttaatagggggttaaattgaaagaatatagttgctgtttctagaaatcgagcaaacactgcagcttatataggctgcttagtccagtgtctctcagaagggagtttccatcccttcttgccacagttaaggagagtgtctaagagcagatctggagtcaagctgcctgggttcacctctgtttataagctgtgtgatcttggcaaatttctttttttttwaaatattaaatgtttatgggtacatagtagatatatatatttatggggttcatgagatagtttgatacaggcatgcaatgtgaaataagcatatcatggtgaatgtgctctgtcccctcaagcatttatccttttgatachtttatccttttgatatccttttgttacaaacaatgcagttacactctttaagttattttaaaatgtacaattaagttattattggctacagtcaccctactcygctatcaaatattaggtcttagtcattctttttaattttattttttttgtacctgttattcacccccaccttccctacagcctcccactactcttcccaacttctgataaccatctttctactctccatgtccatgagttcaattttttttcattttttagaacccacagataagtgagaacatgtgatgtttgtctttctttgcctagcttatttcacttaacataatgatctccagttccatccctgttgttgcaaatgactggatctcattcttttttatggcttaatggtacttcattgtgtatatgtaccacattttctttattcatctgttgatggacatttaggttgctttcaaatcttagctaytgtaaacagtgctgcaacaaacataggagtgcagatatctcttcaatatactgattcccttttatttgggtatataccctgcagtgggattgctggatcatttttagttctgtgagaaaccttcaaactgttctccatagtggttgttttaatttacattcctaacaacagtgtacaagggtsccctgttctccacatcctcaccagcattttttattgcctgtcttttggataagagccattttaactgggataagatgatatctcattgtagttttgatgacatttctctgatgatcagtgatgttgaacaccttttcatatgcttattttccatttgtatgtcttcttttaagaaatatctattcagatcttttgcccattttgtagctggattattagatttcttcctgtagagttgtttgagttccttaggtgttctggttattaatcccttgtcagattggtagtttgcaaatattttctccyattctstgggwtstctcttcactttgttgattgttttatttgctgtgcagaaggtttttaacttgatatgatcctgtttgtccgtttttgctttgattgcctatgtttgtggggcattgctcaagaaatttttgcccagaccaatgtcctagagattttctcccatgttttcttgtagtagtttcatagtttgaggtcttagatttaagactttaatccatttttattttatttttgtatatggctggagatagggggtctagtttcattcttctgcatatagacatctagttttcccagcaccatttattaaagaggctgtcttttccccagtgtatcttgtttgcacttttgttgaaaatgggttcgctgtaggtgtgtggattttttctgggttctctattctgttccattggtctatgtgtctgtttttatgtcagtaccatgatgtttgggttactatagctctgtagtataatttgaagtcagttaatgtgattttttcagttttgttctttttgcttaggatggttttggctattctgagttttttgtggttccatataaattctagaattgttttttctatttctattctttgaagaacgacattggtattttgatagggattgcattgaatctgtagattgctttaggtagtgtggacattttaacaatgttaattcttccaattccatgaacatggaatagcttcccatttttttttttggtctttttcaaattatttcatcagtgtttcatagttttcattgtagagatcttcatttcttttgttaattcttaggtattttattttatttgtggctattgtaaatgggataactttttaaaatttctttttaagattgttcactgttggcatatagaaataccactgatatttgtatgatttcgtatcctgcaactttactgaatttatcagttctaagagtctttcagtggagyctttaggtttttccaaatataaaatcatatcatctgtaaacaaggataatttgacttcttccttttcaatttggatgccctttatatctttctsttgtctgattgttctagctaggacttccattattatgttgaacaacagtagtgataatgggcaccctcgtcatgtttcagatctcagaggaaaggcttttagtttttccccattcagtakgatactagctgtgggtctgtcatatttgtcaaatatgcttttattatgttgaggtatgttacttctatattcagttttttgrgagttttcatcatgaaggtatgttgagttttatcaaatgcttttacaacatcaatggacatgattgtatggtttttatctttcattcttttgatatcacatatcacattgattgatttgcttatgttgaaccatccttgcatcccagggatatatcccactcggtcataatgaatgatctttctaatgtattgctgaattcagtttgctagtattttgttgacaagttttgcatcaatatttatcagagatattgacctgtagttttatttatttatttattttgatgtgtcattgtctggttttggtatcagggtaatactggcctcgtagaatgagtttggaagtagtccctcctcctctattttttggacttttctttactgggagtctttattatggctttgatctcattacttgttattggtctctttaggttttgaatttcttcctggttcaatcttggtagattgtatatatctggttatttttctgtttcttctagagttttcagtttattggcatatagttgcttgtagtagccactaaagatttttttaatttctccwgtaacatttgtaatggattttatttatttatttatttagagacagagtcttgctctgtcaccagactggagtgcagtggtgygatctcggctccctgcaatctcctcctcccgggttcaagcaattctcctgcctcagactctcaaatagctgggactacaggcgccygccaccaygcyyggstaatttttktatttttagtagagatgggggtttcactatgttggccaggctggtcttgaactcctgacctcgtgatccttttgcctcaacctcccaaagtgctgggattacrggtgtgatccaccacgcccagccattttgacttcttagtagccattctgactggtgtgagatggtaccacattgtggttttgatttgcatttctctatacgccacagttacagtgttataatatcctgtgtttttctgtgtacttactattaccagtgagttttktaccttcaggtgattatttgttgctcattaatgtctttttctttctgattgaagtactccctttaacatttctcatagaacaggtctggtgttgatgaaatttctcagcttctgtttgtctgggaaagtctttatttctccttgatgtttgaaggatattttaactaaatatactattatagggtaacagtctttttttccttcaccactttaaatatgtaatgacactctctcctggcctgtaaagttcccattgaaaagtctgttgctagatgtattggagctccattgtttatttgcttctttactcttgctgcttttagaattctttctttatccttgacctttgagagttagattattaaatgccttgaggtggtcttctttggattaaatctgtttaatgttttctataatcgtcttgtatttggatattgatatctttctctaggtttgggaaggtctctgttattagccctttgaataaactttctacccctatctctttctctacttcttctttaagaccaataacttagatttgccctttccagcctatttcctagatcctataggtgtgcttcatgttttttattctttttttgtctcctctgtgtattttcaaataacctgtcttcaatctcactaattcttctgcttgatcaattctgccattaaaggactctgatgccttcttcagtacgctttttgcatttttcagctccagaatttctgcttgattctttttaattatttcaatctcattgttaaatttatttgatggaattctgaatttcttctctgtgttatcttgaatttcttgggtttccttagcagaggttttttttttttttttttcaggaaacacaaattttcatgaaatttgaaaattcaaaccacagcatgacattaagaaaacacaaatattacttatccagaagaaaaagtgttttgaactttttcataaaatatttaggaacaaggaagttgaagcttggagcggtagagtgagaaataaggaatatgtgggagagaaagtaaagtgaaaaaaattagatcagatttttttkttgttgttgttagcactaaactggtttgcttcaggcccctagccagggttgattttgaaacctatagcagagctattttgaatactctgtctgaaaggtcacatatctctgtttcttcaggattggtcccttgtgccttatttggtttatttggtaagttcatattttcctggatgatcttgatacttgtggatgttcatctgtgtctgggcactgaaaagttaggtatttactgtagtctgcaatcttggcatgtttgtacccatccttcttaggaaggctttacatgtatttgaaaagtcttgggtattatgatctaagctatatctgctttaaggggcaccctaagtccattataaaactaatgatgaatgtgcaacagatagtgttataaaatttaaaaagaaaattgttactaaaatttttattgacaaaaacagatctataactgtttgaactccccaaaaggtaagaattgtactttggctctgatttattaatatgatatatcctttacaaaaaaatttacctagtattatatgttcaatagtttttattttcatttataaatataattttagtcatttttttgtccatcataaatccctttttccttcatactgatttttttctgcaaagacctttaaaaaactatttacctagggttagttgcagctgaggctgcatcatcacaaatccagagttgctcttcttgtatgtcagaaaaagatcagtgagggagatgagtgtgtacaatgcagttctaaagtcacaggtggacctataagccaccatcatcgctttgggagacataggcaacagaaatcctaagtgcttcatgtaaactaagtcatttaatccccaaaactaccttatgaagaaagtactgtttccatttttcaaatggggaaaatgagagttagagacattaagtcttgcccaggtcttttggactctcacaaatattcctccataatccccccctccaaaaaacccctttatagtttcctggatcttctctttaagcaacacatttcagggccatgtctcttgctgtaggctgccagcaaatgatagcagcagtagcaccagcagcagcagacttatcagattggygtgctcgttgcactcagcatgctagtagtaccaggcccagttggtatttgttgattgatgatcatagtatcatcaggaatggaatagctttctgatcagtattattgaaatgaggccaaggtacaattttgcttggtaacatacgcttaaacttactcttgaactgagagtttggattttttaaagtatatctgtatggaaaagattgttaatttcatatgatccactgtaaagctggaccttcctttaaacagtagcagagagaggtggtggtgtgatttatttctccaaagacttgtttaatcttcaaatataatttcacttgcaattccaatattggtcaatatttccataaaatcacctattttttgttataaaacttatatgaattttacattccactcaataacatatatttatatacacatatatgcatgttgcartgtaaaaattgtttacgttacttaccatcgagtaagactggtgctctaggaaagttctctctgtatagacagagaccttaagactttaagatactaaggcttctgggtataataataccwcattgtccagttcaagtcacttcaagacttctggtataataatacacattttcctttaagactttaagatttctggaacaaagtgtgattatgtgtgagggatcaactcttttattatgtataacttatatttaaaatgttcaaaagaggaaaaatgatttggcttctttaagaaagtctctttttgatgcagtgtaatctttaaatgttcctcataaagtacttttgatagaagttggaatctycarggaagaaggagctaatgattgtctgtgtaatcattaggttgtggcattctcatcagagcatctgtgacagacaactcaaggtgtatctatgtgctactaaagtgttagtttctctctcttgagttggccctggaaggctagtgatatggaaatatctgagtcataggaaatgtagtttccagttttggctcagttattaaccagctctgtgaccttatgctagtcatttatattatctggagttcagtttctttatccataaagtgaagagttaaaacaaaatgatatatagctttaatagcatttgaggaaggaaaccaagttcctccttttttctagatttggctcaacaaagctgaaaagtaaattttctttaaattttaagggtggctttggtctggatggtgtgtgtatgtgcatgtgtgtcaggcaggtagttgaaaggccaacctcactgtgatgttttatcccaagtccagatgtaccactgttatatctccaggtacatcttttaactctaggaagtaaacacagtttttactgtaaaggtaaaccagaaagttaagtttaaatcaagtttgaatataatttgtacttggagtaataaaccttttcccacagaggaaacagcactagcttgggagttcgtttccaaaagctctactgaayaagcacaggtttcagctcacttttgtacctgtttctctgtcccttggtgggctccctctaccagcttcttaggcttctcagtcacttgtctgcttgacttgagactcagcacatgtcttacgagtaaagacaacgcaatgaatgttggtttcacttcaatgggcttcctgtctttctggatcttggatcctcagatcctggctgccttaaaagctctccaaatctttgatatcctacttttctagttgttcttagaagtagcattggtttgctgtgagctactttgtcatagccagaagcaacagttcctcagtttattttctttgtattaaaactcttttctggatagagtatagtgcaaaattctgctgcccaattcagaattaaagagtgtggttggcaggtttggtggataggctacatggataaatggaagtaccaggtttcgtggatttttcatttgctttagttagatgtgtcatttcttctattttatatttattttagtgaaggcaacatttcaattatgtatttaaataaatattttattatggatagtaaaaattttaataatctactaatatttaaatttttatttgtaggtgagtacaatactagaatgcacagtgaaacctaaactcaaaaaagctgtattgttataatcaatatgaaaaatatatatgatgaaaggcttttacaaatgtcatagtatgtctcttattttacatttattttctcttgagtaatcagcatggtttaaatatgtctttggatgattgtgggaaaaataaaagtgtcttaaaaataaaagtgtcatctacgttatagtttayggatatattataaacatmattagacacacaacttctaccattagaatttataagtcaattattaacttaaaaagaacccccaaattttccctaaccagagcatcagatggcaaatccagaattagcaataaaactcctagattcccttcttccctatgcttttatttgcttattataatgaagatctttggggcragggtatttttactaacatayatgatgggaagtcctgctcaatagtcaagggaaaaggacccatctttgacttatttttttcattttttgctctctgtggtagccctaagagtgtacttcacagacctccaactacaggcaacctaagtgaccaagggtcccagctgctgttctctgaaatccactgctgcttttgtgctgagcacttgcttcccaaaggctgctcccagccactgattgagaggagcagggatactaaagctggcccctccctgtccttgggagtcacctggctctagcacttcctgatgggcttacagaacctttcttagagggtgtagcaatgtgggatgattccacttaaccttccttgcatctctccaccactctgtgtcaaacttctattgtttttatcggcttttctagtcttccttggctccctcatcattttatattacgggaattttccttaatgaaattcttgtatgttcaatcttgtcttcacattcattttcagaggtcctagactaacacattctctatttctataaaaagatactatcatatgaaattactaaggaaaaaaaaatgtttgctataattttaatggtaatattctgatactactagattctcaaatttagggaagtcaaaacttcatataattgagagctctcctcagaaatttattcttatattagtttattgatagtctgtatgtaaacttgctttcagaaggactgaattgttacaatagtaaaatcaggagctcatgttctcagaaaaygttaatttactcaggatgattagatggctgtaaagtaaaaagcaatccataagtcatctttgagatatctaagggtatttagtgagaaattgaaaggaaatattgctgagggtgtgttgataactgatactttgttgaaaagcagaaacattcaatataataggtagaagtrattttgtttcttgsatattggtaatttcattttgtgtgacttacagaagagtgcttgttctttatatgttagtgttaaaattcttctgtctttctttgcagaatcatagtgaaagattcgttttcattgcagagtggtatgatccaaatgcttcacttcttcgacgttatgagcttttattttacccaggggatggatctgttgaaatggtaaataagcctttctttgcttgaatgttggcaaagggggtgaacatgggaaccattgccttttatataattgctttttaaaaacacatttatatgtatgtgtgtgtgtatatatacatatggaaattctttttaaacttattcattataattccaatataagaagttaacttgtgcctttatttttaatgtcaaaaataggaattttttgttgttgttgttagaagactgaagtgggggctgggcgcggtgcctcatgcctgtaatcccagcactttgggaggccgacccaggcagattacttgaagtcaggagttcgagactagcctggccaacatggtgaaaacccatctctactaaagatacaaaaaattagccgggtgtggtggcacatgcctgtaatcscagctactygggaggctgargcaggagaatagcttgaactcaggaggtggaggtggcagtgagctgagatcacgccactgcactcctgcctgtcctgcctgggcgactgcatgagactcttgtctcaaaaaaaaaaaaaaaaaaaaaaaaagactgaaatgggattattcatgttttggataagaaataaacaagtgattatagataaggattattatggtcataaatacgtcctcattattgaaagctgttattgctacaaaaagtcaaattgaagaggctcaagctaagagacttctgtttctttgkgttctttcactggcaacacaattttaacaagtagatctttttggtattgggattttgtgtacacaagaaagcagawatttgggtgtatgactctttctttagcattttgtaaggactactttgctgaaatgatttggtaataaacaaatctttctattcaggtttttaagagtattaaatttgtaataagaagcttttatgttattaccagattggattaggaaatatggaagttattaaaaattatgatttatatttgtaacaaaaaagaaacagaatataacctatctttgataagacagaattaagaattatttctaccttatgatgagattaactttccttattcataactttttttgtttgtttgttatattgttgtgtctggttctagcatgatgtaaagaatcatcgcacctttttaaagcggaccaaatatgataacctgcacttggaagatttatttataggcaacaaagtgaatgtcttttctcgacaactggtattaattgactatggggatcaatatacagctcgccagctgggcagtaggaaagaaaagtaagaaaacaattatataatctttttacatgctctaactttgggttcaaagtcaatctgaatcaagactgggagtatgtaaccatatgaggatggataggacctggaaaatggttgtcttcattctttttctttttttcaatttaaaaaaaaattgataataccatagttgtgcatgtctcatctgacttaattcatgtttatgtctcctgtggcacttagcacatctccatccacattgcaagcaccttgtctgtattagctgaacgaattaatgaatcacaatttaaaatctatgatctattctttcctttttccactttctccctgttttcaaatgatgatctttgatctagttgaccaggaggtttttgcctagattgtttgtaactaatgctgcctattgtcaagttttgttaacagatatatatatatatatttatatctaatagatgttgaccaacggatcaattgaaaaatgacaatgtgagtgttgtaaaaaggaaaaaaaaaagaaaccatataaagaaattatgatacagggagactgatgtatcttattcataactgtatccctaaaaactgttgtagtgatacctcaaacagtaaattattcacagagtgtgacccacaaaagtttgttaaatatatgaatgaataaatttatgtcatcgaaatgtctggaggtacggtatgtctaaaggaagagtttcccactggctggcatccccgcctccctatcttcctcccactgcatgtggctctttctgtgagagaaactgtgacatggtgcctccacatgtgtccctgttcttctctctattgtttgtcaaagctgcattcatcattctttttctcagttttgatttagaagagatacagtcatctgtaaaaggggctaagaaaaaaaatggaagagaaagaacaacttgtagatacagctgaaaattagacttatagaaaacaagaaaacaaggatttttgatgttttccttctgaatactgattttcagtattagcaagatgacattttaattttcagtctctacatttatgaatttcaactttctgagactagaattaattatatttgaagtgaaattttaattcctttgtcatctttcttggctttaatttctgtagcttataytttgtatggtttggggagtttttttttcctgtagagtgattggtgctgtaattaaaatagggattatttgtagaagttaaggctatatgtataaaaggctccaaaaatgatttaattcaatagggaaaacaaatcaatcaaactattttttgagatctactactcaaatgactagctgattgcctaacgtctgagtcactcttatagtaatatgatatctctttctgtgacttccatagtctttctgtataagcactttatagctcttgaggtgattggattcttagtgtgggtgttagtacacaaatggtgatggatcagaggggtggtgcatgcctcattaaaaaggaagaccaaagactctctttgaaataggacagaaatttcaggtattagataaataaataggaatcttttaatgttatgagatcttatgtaaaagtctttgggattaaagaaatgccaaccataattcctttatttaaaactcataaatatgtgtagcattcatttatggagcacatactatgtgccagacactatgatatgcactttacatacacctcagttcaagactactttattttatttaattattgttatttttgaggtggggtctggctctgtcacccaggctgaagtgaagtggcatgatcatagcccactgcacccttgacttcccatgctcaagtgatcctcccatctaagcctcccaggtagctggaactacagccatgcaccactattcctggctaattttttggtattttgctagagatggagtttggccttcttgcccaggctggaagactgctttaaatttttatttaaactagcaaaataagtgagttagggagtcagggttaacagtctgacctaagaaaaataaaataacaaccataaaaattataatttatgtattttaactatgatttgactgaagtgaatgttgttaaatctattttatagaatgggtaagtaacttgtccacagtaacacagctagaaagtaaagggaaaccagaaaaccgtgttttgtttttccctaaaattcattctctttctactaaacctctaattaatatgctggcaaatactgttgaatgggactgattttaaaacaggatgaacagaagaattctattttaatgtaaaaacaaatttgaagtatttgggctttatatagttaatgaaaatgaaaatatatgtagtatatattttactgactcaaattgattcaccattttctcttcttattctttcttaattgcatatgggttagtaaatccaacaaccatttgggtgatttaaataaacttcttccaaaccgaagagtttcaaaaatttattgttttatttaaatggcaaaaagtaagcatatggaaatatgtgtgtatgtctatcagcgttccacagaaacaccttctatgtaacaaccgatttagtctagttctcagttttgtatagtgttgagaaaaatttwtgaaccaattacattttcaactcttttctttctatagtaaagcctgtagtgaggaggatgagtgaaattgatccccatggagcctatcagctaattggggagcagttatccagataatttaatataattcagcttaactcatgaactagcttcagctttccaattccctttgactgtagaaatctgacatttgattcacatttttatcctctctttataaagatcctctaatcaaatggataaaggttacaagttgtcaatgagtcagtctttgattttaattttagctagtaattaattggtgctttatgattgttgtttagatttggagacacgatacaatttgtgtctttctaaaaatttattacctcaaaccagaaataattaaagttttcatatgatgagtcaatatgtatatgtatgcatgtgtatgaatgatagaggaattttatatgaatagacagctattccccatgtgataagtgaggtattaaatgtttactttgatagcttatatctttagtaagaagtttataaaaatcaatgaaaaataatgctagtatcctatttaaaaatccattaattttaagtactgagccacatatttacatkgagcaatcctcattccttttgagtctcagccagaaagcaagccatctaatcaaattaaagggagaaaggcatcagtaggttgggtgaacaacattatagtagatgttaaatacatgaaattcttgtgcccatctattaactttcagtgaaaggaagacccccctgtttttcagaagaaaaattatgaagtcaactgtgtgtataatctttgatcccaaggtctaagcccaagttatttgaggctccatcacagcaggaactcagtcacagtatgcattttcctgtcctcttggagatgtactgaaatggtatatggataaaaaaacaagccgtattttagrtgagacctgtgcttggaaggggcttaagaatacttctccctggaggtagggagattgacctaaataaccttttgaactaaatcaccttttgaatttttaaatacagcccaaaaattccaagcatttgcttaattgataattttttaaaaggtactgaaataatactttatatgttttctagacttatgtagtttaacaattcttatggatgaacatacattttctaatattagaatttgactcatatgaactatacgttttttctatgtgaagatttggcagtatcatcagatatatgtttgaagaaatttcattggaaggaaatgtcataaaatcttggctatatcaagtttgaaacaacttcagtgttcaggtattatatagtttagcaggattacagtattgggatatcataatgtatgaatgacttaaaagacattttaattttaattaaaattaaatttaaaaattaaattaaaattaaaattaaaattaaattaawtttaattttaataaatacaaaaaatgtacctcttctgytcttccatcccaactggaataaattaagtttagaatactttaaaaattattattctgtcttcccctggttgttatggcacttcaccaccgctacccccaccgctgcttccatctctatctctctggctattttttctcagagtcattccttctcagaggcaaaaaagactcctggtattccccagggttctgttcatggccctttttttctcattctatatactctcccaggggattctatgtactccatgacttcaacaatgtgttgctttccaaatttatgtcatcaccccagctgtaaaaccatatgtttaagctttttcctgaacgtttccatgtagatttttcacaggaacttaaaaatccaaaattgaattaattgacaaattcaaaattaaattaattctctttcattgaaaaacctacttctgtatgcactaacacaatattcacctaattacatacttacaaaattggtggctgtccttgagttccatrtgtattttatccctaaatccacatggggacctaatcttaccaatttacttgtctccttcatagatctctcttatttctcttctcttttttatcttttacattcctccttaaaacagcttcttgtcatctcttgagctcagttagtctccattcttccctccaaattactaactgatgaagaactaacacaggagatagatgtagatcaaaatattragtattaattttacttaggctgtcttgtgaaagcgtgtttgagaatggttgaggctttctttctattcctatttcctctatcccttacactgatctggaacttgaggcctgcctgaggaaaagttggatctacagaacaaactaagggcatacttgcccagggttctcatcctgcctcccagcccatggagcacaggagagagagcactagagagaaacaggcttccactgcaggtgccggactctgattccaatgtgcttaacatgtgaaagcaggagaacaatacgctatcycttacttgtacactatcccctacttgagggtctgcaggtctgagaaaaaagaggtcgggccacaaataaccagaaacccttaaatatggccggacatggagaagcaaatggaagaagtagagagagagagcactttcttatgggaacagggatagaagttactttactcatgaggagcaagagtacacattcctagttgttttctgggttttatacctttaagccaattggctgccatgctctagtagactatggctacttctcggggaacagaccagatgaatattagtttagtcttgctctcacctttgggaaacctttccctcaataccaattactgttgctttgtatattgtcctaggaccagtggtgagcagttgagttttggctgcagaagggcaccctaatgccttagaggaatacyttagttyagtaacagaggccttgctaaaaactcacccccaatctttttctcatctttacttatctatagtatcgttgtctaagatggcatgctattgattatacgatagacccaacaacagtgtaactgcctcccaaataatacaatgaagaatgccttctcattattaaattcccagggagaaattgatatttttttctgtaaaataagaattctgcctttccattctacaattctcagtcatatggtccttggtcagttaacagattagagttgaatttccttttcagctccagcttgagccatctttccttagaaagggtttgattgatagcgtatttgggttaattaatatctttttgccatmtcttttatacttgccctgttatgctttagatatgtctcttgtaaataacatataggttttttttcaatttaatctggaatggttatattttcattggtaaagttaatacatgtacattgaaatatgctgtgattattgttatttttgtatatgtttctattttactgttttcctgtttttctatttttttcttcttgccttttctttggattagttgaagaaatttttcttcctctcttcagttttttttttctattatatggttttctattgaagttataacaaattactaccaagttagtcacttaaacaatacaaatttatgatcttacagttctgtcagaagtccaatcagatctcatcaggtaaagatcaggtgttgataagactgcatttctcttgaggctctaggaaagaatcaatttccttgcacattccaacatcttgaagccatccacattccttggtttggggccacctttctccatcttcaaagccaccaatagcaggcttgagtcctcctcacactgacatctctctggttctctaaagctaggaaagattctctgactttagggactcatgtgatgagattgggcccaggggaataatccagaataatctctactatctcaaggcctgtaatcttaatcacatctgcaaagtcctttttggcaggtgaggtaatatatttatacgttctggagattataatgtggacatttttgaggggtagtgttattctgcctactatattctctgttgctttagaggttatgtgatttttatacttgttctttattggttaggcttgaaattttttcatatatttaacttacagttctataataatatggctctctcccaactcatacaacaagattaggacactttagctctaatcttctctcttaaatcttacatagttttgttattattkttgtttttggacattcagtttttttgcctgcatgttagacattcttttatttatttatttatttattttgatagaaacaacatttgcttagatttacctaaacatttgttcaccaatttttcttgcatatcaacctgtccttttagaatattttctcttcttgttattcttcatttcttcattgtaaactacccgtttctttttaatctgcacgttttttattttaccctctttctttaatgatactattgctagacacacaattctaagttgatggttattgaccaattttctttattccccttttctgctattagtagttacagaattatatattctatcaatttttaatatttttaatatatgcaattaagggtataaatttccttctaactgcttataactatatcctattatttttgatatgtaatttttattcagtttgaaacattttttactttctttgtgttgtcttctttggtttattatttatttagaattatgtttatttccaaacatayggagatttgtttttctctttttgtattggaatctagctgaattgcatgtgtctagaggacatattcttcatgatttttgcctttcaaactggttaagatttgcctctggcttagaatagtcaattattaatgatctatgtgtgttagaaaaraatgtttaggccaggtgtggtggctcacgcttgtaatcccagcactttgggaggctgaggcgggtggatsasttgaggtcaggagttggagaccagcctggccaatgtggtgaaaccttgtctctactaaaaaattacaaaaattagccggccgtggaggcgtgtgcctatagtcccagctgcttgggaggctgagtgggagaattgcttgaacccgggaggtggaggttgyagtgagctgagatggcaccactgcactccagcctgggtgacacagcgagactccatctcaaaaaaaaagaaaaaaaaaaaagaaagaaagaaaagaaaggaatgtttagtctgcagttgttttgtatagttttatatatttattcattaggtgaagtctgtgaattgtgatgttcaaatctttcacatatttactaatttttgggcagcttattctatcaattgccaaggttttattaaaattttctaatgtaattatcatttgtctatttcttcttgtagttatgttagtctttatattataattttaagggtatgttactaggtgatttaaattgttatatcttcttggtaaattgaatcttttattactatgaagagaccatcttcatctctagcaatgccttttactttaaactgtactttctctgatattactatagctgcactggctytcttttagttaacattcgcatggtataccttttccattctttttactttagattttcagtattctcttctatgtgtgcctttcattagtttttgtttttgtttgtttgttttttatatctttttttttctttaagttccgggatacgtgtgcagaatgtacaggtttattacataggtatacatgtgccatggtggtttgctgcacctttcaacctgtcatctargctttaaaatccaatcagattatctttttaaaaaaatttttttataaatacagttttataatctgcatctactgtagagcacttatttgtaacgtaactactaatatacttggctttaactctgacatcttatcctgagctttcttctcctgcctgttttattatcttatttttgattgttcggattgcttgaggatttttttcatctattttttttctatatacagttagtatttacactagaaactacaacatatgtacttaacttgataaagcttaaatctaattaatattttaacctccttctttaaaatctaagaatctcagaagactttagctcaatttttgttgggatttttgctgaattatatgctgtttttgttgtgtatttttttttgttttttttccatgaacctaatgatttactattattgttttatgtaatgagtattcatttaggtttcttcactttttgctttttatcctttcttttatctcaaacattctgtttgggattattttacctttgcttaaattacatttttaaaaaatattttccttttgagtgtgtttactaatagaaaactyagtttgcactcatctgaaaatgtctttatttcacttacattcatgaaactattttcttatctctgttgtatctttttgtttctctgtgcttcattctgaatctgctttcttctgtcaaaccctttatctagttctcattttcattattgtattttcatcacaagatattctaatatattctttttcagatctgcttattccattttgtagcttacagttttctattacctgataatgttttgtagcttgtcttttagtcctttaaccatagtttgcacagatactttacagtttttctctgattatcctagtatctgaagtatttgtgggtctctctcttttctgttgtttctcctggttttccctcatgttggccttttccctgtatgtgtgtatgtgtctgtgtgattatctttctatatgattgccatgtgtgtatgtgtgggtgtattgcatatatgtaaataatatatgtgagatatgcattttcatatgaattatttgaggtacaggatgacattactttcctactaggagggaattaattgtctttgcttctgtctttttcccataggcattagcagtctgtatgattggtagttcaaaaattctaagttttgagactgcttagatgatgtgaacttgtattgccattcaagacctggttgtttctgattcaccttaagcgggggtggtatagcctttgggtccaaattattttaggaaggatcatctcttgggttctgttaccctttcccaatgatgtactgcaaatcaaagttcagattttccagataggcaatgctgtcaagtcaaaaacaactttcattcttacttttcattctttggttgtttttttttttttttcacttttgtcccagtaattatttatgatctagtcaatttatctttaatttttaaaagattttttaaaaatatcaacttttttagtttttggtggaagaattgttctgaataattttgctattgttgccaagcaaaagtcttgatcactgaattttccaccaaattacaggtgcctcatttgagacagttttcctttatccatggggcagatatacactttatgcttgtaaacaaagtatgasaaaaaccaaaaatttagccttgatgtttagaataggtttacttttagaataggtttagaatagaatatttacttaagacaaatatgaatcccatatagattaaagtttacatatttattctttttggtcaatggcatttaaagagtccatagcactgcactatctaagatgtttaatagcactgtactatctaagactttattacatagcaatagcactatactgtytgggacatttattgtactgcaatcagtcatctttctcagaaatatatttgctgcaatttttgctcagaacctgatggtatatgaagacatttattgcatagctctgtgagaattgttattttctggaaatctatattctgggttcgtgaaggctggccatactgttttttcacaagaagtagttaccgtgtattgctaagaagttttaatcttaaatagtggtttttataatgttttgttttcttttgagaatatctcacgctgcatcttacagtgcttgcctcagtgcaggcaagaggattactaagtggtagattgttacactgatggctctcaatgaatcataccttgtggttttctctcacagtgactctgagcttgaccacgtgacttgcattggccaaagatatgtcagcaaaaatgactcaaggggacacttgataattgcctgtacattggttgatgtgtggtggtatttgaagaggcctgctctagcctccttaaggaccacaggaaagaaaagcctagttgtctcagctgagcacagcccccagctggcccactagctgaatacagctgtgtgaatgatcctaggtgaaaccattgcacagcctacctacagaaccttgagaaattgttgttttacgccactacatatgtggatggtttgttatgcagttacagataacagagatactactgatatatctttgtcaccctattgtttcttcatgtgctrtctttatttttaaattaacacatatgatgctgatctctctcttattttccctccaaaatacaatttactattacttactgaaaaattaagcagcaaagacatgacagaggaatttatttagagttatttatcacatagtcaatcctttgtctcttgtaggcatttaagagaaaatcagattacattttaagctgtttgtcarttttagacttttcacattgcttcttgtttatagacattgatgactactgccatgttttattttttctttaagagccatggtcagtgaaatgttcttccagagtttagcataaacagtttataggttagtctggattaaaatatttaaataatatgaattaaaaagtgaagagttttaagtgtgttttcaatgaagccagacaatataaagtaatataactgactcatctgctttaaaataaagaaaaacattatctggtataatttgtaataaacacactaagatgaacaatttcttttgttattacagttttaaaactcagccataagctatatccaatttaagtaaggatatttgattttttttttttttttttttttgagatggartctcgctrtcgcccaggctggagtrcagtggtgctatcttggctcactgcaggctccgacccccgggttcacatcattctcctgcctcaacctccttagtagctgggactagtagtagcccgccaccttgcctggctaattttttgtrtttttagtagagacggggtttcaccgtgttagccaggatggtctcgatctcctgacctcttgatccgcctgcctcggcctcccaaagtgytgggattacaggygksagccaccrcgcccggccaggatatttgaattttatcctgagctaagtttgtcttattggtgaaaaaaatccaaaatgaaaagaccaacctttctccttttatggattccttgaattaatgccagtgttataagaacaaytggaaatgcagagggaaaagtagcagcaattctttatcacaaaagcagaattactccagctaatatagtttttatgttgcatttgcaaatagtattcttgaggatttggtgatgatgcccctttttaataatattaatagtaacattatttgtgatgtggaaggacagacctaggagtctggtaaactgggtgttttgtcctgaaaatgttgctgaccagctgtgtaacctttgtcatgttaccttggtaggcctagtttcatcattagtaaaatgaggacactcaggtgatcttcatctccaaatttctcttaattctgaatcttcagagggggagagtggagaatgcattgttctgatgtatcctcctggagaaaaacatgattttaaaagttagcatgttgttacgtattcatatacattgttgtataagaagacatttgattcttcatgcagtcacccatgttatgaataaagagtcaatagaagaatttataattatttccaaatcaatgttgaactgactatatagcatacatatgttgragtctaagagaccaaaaaccaagctcataatatatttaatgcaatgttttagagattagtcctttgtataaaatgtattctaagaaatggagattctaaatgcctgtgttttctcatttggatatattaaaaataattaaattttagtgctttttttcctaagcttctccctcccccaagtttagtatctaattttgatgttcatgggaaaaatactaagcttactttgtgtaagtttttaagggatgtctttaatacacttttctatacaattaatttcaaattttgatgatctaggatgattgttgagaatactgctgcttgggaattataaataaaaactgttgaactatttttatttgcaaacttattttttgtttccttatagaacgctagccctaattaaaccagatgcaatatcaaaggctggagaaataattgaaataataaacaaagctggatttactataaccaaactcaaaatgatgatgctttcaaggtaatttttttatcattttcagttatgtaatgtctgattcctttttaaaaaatcattttctgtctttcttgtcattgtttaaaattaaaaaacctcgtattgaatgacaaagaatagaatagtaacttaaccaaaatgggaactgacaggagttcatctagaatgttactgacaaagccggccccctaaaagatttgatcttttcctattcagtgtcatgaagcccatatacaaaaccgaaagtgagtatcaagcagtgcaggctttattcagtgtctgtggaattgagaaacaggagtgtggctcacaaatcaacttctcaactagtgaggggtgagggggttaaaataaaggatttctctaataaaggacatgaaaagcaagaggagcaatatgcatgtcttttctggaaattggtggtgaacttccaccagtttcacaattgatggtgaatcgcagtgctgctttcctttttgtctttttatggcctcttccggtcattgtcatggtgattttcagctgtcatggtgctggtgggagtgccatatagtatgaaaatgagattataatgaagcccgaggtctttttgatgtcatttggttgcatatcttggttctaaccagtcttaactggtctggttgtaaagggaaccttttattgcagaagtcctgtttcttaaagataagcaaagttaggacagggtagaaattcagctgtcatgtaggcattacaccaggcaacaaaaagaaaaagaagaaagaaaagaacaataagacaccaagtaatcagatgcataaataaccactgaagtctaagtaattaggagttgtcaaattatgcatgcctcatttaattattattgtctttcaaaaccccatctgcttttataacaccagtgcttgataattataatcatttcttaatatataaggataacacactgtataaaattaatagaggaaatgatgtctgattatttttatttgacaagaggatttactgttgagatttccaaagatgatgcatttggaaatgtttacatttagctcttcttattataaataataggcaaatatacctatttattttttacctagataggtaaatatacctatctaacaagcagtmcaacctgtttgaccagatattttctaagttatttagtgaaaataagacttatacatttacttatccctttctatcatgaagtaagtaactctaaccccgtaagaatggcaaggagaatattaacaacgtacaaacaaaggatagggaaaaccttctcttcagttttttttagagatcctttagaaaaaaaactagtgatttttccatgatattggacatttgtttttaaaaaatttcctaccaaatggacaaagcaaagactgaaacattctggaagatgaagaagggagatgagtataggacagaggcctttgtttcctgggatcaccctctggttggctgagtgtaacacagagtgtctctagggacaggaatgtagcagttaggcagatctggctccaatagtgttcttatgtttctccactagtttttgtttgtttttggtcagatatcttcttaatgcttcaataaatcattcatttctggatttattccatgggtcagttgcatttttgtttctgtgagagcagggacaatggggagcagtagacattcaagtcagcttcaatacatctgattccgagaaactttaacacaaaaccctccattttaccctgacaatgacatgtttaattggaatttttcccttatgtatgatctcctagtttacatattttctagagagacaggaggcttacatttcagagcacagtatttagaccagattgcttgtaactgtgctacttactaggtgtgtgactgaacagttgaccactgtgtttatttcttcatttgcaaaatgggatttttttttttttttttgagatggagtctygctctgttgcccaggctggagtgtagtggcacgatttcggctcactgcaacctccrcctcccaggttcaagcaattctcctgccttggcctcccaagtagctggaactacaggagcacaccaccacgcccgggtaatttttgtatttttagtagagacggagtttcgccatgttggccaagctagtcttgaactcctgacctcaaatgattcacccgcctcagcctcccaaadtgctgggattacagrcatgagccaccgcgcctggcttaaaatgggatttataatagtacctatctcataaagtagttgtgagggttacatgagtttagtgtctctatacttctagtgtctgatgacttggtatctaacttcctgtggtaaagatgctacttgtttatcataatggccctatagcacatgaagaaagatgctaaaaccagcaaacacttcaagagcaccayagggcatacatttgctagtttctttgaaaccttaagtcttgttaattccacccatgccttttgaaatacttcattctttggagtaccacagatgcaagcccttctaattacttgttgacacacctgttcatttgtagttatgcacttccttttcccatagtcttctgaacacaaatctcttaccaaaccattttcactggcccctctggaaatcaagtttcattgtgaacaaatatccctatgtccatagtgtcttaacagagtgtatctttgcccgcacatttttagtttagttgaaatctgacccttctccagggacattcctttccttttagccctgtaggctgctcactcacaaatgtttcttatgtcacagggtcacgatatagcgtattttagctctctcctaaaaatctatactcttcttcatccttggaaattcatgttatttagttgttttaccatccactgagcctcatttccattctacagttcacaaactccacatttgttaaagatttgggcactttgtttatagtctccttctattccagtgtctcctgacagttgggatgacttcaacatctctgtcagtgatcatccagggctctgctctatttgctttcccatctcagtgayggtcactatgatttcaattaggtattcctccagatccttgctttttgtttttttaaaaaacgtggtctcgctttgttgcccaggctagtctcgaactggcctcaagtgagtctcctgccttgtactcccaaagtgctagaattacaggcatgagccactgcatccagcttgttgtatgttattttctttacaactttacttgagtagtcccatgcatgtccatatgatcacctaccacttacttatagatgaattccaaatacatcttcagccttgacttctctctgcaactgtcaatctgaaagtgatcctagattcatcttgctgctcccccattcctcatacctacctgatatataaatatttttacttctgctttctgtatatctctgggagcaattctctccttataattcctattgcagccccttagtttaggcattttataggctcatattcaggctttcaacgtatcaacataggctactgactgatttgtctacttcttgactyactaccttctattccttgatggctcatttcctacctcaagattgctccatgccattttcttattgccattagaatgaacctcataaaatgaaaatttgaacatgttaccattcccttccttaaatccgtcagtggtttcccatatgcaggaaaatatggtcaagcagacaagctctttgatagagtatacaagactcttagtcatctgtactcacctactgtaatagctctaagaggatacttaggtttcagttccctgaacatgttgtgctttatcacatctcagttttcttgtacataatattgtactgtcttgaatgctctgccttgtcttctgtctcatccattcctattcatcgttcagaaccaactcaaatgtctcatggaaactaattcccaagaaaacttaactgcttatctaatcattcatatcacttcatatatttttattagtatgttgagcttgagatttcatccaatttataagctaggaagttacctgtaactcttccatggatgttagcagatgacatgagacttctgggtcagagacaaaagactttataatggtagagcaagcagcatgagcattgtgtttatattggttctccttgcctccatatcctacaggaataaaatgaccaatgcccaggtgtatactgtgtatctagagggtggcatcacaactgaggaggagtgagcttgggttaccagctgttccattagcaagcaataaacaagcctactctttatactgaagagaggytttaccttatccctcaaggtttcttgttgcaaacacaatcctgagaaacgacaccgatgaagatcagtcaggtccttgcattcttggcatacccgataagacaagttagaagagagaaactcacctggaggaatttctcacaatgtatgcatcttttctaaaattgtttgttcaaatgtcggttccgccatgatgacaatatccagaagatagctgctgagttctgtatgactttgtatttctagttcttggatcagtgcctcaatcaaggttggcattaagtaaatatttcttgaaagggttaatggatagatctttgtgaaagaatggttagtttcttcataaaaacacaacaaaacataacaaaacaacaaaaaacttctctagatagtgattcacttgttaatacctatttccttctaaacctttaaagcaaagaattagataagaatgatgggaaaaaatttatgaactctcatcgtggtttcaattttagattttgaatggagataactatggaatcagggacatgttggatgaaaacaatgaaacatttttagtaatggattgaggtttttcttttcaatgacgttaaagattatgattgctttttcctttcttgtagttcagttttttgcgtttgaaaagcttagaattggttgttttagtattcttctgctaactcttctaatttactctccatgtaagtttttcagttattcagttttaccccattttaggctgtaatgcagtatatacgtatctctttttttgtgagtttttctctttaccctctagaatgttgttctacagttagtagtagcaagagcataagcagtcagaaatttgcaatcagagagctttgggttcaaatcttcttgtcttgtccttactagctttgtgaactggacaacttatgtaaccatgctgaactttattcttttccgatgtaaaataaaggtgatcacacctatttcaatatattgttgtaaggaataaatataataatttaatcatggctataattggctctagaaaattttgatttttttctcytttccatgtctcgggatgaattttattctctatattggcattacatatttcataatctcttcatagccaaatgaatgtttaagtacatttggttagaatgagagtatgcgtgatataacttgttatgtaaattcattttgtaatatcctgataaaatcttaaaagcattgcatatcaaatgaattctcaagcctgaaaggttgattctttgctagggaacagtttccagttttaaaagtagttaatgtttacatatatttgtcacatactgtgaacccagttcaaagcctttaagaaaactacacagtgttaggagagtcatctggtttgcttttaaaaaaagttttttagactttttagctaatcagtttaaaatgcattcttttattgccgctgtagatattcttyagtggtaatataaatgtaaaaataaatccctgttacaattaataaactctgaattctaaatgtttccatattctccccttttttagtgatgtcagttaaagcattagtaaccaataaaataaaaacatattaagatacataatttctcaggcagcttttaaaaacacgactgtagtctttcctttggagagacctagctaagaaaaaaagctataaacattaaattaaaattctagcctaagctcttawgtttaaagcctgtggaaaaaaatgacaaatttttaattagaagatggctttgcatttttttgatgcaacttatttagactttaaagaacaaatattctcactggtcaaatattaacctttgtttctagaaygttcaggatgctgtgtaaaaagatggataaggccaggtgcggtggctcatgcctgtaatcccagcactttgaraggccragrtgggtggatcacytgaggtcaggagtttgagaccagcctggccagcatggtgaaaccccatctctagtaaaagtacaaaaattagctgggcattgtggcacacrcctgtaattccagcgacttgggaggctaaaacaggagaactgcttgaacccaggaggtggaggttgtagcgagcgccaagatcgtgccactgcactctggcctgggtaactcaatctaaaaaaaaaaaaaaaaaaaaaaagaagaagatagacaatatataacataagtagaaaagtaaacattgcctcctacattaatttttatttacattgatattactcatacttaaaaaatattttaaaagagtggctttgacagaatatttggtgaaaaattattaattaaaatataaattagtataaattgagaggattttatcttaattttattaatgtaagctaaaataataagtgtttaattttataattcttaactattgtcattttgattattttataggaaagaagcattggattttcatgtagatcaccagtcaagaccctttttcaagtaggtccttaatttggggattagtggtatgtaaaggaggatatcctagaaaactatggagttacatttgtaaaatttattacwtgagaataatctgtcaaaagggccatagcaacatcttgcaactgcacagaattctaagaattatattctctgtctttttattaagtaagaattcctatattttatcattaaaaatcttaaagtttaatcagttgcaaatagaaagatttgtttacattacaagaaggataacttttaaaatttttggttgattaaaaatggagtgataattatatttgatgttcaatatttttattatgcttttgtgtttgtggggcttttaatttttttaatttttattttttatgtcaacttttactttagattcagggggtacatgtgcaggtttgttacctgggtatattgtgtgatgctgaggtttggggtacaattgatcccattacccaggtactgagcrtaatacccaatagttagtttttcaacccttgctcccttccctttctcccactctagtagtccccagtgtctgttgttgccatcaatagatattattgtccatgagtagccattatttagttcccacttataagtaagaacatgtggtatttggttttctgttctgcgttaatttgcttaggataatggcctccatctccattcatgttgttgcagagaccatgatttcattcttttttattgcagcatggtattccatggtgtatatgtaccacattttttttatccagttcaccactgatgggcgcctgggttgattccatgtctttgctattttgtatagtgctgcaatgaacaggcaagtgcatgtatctttttggtagaaaggtttgttttcttttggatatatagcagtaatgggatttaaggttcaaatggtagttctgttttaagtcctttgaaaaaactccaaactattttctacagtggttgaggtactaatttgcatttccatcaacagtgtataagtgtgttccctttctctacagacttgccagcatatctgtcgttttttgactttttttttwaaaaaaaatcaacttctattttagatacagggggtacacatgcagatttgttacgtgggaatattgtgtgatgctgaggtttggagtatggatcccatcatccaggtagtgagtatagtacccaataggtagtttttcaaaccacctgccttctctcctctagtagtccacagtgtctattacccccaaatttgtgtctatgtgtgtttaatgtttagctcctacttgtaagtgcgaacatgcagcatttggttttctgtttgtggattaatttgtttaggattatggcctccaattgtgtccatattattgccaaggacataattttatttttttatggctgtgtagaattctgtgttatatatatataccacattttctttatccaatctgccactgatgggcacttgagttatttccatgtatttgctattgtgaatagcacagcaatgagtgtatgagggcatgtgtctttttggcagaatttcttttcttttgggtatatacccagtaatggaattgctaggttaaatggtagctctgttttaagttctttgagaaatatccacacygctttccacaatggctggagtaattaatattcccaccaaccgtgtataagcattctctttcctctatagtcttgccagcatgttattttttgactttttaataataaccattctgactggtgtgaaatggtatctcattgtggttttgatttgcatttctccgatgattagtgatattgagcgttttttcgtatgcttattggctgcttgtatgttcttttgagaagtgtgtatttatgtcttttgctctttttttagtggggttgtttcatgcttgtttgattatttaaggtcgttacagattctgcatattagtcctttgttgaatgcatagtttgtgaatattttctctcattctgtggattgtctttttactctgttgctagtgcagaagctttctgtgcagaagctctttagtcccactcgtcaatttttgttttcgttgccattacttttgaggacttagtcataaattctttccccaggccaatgtccagaatggtgtttcctaggttttcttctaggattcttatagtttgaggtcttacttttaaatctttaatccatcttgagtaaagttttgtatatggttaatgttaaggggccagtttctttcttctgcttatggctagacaggtatcccagcaccatttattgaatagagaatcctttctccattgcttatttttgttgactttgtcaaagttcagatggctgtagatgtgtggctttatttctgggttctctattatgttccagtgatctatgtgtctgtttttgtaccagtaccatgatgttttggttactgtagcctgttgtacttttaaactattttggtagtcttgtatacataaagcaatgttcatggaacctttctattttaactagtttgatatatattttgttccttgacatagaacagataatatatgttacactttatgtattctaaatatttgacatgtaattaaatttaagtgaatattttgcatgctcatattaytattactgttgccaaagactgtttacacttctaataagaaagaatgttayatcagccaaactaaatggccacagtagacatgttatttgatatcctgcactgagtagtgggtttttaaaaaratttgtatgtaagaaaattattatgctatagattatttcaaatcaagtgttataaaatattcctaagccttcttagaatagctatatacacttttctagaaaattggtggaaattatcttttggtataaactttgtatatgtttatagcattaacttacaactcctagtctaatgatttatgtgtgatttgcatgcagtaaattttattaaaggaatgaattaactagttgcctgttartgagaatgatgtaacaaaagactaggtgaagtaattaaattttcatgaagcagtatctatgatcaggcacatccttccctatattgttacatgccatattcataggcttattcaattgtgtgttttgagaattttgtattaatagggcgttagattgtaagtgtcttgaagggggatcttttttgtggcacagacgctgatatgttataggcaattattaaatgcttattgagtgaataaacatggtttgctcctttgatttgggtttttttaaatctagtggttggtcttgggggttttgtttgttttggcagcaaaggtctggcagaaaatgtatgaggaggtattatagaactcttaggatagaagayaagaatacttttttgtacatgctgttttttagaaatattcttcaaaatgaatgggagtgttttaaaaaggaagtactgaggggagctgacatataacatgcagggtggaaggaagtgtgtaaaaaatagtcataagttagtgggcacaaaagagcctgtcacaccatgctcctttctccaggaggatctcttctctstactttggatgagagaaaaccatgggcttactctaaaaagtactgtgtccctgcttaatatagtcagagggaggatgtcacttatttcatagttaaacttgtcattgcatcctgtacacwtataaaagtagaaaataaaatgaagtattgtcttttataccttgggggactgtgactcagtgctggatttttagtcaagaaccgatgcgtacactttaataatttaatacagaaataacccagagtagtttttacgctaataaaaggatatttcttgaagcctgctggggattttttttttatcaccaaaccagctcagtgtttattgattaagagagttctttgtcagtctttgaattctaatagttttacacaaaaataaataaattcttactaaaaatatgttacaaggcatccatccctatatattgtgaaattgtacttgactgcagtggtaaacacatgtaaataaaaaggaaaatcctctgtacctgttagagcactgggaaaagcataggtcaacagtatgcattttaagtcatgaaatagtcttaattcaacagaacagtgatttttctggtaacagtaatttgacattactagtgatttgaagtgaattgagccactgcaagacactcaatttatgaaaaatttctcctgcccatgtaaaattaactatgcttaatggttctaagattataatattcatgtctatgttgaaataatccaatttaaatatatcctgtcgttaagacaaatacctagttgacagaaaaaagaagcaaactaatcttctatctgttttgtagtgagctgatccagtttattacaactggtcctattattgccatggagattttaagagatgatgctatatgtgaatggaaaagactgctgggacctgcaaactctggagtggcacgcacagatgcttctgaaagcattagagccctctttggaacagatggcataagaaatgcagcgcatggccctgattcttttgcttctgcggccagagtaaggtgttttaaaaatattttaatgctcttctagttctgttaaatgttttatatcaaaggaaagcatttctatcactggtgacttagggtggatttatgctgctgctctagtagtagagaaaacctttgacatcttgcctactatcaaacagtgattcagtgtgtctcctttgtgaactggtaacctgatcatgatcaacgtaagttttctccaattaaaacacttctcatcctgtttcttgttcccaagacttaaattactgaggctcctaaatgtttgaattattgaattcatgtaagaataccagtttatggctagtagatattaaaaagaagatataatttgagatatttccttttgattcagacstaacactgtgctttcaagcttaacatcctattattttcctatatatagctagtgtttatgaaagtttctctactccttatttttaaatccatataaataaagcatttattggatttatactgaggttgaattaaagaagtgtaagtttatttttagcatcgtgagaagtgtctcacttaaggtagtttttaatctggttgtgtttgcaatgaaacaatattagacagttttataattgatttctttctttttcctaccatttcatcagcaagtcccttcagctctttcaaaataaaccctgaatctgatcattgtggtctgaatcactattatattttgccagaactgctacaatagcctccaaattcttttttcctcttttcttacactcaattaatgaaaattttaccttacccaagtaaaatcagctatgcccagtgatcttttaaagacaaatcagattaacattcacctgctgaaaacccttcagtgaatttctgtctcttctagaataaaatctaaagtctttattgtggcctccaatgctctatctagtctggcccatatctatctctaactgtatctttgatcaatctctatcttaatcattgtgttccaggcacactaaccatctcgctattccttgaatagcatatttctgtctggaatggtcaactaacagcaaagaggacagtgtggttggataggaatgagagagggaggaagagggtgatgaggttacagaggtaattaggggaaagattatatggtcttataggccgtagtagtacttttagatttttctctgaaaaaatagagagccattttagggttttgaacaaaggactgatatcttccacttgccatttaaaaggatcattctggctgttgcattaagaatgactatagaggctgggagtggtggctcacacctgtaatyccagcactttgggaggccaaggygggcagatcatttgaggccaggagttcgagaccagcctggccaatatggtaaaaccctgtttctactaaaaatacaraaattagctgggtgtggtggygcccacctgtaatcccagctactccagaggctaaggtgggagaattgcttgaaccagggaggtggaggttgcagtgaactgagatcatgccactgtgctctagcctgggtgacagagtgagactccatctcgggggaaaaaaaaaagaatgactatagagggcaaaaacagcaacagggagcctaatcaggagtctgttggaataacccagtgagatgatggcttggaccygggtggtaataatgaaagaagtatacaaatatattttaaaatatatattaacggttgaaggtcaaataaacargattttctgctagattgaatgtagagtatgagaaaaagataccaagtattactccaaagttcttagcctgattatcagaaggatagaatttacgtaaactgaaatgaggaaaactgtggctagagtcagaatgaatggacaatcaggagttaacgttttggacatttataaacttaacctgtttgttagttttccaattagactgatgaaaaaaattagtrtgacagcttagagttatcagcacataaatggtatttaaagcygggagactggttgagattaccaaggagaaggtatagatagagaagtaaagaggaccaaagatgaagctacatcttgataaaaggtaaggagaagaaggcagcaaaggaggttgaagaggagccaccagagaggtaagaggaaaaactgagagataattatgtcctggaggccaagtgaatcaaatattctaaaatgagagaatgaccagtggtgtcaaataaggcaagtaagaagaggactragaatggattgttaaattttgcaatgtggatatcattggtgaactttgtaaggtgaatgttgatggggaggtggaggcaaaaccctgtgtggagtagacttaaaagaaaattgtgggacgggaattgtagttagtgaatatagacaactttttttttgaggagtttttttgaggagttttcctgcaaagagatgaggtggtagctgtcaagaaaagtagtatcaattttttttaagaggagaggtattgggtaaaaaattgatgatgtaggaaaaagaggaagacttgttggagcaatttcattaattaggcaaaaggaaatggaaattagaacccaggtggagagattaggcaggtgtgcctctcaggtactcgtctatagcaacagatgggaagggagaatatgtgaacacagatgctgattcttaagtaggaagcaagatcaaaacagctgaaagtgaggatgaggtataaggtattggttggtctgaagggagagaagaatatgtgaaatggtgatctggaaaaggaatagatcagggaaatgtggtgtgtgattgctatactgaattaatggcccatgtagtgttcatggccatgaactatgagtgtggttctccagcctgttcaactgcmtggctgaaggtaaggagtaggtggagagctggcttttaaccatggctgtggttttgtgaaacaaatgtgacggaagtgttaaggaagttaaagatacatgcaagagagcaattatagtctttgaccatatcttagtagtagacatttattgtaaatgtggtattgttttgtatagttaaatttccaatcatattttaaagcattataaaaataataaacatatctaattaatgaaggaaataattgaggctgaactgaaagtcactaccatgtttactgatatttcctgcctatttcaccctattaccaccttatgccatccatttcttttttatttctactagattatttaataaatttgagcataaatatacttgttagattttagcatatcttgtagtggagcaacttttgttaagttagctactrtctcagtccattttgtgttgctgtgaaggaatacctgaggctgggtcatttataaaggaaaaaggtttatttggctcatagtcctgatggctgggacatcaagattgggcatctgcatctcgtgagggtctcaggcagcttccactgcctgaggtggaaggtaaaagggagcctgcrtgtgcacagatcacatggtaagagaagaagcaagccaccgggagaggtgtcaggctgtttttaacaaccagctttcagaggaactaatagagggaaaattcgctcaccttggagggagggcattaatctattcatgggatttacccctactatccaaacctcccattaggccctatctccaacattggggatcaaatttcaacgtgagatttggaaggaacaaacatccaatccagagcagctaccattgccatttcacctaaagaaatgtcttaaacatattcgtttatattttgtgcatttaatttttttaacctctttctgccattagttcctgaaatatcctattatttgtatgaaccctttaggatatatatttttttacccttgtctggggaagagtgagtgttgttgacattatgttaggtggctctaggaattaaggaaaaatattgtagctggaaaatgagcttatgtgaagaagcaaagaccacaggtcttaaaaaattgaaaaacatcacagccccaaacttatgcagccccaaacagcctcttctttaccttgaattcctattagttattgtctaatttttcattccatctttccagattttaccaaaacatagacttatactcactattttcattcctsagctatctttgactactcatttgtgagcaattgttaaaatttarcattattttcatcattcctgaaaatactgtctttggagaccatgacttgtgtcttactaattggtttttcttccttcacttgtcctttcagatgctggtattgtgcaggcttcttttcttggtttactgcttttcttgctctaattttcagtttcctagtctgtaaaataagataatgattgaacctgcattatagaggtctttgaggattaaatgaaattatttcagtgcttagtatagtacctagaacatagtatttaatgaatggatgttatcttttattattaatattttacttgcatggtgcttcccaaacctgtatctgtaatttgtactggatgtaatattagtatacaaaaatcaatagtaatcttgatatacttgaaataaccagttagaaaatgtaattttagaagagatttccattcatacggttaaaaaaaagtctatgacacctagaataaattgaacaaaagatgtgggagatctgtatggagaaaattataaatatttattttagagaataaggaaagacataaataaatgaagatatatgccatgtttatgaatgggaagagtcagtatcctgaagatatcagttctttccaagttgatctataaattgggtaatttcattcaaaatcttagcacagattttcatgaagtttaacaaacttatgaaacagccaagggtccaaaacagttaagacagttttgaagagggagaaaaagatgtggtgatgataaggtgagacttattttaaggatatcatgactttttataaagctttagtaggaaaaactgtggtattagcatgggagtaggtaagtatatcagtgtaacagtctagagtgctcaagagatgacccaaatataatgagaagttggtgccattataaatcagtggacaagggatagattgattagtcaataaattgtgtgagataattttatatggaaaagtgtaaattaacttcttaagtttctatctaggattctccttagagtttcagacttatatagaaataatacatttgaaactgaactgactacaattttttttttttttttttggagacaagagtctcactctgctgcccaagctggagttcagtggttggtgtgataatagttctctataactttgaacccatgggctcaagccatccacttgcctcagcctcccaagtagctaggactacaggcctgtaccaccatgtccagctatttttttttattttttctaaagacagggtcttgtgatgttgcccagtctggtctcaaactcctggtctccagtgagcctccttcttggcctcccaaaatgctgggattacaggcataagccatcatgcccagcctgcactgattataatttaccaaagtattccttttgtattctgtacatctctaggaaagaaatttgggagccagtattctttcttctgccctgtttatccccttaatagaatcagcaaaagatcttgtaggtttttccttctgaacattttcttgaattattccctttcyctgtattcctaccatcactcttctagttctgacctgggctgctgcaagagtcctggaatatacttttctacctcaaatatatcttccacataggcttcagaacaagttgtctaaaaatattaatccgtcaatctcatgactattaaaaatttttaaagtactccattattcccagaatcaagttcaagctccttgacatggtttccaaggcgttccagtgatctgtctcccagcccctcctccagccttatatcctgcctcaccttctgtatactgtgggattcttactctgttgcttttactcattctacccctctgccttggaattccaattctgcctttgcccaggtaatttttatttgccttttaacactcagctcagagttctttatattatgcatacaaattctttatccagagatatgatttgcaagtattttctcatggtatgtggtttgcattttcatcctctttaacaatatctttggatgagcaatttttacttctgatgaagtccagtatcagttgttctttaatgtattgtgctttaggtgtcaagtctaacaaactgttcccacacctaaggtcaccaatatttcattatttgcttctagaagttttatagttttagtttttatacttaactctatgatgcattttgagttaatttttatgtaaggtgcaaggtatgatcacaatttgttattctttagacatatattcttcyagcattatgctgaaaagaccttatttctttaattaattgcttttgcacctttgttgaaaatgtattgaatatatatatctgggtcaatttcagcgatttgttgtgttctattcatctacaagcatacctcagagataatgtagatttggttcagaccaccacagtggagtgaatatggctatatagggagtcccatgaattttttagtttcctggtatataaaagttatgtttatactgtaggctactaaatgcaatagcattgtgtctaaaaaaaactatgaatatatcaattaaaaatacttcattgctaaaaaatgcatgctaacaatcatctgagccttcagcgagtcataatctttttgctgatcttactttgatgttgatgtctgctgattgatcagggttgtttttgccaaaggttgaagtggctgtgtctatttctttttattattattattattattattatactttaagttctgggatacatgtgcgtaacgtgcaggtttattatgtaggtatacacgtgccatggtggtttgctgcacccwtcaccccatcatctacattaggtatttctccyaatgctatccttcccctagccccccaccccgcaacatgccacggtgtgtgatgttcccctccttgtgttctcattgttcaactcccacatatgagtgagaacatacagtgtttggttttctcttcctgtgttagtttgctgagaatgatggtttccagcttcatccatgtccatgcaaaggacatgaactcayccatttttatggttgcatagtattctatgctgtatatgtgccccattttctttatccagtctatcactgatgggcatttgggttggttccaagtctttgctattgtgaatagtgctgcaataaacatacgtrtgcatgtgtctttacaacagaatggtttataatcctttgggtgtatatccagaaatgggattgctgggtcaaatgctatttctggttctagatccttgaggaattaccacactgtcttccacaaaggttgaactaatttacactctcaccaacagtgtaaaagcgtttctatttctccacatcctctccagcatctgttgtttcctgattttttaatgatcatcattctaactggcrtgagatggtatctcattgtggttttgatttgcatttctctaatgaccagtgatgagctttttttcatatgttggctgcataaatgtcttcatttgagaagtgtctgttcatatactttgcccactttttgatggggctgtttgtttttttcttgtaaatgtgtttaagttccttgtagattctggacagtagccctttgtcagatgaacagattgcaaaaattttctcccattctataggttgcctgttcactctgatgataatttctcttttgctatgcagaagctttttagtttaattagatcrcatttgtcaattttggcttttgttgccattgcttttggtcttttagtcatgaagtctttgcctatgcctatatcctgaatgatattgctgaggttttcttctagagtttttatggttttaggtcttacatttatgtctttatccatcttgagttaatttttgtataagatgaaaggaaggggtccagtttctgttttctgcatatggctagccagttttcccaataccrtttattaaatagggaatcctttcaccattgcttgtttttgtcaggtttgtcaaagatcagatggttggagatgtgtgcctttacttgtgaggcctctgttctgttccattgatctatactgttttaatttgggacatttacagaaatgatattcattttaaattactattacaagtamaaagttttggagaaacttttaactggccaccatttagccatacttttattatcataataaaattattagtatagattaattacaaatgctttagtgaaattaccaggaaatcctatcagcgtgaaaatttatgaagtagtacaactatatactttataatttgtttaaaaatttaaaaattatatacctaaagctttcgaattcagtctgaatttttaattttttgtaaagctataaatatttattctttcctactagggaatttaggaaaatgtaaaaggscaagagtaatagcaggaatctttggaagaacaggatctttatacaaaatattttagcccctcaaatcccaaagaagcctggatattatttttgtgactttgttttataaagactttgaattaattgccataacaatgacctagtaaaagcgctcttattcacgtttcactaagaagatatatttatgtaaaatctttatgctttataaataaatatttattcagcataggtaaatatggtacttgaaaatctgggtagttggaaagctggcatttttatttttaaaaattgagcgagaaaagaaatcaaaggaaagttgagacaaaaataattggtcaattaattgttaaataatttgttaaactagagatagaacaatttatcactgctttttactttggaaagacagataatagaaaaagtacatggtttttggagctacagtcacttggatttgaatcctggctttgccacttgctaacttgtaagggcttgttacttaagctttctgagtctcatttttctcatttgtacactgtggatatatttattttgtttagcacatgcagaatttattaggtgctgaatttcagtcattcccaaatattcattgagaaactgctagtgaacaagtaataaagatggactaagccctggtgctctccaacacatagaggtcagctagataggagaaaaccatcgaaggagactgagagggagtagccagtgaggtaggaagaaaggcaagtaatgaaagcattccagagtgtaggatgtgacaaactgtgtcaaatactgttggtcaggtaaggtgagggctgagaataattaaccagtggacttagcaacatggaggtagtaagggattttaatgagcagctttggtggaatgaaaacctaattggttrtggatttaaaagagactgtaggagaggaagtaaaaatggaaatggaaaagaaagacatttcttttgaattttgttgtgaagggaacagaccaatgggaactctcgaaagagcatgccctttctagtttgctactctatcatattctcttgtcacaccacttctacttcattccttcattgatcatctgccaggtccctgtaggtatttgaattttcatctgtaccataaaggttctctcggaccatgcaatcaaagcatctggtataggactaaaaggggtagttgctgttgttattgattaaaaagaataataaataatggcagcaatatgatagaaaggcagttggtatcttaggaatagaacactttttattctagtgtcttaccactggaaatgctcaggtgtatacactactatttgaataattmctcatcatccttgtgtttaaaaaaatgctcatcagtgtggcacattaacacattctataatcttttcattttaaatttaatgaaaaataaatacagttgatccataaacaacacaggtttgaactkcacgagtctacttatatgtggatttttttcaacagaaggattgaaaatgcagtatttgcaagaggtgaaactcacatctacagagatttgacttttcctataagcaggttccacagggctgactgcaggacttgagcatgcatggatttgagtacacacagggatttgagtaccaatcccttgtgtataccaagggctatttgcattgagccagacattgttttaggtgctaggggtcctacagagctatacaacttagttccctctttttcaaatttatgatttgatggaagataagtacccaaataaccataactttgggggagcaaaggttgccggaaggaggcatcaggaaatgcctcctagtggaaagtggtatttgaggtggctctttacacattggtaagattctttggagcttgagtcagagggttttataggaaatagtagaaataatagcagtgaaagcttagagacaggaaagcatctaaataattaaaagaactgattagtgtgaacatctttgtggctagttcaaattgttgtgttgtcattttagtgaaccacatgcaaagtgaataacacagcctgaatctgtttataaaacatggttcatttgattttattttatactaggcctatagttagttttaagtagctgtagttctcagattcctgatattaatctctgttcctataaaatttcctagttttaaattttattttacatattttaatgaaaaatttaaaattaaatttgtgtctaattaactaatgctttggggagaataagaactttatattggtatttccaatattcaaaatttattaaatctttgtccactatattcctggaacaaaatgacacatattctcattgctttgattgatacttctttatatgctcttctggttctaagtcttgaaacagggttaatttaatcagtgtgtctttgtaaaactcatttttagaaaatctgaaacaaaaaatttatatgatgaaactctaaaagtaattgcatgattctcctcccccacagaaatatcttgtaagttcaagataagagatcacatttgtcaaaatcatttctctctgtctttaggaaatggagttgttttttccttcaagtggaggttgtgggccggcaaacactgctaaatttactaattgtacctgttgcattgttaaaccccatgctgtcagtgaaggtatgttgaatacactatattcagtacattttgttaatargagagcaatgtttattttcttgatgtactttatgtatagaaaataaagtatacttttagtatttccattttttttctttgaaggcacttgagtaaaggtgacaaaatataagggaaaatctgtctaaatctctatttgtctttttctttgtgsatttttargaggtgttctttgagttgctgatcatgctcaggctcagtcatactgttacagatcttggctaattgacttttagtctgccttctctctttctaatcacaaattgtgattcacttaatttacttcaatagcactttttttttttttttttttgagacagagtctagttctgttgtccaagctggagtgcagtggcatgatctcgagttactgcaacctcagcctcccgagtagctgggactacaggyacatrccaccwtgcccagctaatttktgtatttttagtagagamrggrtttcaccatrttggtcaggctggtctcaaactcctgacctcagatgatctacccacctcggcctcccaaagtgctgggattataggcatgagccactgtgcccagccaatagcactcctgttgtacaaattaaaacaatgtctgccatacctctagtataccctttctgagaaggctggagaaatttccttcagttctttgtatctgaaacagttctttgacatatgtatgtatatacatgtttgcatatatatacatatataaagagaaagagtttgcaagttcttttcttatttttgtctcaatttctttattttatttattttagtctggtatatatatttttgttaggtatctcaaatctttttggaagtaagatggggtatggttaaaaagatcacccttaaaaaactagaatatactaaataatatacagaagtgattggattttaaaattttatgtctcctaagtatccaagtaatccatgtatatagtagaaaattggaaataaaaaaccattaaaaatgaagtaaaaaaatactgaattcccatcacctgaagatagtcattgttaatgttttgatgcatttcctccaaatcatttttttctgcatttgtatgtgcatgtgtgtacactgctacacatgaatgtaatggttgagatgtaggtctataggctgttgtttaaatataatttttgtgagcatttctggctgctgttaagtcctcattaatattttaatagattctttaatatttaacagcaattgtatagatgtagtatggtatttggatacttaggttgttttcagtgttttgatattaaaattaaaactttgaagaatatctttatacrtaaatatttgatgatatctctaatcttttcctctggctagtttcctagaaatagaattacttgttggaaggatatgagccttaaagatcttgctgcataattaatacttctttaattttttaggaagtattttagtatattgtaaatccttaggmccatgattataagtaamtaacatgcagcatggataacaaacacttatggagaatataccattatgtgccaggtggcagactggttccttatacattatttttaatcttcacagcaagtatgtcaagtaggtaaatttgttgctcttttccagataggcaagctaaggttccatgagattaagttgtttctcctaatttggaatggaaattgaggatgcaaaccctgtttgtttgtttgtttktttttaatctccattctgttccctctatactctattgccctaatagcaatagccacaaaaaagtcacatggcacatgattagtaacaattccataggaagtgatagtaatatttgaaatggctggtgttgaaaatttatggaaaaaaacctgggattttatgtttcactcatttttcttagctggagagattgtgtatgtgtatgtgagtgtctacacaggtgtggtatccctaatccaaaaatctgaaacccaaattactccaaactccaaaactttttgagcacagacatgaagctcaaaggaaatggtcgttgtagcattttcaaccactggtttatgtttattggatttttgaattgggtatgctccacaaataygtatctacagatatttcaaaatcaaaaaaaaaattgaaatccaaaacactgcttgtcacaagcatttctgtaaggaatattcaacctgtacacacacacatgcacatacatacacccgtgtatatttgtgtacatatacatatatacataaacacacatagtacactcacattttgaaaaagttcttgtttataggcatcaactttttaaaaagcttatccttgacaccctaaaatgttttattcaatttacctgatctaatccttttcaaggaaaaatatgttgcaaggagagtgaaataaaataaagtggtactmgaataaatactagttgtataccttaataattgcacatatagctgggagaactgatagccacatggagaaaattgacacgggaccccttccttataccgtatacaaaaattaactyaagatgaattaaagacttaaatgtaaaacccaaaactataaaaaccctagtagaaaatctagtcaatagcattcaggacataggcatgggcaacaatttygtgaacaaaatgtgaaaagcaattacaacaaaaacaaaaattgccagattggatctaattaaactaaagagcttctgtacagcaaaatgaactatcatcagagtgaacagacaacctacagaatgagagaaaatttttgcaatctatccatttcacaaaggtttaatatctggaatctacaagggacttaaatttacaagaaaaaacaacctcattaaaaagtggtcaaaggacatggacagacccttctcaaaagaagacattcatgcacccaacaaacacatgaaaaaaagctgaagtcaaattgctaactagaataaccaatgcagagaagaacatgaatgacctgatggagctgaaaagcatagcacaagaactttgtgaagaatacacaactatcaatagtcaaatcratcaagtagaagaaaggatgtcagtgactgaagatcaacttaatgaaataaaaagagaagaccagattagagaaaaaagaataaaaagaaatgaacaaagcctccaagaaatatgggattatgtgaaaagacaaatctgcgtttgattggtgtacctgaaagtgacggggagaatgggaccaagtcggaaaacactcttcaggatattatccaggagaacttccccaaactagcaaaacagaccaacattcaaattcaggaaatacagagaacaccacaaagatgctcctcgagaagagcaaccccaagayacataatcattagattcaccaaggttgaaatgaacaaaaaaatgttaagggcagccagagagaaaggttgggttacccacaaagagaagcccattcagactaacagcagatatctttgcagaaaccctacaagccagaagagagtgggggccaatattcaacattcttaaagaaaagaattttcaacccagaatttcatatccagccaaactaagcttcataagtgaaggagaaataaaatcctttacagacaagcaaatgctgagggaatttgtcaccaccagacctgccttacgagagctcttgaaagaagcactaaatatgaaaaggaacaaccagtaccagccactgcaaaaacataccaaattgtaaagaacatcgacactatgaagaaactgcattaactaatgggcaaaacaaccagctaacatcataatgacaggatcaaattcacaactaacagtattaaccttaaatgtaaacaagctaaatgccccagttaaaagacatagactggcaaattgggtaaagagtcaagacccatcagtgtgctgtattcaggagacccatctcacttgcaaagacacatataggctcaaagtaaagggatggaggaatatttaccaagcaaatggaaagcaaaaaaagcaggagttgtaatccgaatctctgataaaacagactttaaaccaacaaagataaaaagagacaaagaagggcattacattaatggtaaagggaacaatgcacaagaagtactgactatcctaaatatgtatgcacccaatacaagcgcacccagattcataaagtacatgcttagaggcctacaaagtgacttagactcccacacaataaaagtgggagaatttaacaccccagtgtcaatattagacagatcaacgagatagaaaaataacaaggatattcaggacttgaactcagctctaaaccaagcagacctaatagacctccacagaactctccacctcaaatcaacagaatatacattcttctcagcacctcatcacacttattctaaaattgaccacataattggaagtaaaacactcctgaccaagtgcaaaagaatggaaattataacagyctctcagaccacagtgcaatcaaattagaactcaggattaataaactcactcaaaactgcacaaaatacatggaaactgaacaacctgctcctgaatgactactggataaataacaaaataaaggcagaaataaagatgttctttgaaaccaatgagaacgaagatacatcataccagaatctcagggacacatttaaagtagtctttagatggaaaattatagctctaaatgcccacaagagaaagcaggaaagatctaaaattgataccctaacatcaaaattgaaagaactagagaagcaacagcaaacaaattcaaaagctagcagaagacatgaaataactaacatcagagcagaactgaaggagatagagacacaaaaaacccttcaaaaaatcaatgaatccgtgaactggttttttgaaaaaatcatcaaaatagatagactgctagccagactaataaagaagaaaagagagaagaatcaaatagattcaataaaaaatgatatagaggatatcaccactgatcctgtagaaacacaaactaccgtcagagaatattttaaacacctctacgcaaataaactagaaaatctagaagaaatggataaattcctggacacatacatcctcccaagtctaagccaggaagaagtagaacccctgaacagaccaayaacaggttctgaaattgaggcaataattaatagcttaccaaccaaaaaaagtccaggaccagacagattcacagccaaattctaccagaggtacaaagaggagctggtaccattccttctgaaactgtyccaaacaatagaaaaagagggaatccttcctaactcataaaatgaggccagcatcatcctgataccaaaacctggaagagacacaacaaaaaaagaaaatttcaggccaatatccstgatgaacatctatgagaaaatccacaataaaatactggcaaaccgaatccagcagcacatcaaaaagcttatccatcacaatcaagtggcttcattgctggaatgcaaggctggttcaacatacacaaatcgayaaacgtaattcrtcacataaacaaaaccaatgacaaaaaacacatacctcaatagatgcagaaaaggccttcaataaaattcagcaccccttcatgctaaaaactctcaataaactaggtattgatggaacatatctcaaaataataagagcgatttatgacaaacccacagccaatatcatactgaatgggcaaaagcttgaagcattccctttgaaaaccggcacaagacaaggatgccctctctcaccactcctgttcaacatagtattggatgttctggccagggcaataaggcaagagaaagcaataaagggtattcagataggaagagaagaagtcaaattgtctctgtttacagatgacattattgtatatttagaaaaccccattgtcttagcccaaaacctccttatgctgataagcaacttcagcaaagtctcaggatacaaaatcagtatgcaaaaattacaagcattcttacacaccaataatggacagagagccaaattgtgcatcaactcccattcacagttgctactaagagaataaaatacctaggaatacaacttacaagggatatgaaggacctcttcagggagaactataaaccactgctcaaggaaataagagaggacacaaacaaatgggaaaacattccatgctcatggataggaagaatcagtatcacgaaaatggccatattgctgaaagtaatttatagattcaatgctatccccatcaagctaccattgactttcttcacagaattggaaaaaaactactttaaacttcatatggaaccaaaaaagagccygcgtagccaagacaatcttgggcatgaagaacaaagctggaggcattatgctacctgacttctaactatactacaaggctacagtaaccaaaacagcatggtacttstaccaaaacagatatgtagacaaaaggaacagaatgtaggcctcagaaataacaccacacagctacaaccatctgatctttgacaaacctgacacacacaagcaatggggaaaagattccctatttaataaatagtgttgggaaaactggctagccatatgcagaaaactgaaactggaccccttccttacaccttttacaaaaatcaactcaagatggatcaaagactttaataagacctaggaccataaaaatcttagaagaaatccttggcaataccattcaggacataggaatgggcaaagactttatgtctaaaacaccaaaagcaatggcaacaaaagccataattgacatatgggatctaattaaactaaagagtttctgcacagcaaaagaaactatcrtcagagtgaacaggcaacctacagaataggagaraatttttgcaatctatccatctgacaaagggctaatatctagaatctacaaagaatgtaaacaaacttacaagaaaaaaacaaacaaccccatcaaaaaatgggcaaaggatatgaacagacacttctcaaaagaagygcagccaacagacatatgaaaaamtgctcctcatccctggtcattagagaaatgcaaatcaaaattacaatragataccatcttacaccagttagattggtgattattaaaaagtcaggacatgacagatgctggagaggttgtggaaaaatgggaacgcttttacactgttggtgggagtataaattagttcaaccattgtggaaaacagtgtggtgattcctcaaggatctagaattggaaataccatttggcccagcaatcccattactaggcatatacccaaagggttataaatcattctgctgtaaagacagattcacatgtatgttaaygcagcactattcacaatagcacagacttggaaccaagccaaatgcccatcaatgatagacgaattaagaaaatgtggggaggagccaagatggccgaataggaacagctccagtctacagctcccagygtgagtgacrcagaagatgggtratttctrcatttccatctgaggtaccgggttcatctcactagggagtgccasacagtgggcgcaggacagtgggtgcagcgcatcrtgcgcgagccgaagcagggcgaggcattgcctcactygggaagygcaaggggtcagggagttccctttcctggtcaaggaaaggggtgacagayggcacctggaaaatcgggtcactcccacccaaatactgtgcttttctgatggcttaggaaatggcgcaccagaaggtcatatcccgcacctggcttggagggtcctatgcccacagagtctcgttgattgctagcacagcagtgtgagatcaaactgcaagttggcagcgaggctgggggaggggatcctgccattgcccaggcttgcttaggtaaacaaagcagcctggaagctcgaactgggtggagcccaccacagctcaaggaggcctgcctgcctctgtaggctccacctctgggggcagagcacagacaaacaaaaagacagcggtaacctctgcagacttaaatgtccctgtctgacagctttgaagagagcagtggttctcccagcacccaggtggagatctgagaacgggcagactgcctcctcaagtgggtccctgacccctgacccccaagcagcctaactgggaggcacccccacaggaggggcagactgacacctcacacggccrggtactcctctgagacaaaacttcaagaggaacaatcagtcagcagcattcacagttcatgaaaatccactgttctgcagacrccgctgctgatacccaggcaaacagggtctgsagtggacctctascaaactccaacagacctgcagctgagggtcctgtctgttagaaggaaaactaacaaacagaaagaacatccacaccaaaaacccatctgtacatcaccatcatcaaagatcaaaagtagataaaaccacaaagatggggaaaaaacacagcagaaaaactggaaaytctaaaaagcagagtgcctctcctcctccaaaggaacgcagttcctcaccagcaakggaacaaagctggatggagaatgactttgacgagttgagagaaggcttcacatgatcaaactactgcgagctataggaggaaattcaaatcaaaggcaaagaaggtgaaaactttgaaaaaaatttcgacgaatgtataactagaataaccaatacagagaagtgcttaaaggagctgatggagctgaaagccaaagctcgagaactacgtgaagaatgcagaagcctcaggagtcgatgcgatcaactggaagaaagggtttcagtgatggaagatgaaatgaatgaaatgaagtgagaagggaagtttagagagaaaagaataaraagaaacaarcaaagcctccaagaaatatgggactatgtgaaaagaccaaatctatgtctgattggtgtacctgaaaktgacggggagaatggaaccaagttggaaaacactctgcaggatattatccaggagaacttccccaaactagcaaggcaggccaacattcagattcaggaaatacagagaatgccacaaagatactcctygagaagagcaactcyaagacayataattgtcagattcaccaaagttgaaatgaaggaaaaaatgttaagggcagccagagagaaaggtcgggttacccacaaagggaagcccatcagactaacagcggatctctcggcagaaactctacaagtcagaagagagtgggggccaatattcaccattcttaaagaaaagaattttcaacccagaatttcatatccagccaaactaagcttcataagcgaaggagaaataaaatactttacagacaagcaaatgctgagagattttgtcaccaccaggcctgccctaaaagagctcctgaaggaagcgctaaacatggaaaggaacaactggtaccagccgctgcaaaatcatgccaaaatgtaaagaccatcaagactaggaagaaactgcatcaactaacgagcaaaataaccagctaacatcataatgacaggatcaaattcacatataacaatattaactttaaatgtaaatggactaaatgctccaattaaaagacacagactggcaaattggataaagagtcaagacccatcagtgtgctgtattcaggaaacccatctcacgtgcagagacacacataggctcaaaataaaaggatggaggaagatctaccaagcaaatggaaaacaaaaaaaggcaggggttgcaatcctagtctctgataaaacagactttaaaccaacaaagatcaaaagagacaaagaaggccattacatattggtaaagggatcaattcaacaagaagagctaactatcctaaatatattgcacccaatacaggagcacccagattcataaagcaagtcctgagtgacctacaaagagacttagactcccacacaataataatgggagactttaacaccccactgtcaacattagacagatcaacgagacagaaagtcaacaagcatacccaggaattgaacttagctctgcaccaagcggacctaatagacatctacagaactctccaccccaaatcaacagaatatacatattttcagcaccaccccacacctattccaaaattgaccacatagttggaagtaaagctctcctcagcaagtgtaaaagaacagaaattataacaaactgtctctcagaccacagtgcaatcaaactagaactcaggattaagaaactcactcaaaaccactcaactacatggaaactgaacagtctgctcctgaatgactactgggtacatarcgaaatgaaggcagaaataaagatgttctttgaaaccaacgagaacaaagagacaacataccagaatctctgggacacattcaaagcagtgtgtagagggaaatttatagcactaaatgbccacaagagaaagcaggaaagatccaaaattgacaccctaacatcacaattaaaagaactagaaaagcaagagcaaacaacattcaaaagctagcagaaggcaagaaataactaagatcagagcagaactgaaggaaatagagaccaaaaaacccttcaaaaaatcaacgaatccaggagctggttttttgaaaggatcagcaaaattgatagaccgctagcaagactaataaagaaaaaaagagagaagaatctaatagacgcaataaaaactgataaaggggatatcaccaccgatcccacagaaatacaaactaccatcagagaatactacaaacacctctacgcaaataaactagaaaatcgagaagaaatggataaattcctygacacatacactctcccaagactaaacgaggaagaagtcgaatctctgaatacaccaataacaggctcwgaaattgtagcaataatcaatagcttaccaaccaaaaagagtccaggaccagayggattcacagccgaattgtaccagaggtacaaggaggaactggtaccattccttctgaaactattccactgartaaaaaaagagggaatcctccctaactcattttatgaggccagcatcatcctgataccaaagtcgggcagagacacaaccaaaaaagagaattttagaccaatatccttgatgaacattgatgcaaaaatcctcaataaaatactggcaaactgaatccagcaagcacatcaaaaagcttatccaccatgatcaagtgggcttcatccctgggatgcaaggccggttcaatatacgcaaatcaataaatgtaatccagcatataaacagaaccaaagacaaaaaccacatgattatctcaatagatgcagaaaaggcctttgacaaaattcaacaacccttcatgctaaaaactctcartaaattaggtattgatgggatgtatctcaaaataataagagctatctatgacaaacccacagccagtatcacactgaatgggcaaaaactggaagcattccatttgaaaactggcacaggacagggatgccctctctcaccactcctattcaacatagtgttggaagttctggccagggcaattaggcaggagaaggaaataaagggtattcaattagggaaagaggaagtcaaattgtacctgtttgcaggtgacatgattgtatatctagaaatccccattatctcagcccaaaatctccttaagctgataagcaacttcagcaaagtctcaggatacaaaatcaatgtacaaaaatcacaagcattctttttttttttttttttttttttttttgagacggagtttcgctctgtcrcccaggctggagtgcagtggcgcgatctcgrctcactgcaagctccgcctcccgggttcacgccattckcctgcctcagcctcctgtgtagctgggactacaggcacgcgccaccatgcccrgctaatttttrtattttttttagtagagacggggtttcaccgtgttcttatacaccaataacagacaaacagagagccaaatcatgagtgagctcccattcacaattgcttcaaagagaataaaataygtaggaatccracttataagggacgtgaaggacctcttcaaggagaactacaaaccattgctcartgaaataaaagaggatacaaacaagtggaagaacattccatgctcatgggtgggaagaatcaatatcgtgaaaatggccatactgccyaaggtaatttatagattcaatgccatccccatcaagctaccaatgcctttcttcacagaattggaaaaaactactttaaakttcatatggaaccaaaaaagagcccacatcgccaactcaatcctaagccaaaagaacaaagctggaggcatcacgctacctgacttcaaactatactacaaggctacagtaaccaaaacagcatggtactggtaccaaaacagagagatagatgaatggaacacaacagagccctcagaaataatgccrcatatctacaactatctgatctttgacaaacctgagaaaaacaagcaatgggaaaaggattccctatttaataagtggtgctgggaaaactggctagccatatgtagaaagctgaaactggatcccttccttacaccttatacaaaaattaattcaagatggattaaagacttaaaygttagacctaaaaccataaaaaccctagaagaaaacctaggcaataccattcaggacataggcataggcgacgacttcatgtctaaaacacyaaaagcaatggcaacaaaagccaaaattgacagatgggatctaattaaactaaagagcttctgcacagcaaaagaaactaccatcagagtgaacaggcaacctacaaaatgggagaaaattttcgcaacctactcttctgacaaagggctaatatccagaatctacaatgaactcaaacaaatttacaagaaaaaaacaaacaaycccatcaaaaagtggacaaagaatatgaacagacacttctcaaaagaagacatttatgcagccaaaagacacatgaaaaaatgctcatcatcactggccatcagagaaatgcaaatcaaaaccacaatgasataccatctcacaccagttagaatggcaatcattaaaaagtcaggatacaacaggtgctggagaggatgtggagaaataggaacacttttacactgttggtgggactgtaaactagttcaaccattgtggaagtcagtgtggcgattcctcagggatctagaactagaaataccatttgacccagcaatcccattactggtataatatatacctaaaggactataaatcatgctgctataaagacacatgcacacgtatgtttattgcggcactattcacaatagcaaagacttggaaccaacccaaatgtccaacaatgatagactggattaagaaaatgtggcacatatacaccatggaatactatgcagccataaaaaatgatgagttcatrtcctttgtagggacatggatgaaattggaaatcatcattctcagtaaactatcgcaaggacaaaaaaccaaacaccgcatgttctcactcatagatgggaattgaacaatgagaacacatggacacaggaaggggaacatcacactctggggactgttgtggggtakggggagtggggagggatagcattaggagatatacctaatgctaaatgacgagtcaatgggtgcagcacaccagcatggcacatgtatacatatgtaacmaacctgcacattgtgcgcatgtaccctaaaacttaaagtataataataaaaaaaaattaagaaaaawatagaaaagaaagtgtggtgcatatacrccatggaatactatgcagccttaaaaartgatgacttcatttcctttgattggacatggatgaagctggaaactgtcattctcagcaaactatcacaagatcagaaaactaaacactgcatgttctcactcataagtctgagttgaacaatgaaaacacatggacacagggaggggaacatcacacactgkggcctgtcagggggtgggaggctaggggagggatgacattaggagaaatacctaattatatgtgataggttgatgggtgcagctaaccagcagggcacgtgtatacctatgtaacaaaactgcacattctgcacatgtaacttagaacttaaagtataataattttaaaaaaagctcaacatcactgatcattaaagaaatgcaagtcaaaaccacaatgagataccatctcacgccagttcgaatggtgatcattgaaaagtcaagaaacagccgttgctggtgaggctgtggagaaaaaggaacacttttacactgttactgggagagtaaaattagttccttcattgtgtatgacagtgtggtgattcctcaaagatctagaggcagaaataccatttgacccagcaatgccattactgggtatatacccaaaggaatgtaaatcgttctattataaaaatacatgcacgtgtatgttcattgcagcacggttcacaatagcaaagacatggaatcaacccaaatgcccatcaatgatagactggatatagaaaatgtggtacatatacatgatagaatactatgtagccataaaaaggaacaagatcatatcctttgcagagacatggatggagctggaagccattatcctcagcaaactgactcaggaacagaaaaccaaacactgcatgttttcacttaccagtggcagctgaacaataggaatacatggacacatggtcagggaacaacacacgctgcggcctgtcatggggggcggggggagggagagcatcagaaagaatagctaatggatgctggggttaatacctagataatgagttgatatgtgcagcaaaccaccatagcacacatttacctatgtaacaaacttgcacatcatgcacatgtgtcccagaagttaaaataaaagttgaagaataaaaattgcacatgtaactaaaaccaaaaaatactgtatgtaagtgaaagttgatatcaaaataactattaataattttaatatattatttttctgtttatacaggatttaatggtttttagagctatttatagattatattttatatatttatatttgatatataacattaggtcatataacttaattaaggcaaagaaatttttgtaaaaatctactcagatggcagaataaactttggcaacccaaggcttttttttccttttatttctaaacctgtatttttggaataatttaagaccattttgaagtatgtaattaacccagttcagattaaactgccattttaatgaaatatagtttgaagtctcatattgaatttattattaggttcacatggccccctttcatttgctggtttatgtttatctgtttctataataatcccatctcctggtattaatatatttaatattacctgtaatatagtataggcatgaaagatttttatttttatttttaaagatttttattttaaaaaaggagttgctgataagagagcagctgaaatggaataggattatcccttctgttgactgctgacttcccaaaaaaaggccagaatatcctgttgatgaagcaaagctaagtttattccttaatacaataaagggcaagcacaaccttgatagagccttagtagactctgcaagggagagttcaggggtagatattgcaaaaccttgagatgtttaagagctttcaatgcagtcgtctgattgagacgacagcgttcatgatataataatggttgaaggtttgtagcaacagcaggctaaggatcttaaccaagtcttgtaaatacacagttgtttgataaatgagttgtttgagcagtagagggagtactgtgaaaggggactgtttgagtactctattgttggggtaaatggatttttgggaagttcctgaagccaacagtgaagttatttactgatttactgccttatctttctgggcaagaaacttcttggcacaagtagtagtcatgtgtatgtaggcggccttagttcatagacctatagttaatctatgtggatgcagtggtttcacttctcatttctaagagagctagaacataaagagttcttggtctgtgagataaattgtgggaaaaataaggtatatttgaggcatctgtggtctttttagatatgcagattaaaatatattgtcattttaggactcaggttttaaaaggaaagaaaaacaaggtgaatgttcttgtgttctttttactttaaaaattatgcaatgtgtttattatgttctcagtattgtttataggttatagttattaattccatccataaaataaattacttttactctgaaatcaggctgtttaggtttgaattctggctctgccacttactagcyatgggatattggattaattacttcatctctttctaccttgtttccttatttctaaaatgagaataattctatacatttttcatggggtaactaaggattaagtgcattagtgtatggaaggtgctctagacagttcccagcacgtagtttagtgctgtataagtgttacacattgttagtattatgattactactctattactactactactgctgctgccactaatatcattatcttttaatttttaagcaaagttgaatgactgtcttgtaacaaagtaatagttttataatgctaacaaaaatccaacatttacattcatcatctacagggagaaaaatgtagtcattgttaaaggaataaagtgctttaatttttttccccagttaaagcctaggtctgatttaagtgcatgaagtaggtttattgcttacatctggttgattcagtagctattttttgattgcctattatggttgacactgggcaagaggaggtagccaaatctgggagagtggcttttatacttgtaatggagaaacaatttagtctttttattgagtagtagaaccctgaaattttgttagaaattttccttataacagatttatgcattaaacaattttactgcattgtttataacagtcctttttgaagtttagtttcatcagtaaaatgagttaagattgttttaaagttttatctgagcatttaaacccagttattctattattctgtgaaactgtgtagaaaattcttataaaggaaaattttggccaggcatggtggctcatgccagtaatcccagtactctaggaggccgaggtaggaggattgcttgaggccaggggtttgaaatcagccaggccggcatagcaagaccctgtctatattaaaaagagagagagatagagaaaaataaataaattggaaattgtattctataccttgatgttgtgttttggttgtaaaaaataattctattttcatggagaatgtttcaaagaaagtttagatattttgtggttgtctgcatttaatttactaggaagcaaattatttattagaatattgaccaatttgtaaatttagcatcagaattggctctggtataagaattaaaatgagactggtaggcgctaggtcttatttatcatgtcctcacttttagaaattgggttattcttactcagagcctctttcagagttttactatccactgtaatggtagctttggtgctgtgtaagccaagagccctggtagatgcatgcaacctcctaaatttgggccgattgaatcagttaagtgctcagctttttcatatttgatttccttcmtgcagttcatccactaggatactgtgaaagaggcatgacattttttggtataaagagagctaaacatygtatatttaactcagttttaacaaaaattccagaagtggtcccagttttgcttagaatgtcaccattttggagttttgtgaatgtgttctgttctatctgaaaaagtaaacagttggayggaattttatcaattgcaccaagtacactgaactacatgttaggaccctgactttgaatgcacagagcttagcatacatttttgaaacataaaattatagacagtgaaaatatcctaaggatctgtaagttttagggactttaaataaaactggtgatttattgatttagaaggaatctcaagagttctgttagtccctacaaaagaatcctaattttgaggaaggattgcatttaatggccctgaagaggtaagtatgtattaagcttaagaaaaatcatttacaaatagtgaaatttagatattattgctgtataacaaactatcctaaaatattttttaaatttaatttaactcttaaaaatattttaacttctattttaggttcaggggtacatgtgcagttttgttatgtaggcaaactcttgactcggggtttagttaacagattatttcgtcaccccattaccaagcacagtactctgtaggtattttttttcttccaaacctatcccttctccaatcctccacccttaagaaggctccagtgtctgtttttcaacttctgtccatgtcttttcattatttagcttccacttgtaagtgagaacatgtggtatttggytttctgttccttcatkagtttgctaaggataatggcctccagttccattcgtgttcctataaaggacatgatctcattttttttgttaatggctgcagagtattccatggtgtatatgtaccatgttttctttatccagtctaccagtgatgggcatttaggttacttttatgtctttactattgtgaatagtgcttcagtgaacatttgcatgcgtgtttatggtagaatgatttatattcctctggrtatgtacccagtaatgggattgctgtgtcaaatggtatttatggctttaggtctttgaggaatcgccacactgtcttccacaatagctgaactratttacacttcccccaacaggtatataagtgttcctttttctccaccacctaaccagcatctgttattttttgactttttagtaatagccattctgactggtgtgagatggtatctcactgtggttttgatttgcatttctctaatgatcagtgatkttgagctttttttcatggttgttggctgcatgtgtgtcttcttttgaaaattgtctgttcatgtccttcacccactgtgttatggggttgtttttatttttttcctgtaaatttgtttaagttcctcatagattctggatgttagacctctgtcagacgtatagttagcaaatattttctctcattctgtaggttgtctgtttactctgttcatagtttcttttgctatgcaaaagctctttagcttatttttgatttatcaatttttgcttttgttgcaattgcttttggcatttttgtcatgaaatctttgccagttcctatgtacaaaatgatatttcctaggttatcctttagggtttttatttaggttttaggttttatttaggttttaggttttacatttaggtctttcatccatcttgagttgatttttgtatatggtgtaaggaaggggtccagttttagtcttctgtatatagctagcccgttatcccagaatcatttattgaatagggagtcctttccccrttgyttgtttttgtcagctttgtcaaagatcagatggttgtaggtgtgtgggtttatatctgggctctctatcctgctccattggtctgtgtgtctgtttttataccagtaccatgttgtttttggttactgtagccttgtactacagtgtgaagttggacaatatgattcctccagctttgatctttttgcttagggttcccttggcaattcaggctcttttttggttcaatatgaacattaaaatagtttttttccagtttgtgaagaatgtcactggtacatggaaaggaatagcattgaatctgtaaattgctttaggcagtatgaccattttaatgatattgattcttcccatctaagagcatggaatgttcttacatttgtttgtgttatctctgatttctttgagcagtgttttgtaattttcattatagagatctttaacttccttggttagctgtattcctagatattttactctttttgtggcaattgtaaatgggattgtattcctgatttggctctcagcttgggcgctgtgtaagaatgctactgatttttataaattgtttttgtttgttcgtttgttttttgagacacagtttcactttgtcacccaggctggagtgcagtggcatgatctcrgctcacggcaacctccacctcccaggttcaagcgattctystgcctcagcctcccragyagctgggattacaggcacgcaccaccatgctcagctaatttttatattattaatagagacagagtttcactatgttggccaggctggtctygaactcctgacctcaagtgatccacctgtctcggcctcccaaagtcctgggattacaggtgtgagccactgcacctggccctgatttttataaattgattttgtatcctgaaacttcgctgaagttgcttgtcatctcaagaagcttttgggcagagactaatggggttttttagatatagaatcatgtcatcttcaaacagggataggttgacttcctttctctctatttggatgccttttatatctttctcttgcctgattgctctggccaggacttcgaatactatgttcaatagatttggtgatagagggcatccttgtcttgttttggttttcaaggagaatgctttcagcttttgctcattcagcatgatgttgactgtgggtttgtcattgatgactattattattttgaagtatgttcctcaatgcctagtttatttgagggtttttaacatgaggggatgctgaattttatcaaaggctttttctgcatctgtggttcctgtctttagttctgtttatgtgatgagtcacatttattgatttgtgtatgttgaactaaccttgtatcccaaggataaagcctacttgatcatggkggattcactttttgatgtgctgctggatttggcttgcgagtattttgttgaaaatttttatatagatgtacatcaaggacattggcctgaagttttctttttttgttgtgtctctgtcatattttggtatcaggatgatgatggcctcatagaatgagttgaggaggattccctcctcctcaattttttggaatagcttctgtaggaatgatcctagctcttctttgtacatctggtagaatatggctatgaatccgtctggtcctgggccttttgtttgattggtaggcttttactgattcagtttcagaggtcactattggtctgcttgaggattcaatttcttcttggttcagtgttgggaggatgtacatgtccaggaattactcatttattttagattttctagcttatgtgcataacggtgttcatagtagtctctgatggttctttgtatttctgtggggtcagtggtaatgtctcctttgtcatttctgattgtgtttatttgtatcttttttctttatttgtctagctgtcaatttatcttactttaaaaaaaaaaacaactcctggattcattaaccttttgtatgattttttgtctctatctcctccattttagctcttgattttgattatttcttgtcttctgctagctttggggttggtttgttcttggttctcaagttctactagttgtgatgtttgattgttaacttgagatctttccaactttttgatgtgggtgtttagtgctataatttccctcttaacactgccttagctgtgtcccagaaatactgatttgttgtgtctttgttctcattcatttcaaagaacttyttgatttctgccttaatttcattatttacctaagagtcattcaggagcaggttgtttaatttccatgcaattgtatggctttgagcaattttcatggccttgatttctgttttaattgcacagaagagtatggttggttatgatttcagttttcttgagtttgctgagggttgtcttatgtctgattccgtggttgattttagagtatgtatcatgtggtgatatggtttggcgtgtccccaaccaaatctcatcttgaattgtggttcctataattctgacatgtcatgggagggacctggtaggagatatttgaatcttggtagcagttacccccacactgctgttctcatgataattagtgagttctcacgagatctgatggttttataaggggcttttccctcttttactctgcacttctctttgttgccgccatgtgaaggacatgtttgcttccccttctgccaygattgtaagtttcctgaggcctcccyagccrtgctgaactgtgagtcaattaaacttctttcctttataaattacccggtctcagatatgtctttattagcagcatgagtacggactaatacatgtgataatgaaaagaatatatattctgtcttcttagggtgatgagttctgtagatgtctattagatccatttggtcaagagtttagttcagatcctgatactattaattttctgcctcaatgatctattactgtcagtagggtgttgatgtctcccactattattgtgtatgaatctaagtctcttcataggtctctaagaacttgttttttgaatctgggtgcacctgtattgggtgcctatagatttaggatagttgaatcctaaatttttaggatttaagaattgttgaattggaccctttaccattatgtaatgtcattctctggcttttaaaaatctatttggcttaaagattgtttggtctgaaattaggcttgcaactcctgcttttttctgttttccgtttgtttggtagatttgtctctatttctgttttgagcctgtgggtgccattgcatgtgagatgggttacctgaagacagcataccatgtatcttgcatctttatccaacttgctactctgtgccttttaattggggcatttagcccatttatattcaaggttagtattgatatgtgtgaatttgatcctgtcattatgttcttagctggtaattatgcagacttctttgtgtggttgcttcatagtatcacttgtctgtgtacttaagtgtgttttgtagtggctggtaatggtcttccctttccatatctagtgcttctctcaggagctcttataaggcaggtctagcattaatgaattccctcagcattttcttgtctgaaaggatcttatttttcctttgcttttgaagcttagtttgactggatatgaaatttttggttggaattccttttcttaaagaatgttgcatataggccctcagtctcttctggcttgtagggtttctgctgataggtacactattattctgatgggcttctctttttaggtgacctgtcctttctctctagctgcttttaacattttttctttcattttgaacttggaaaatttgatgattatgtgtcttgggggtgatcttgaagtatcttgtggtggttctccacatttcctgaatttgagtgttggactctctagctaggttgaggaaattctcatggatgatatcctgaaatatgtttttcaacttgttttctttcttcccatttctttcaggtatgccagagagtcatagatttggtcttttacayaattccatatttctcagaggttttattcattcctttttgttctgttttcttcctgtctgactgtattatttcagaaagccagtcttcaatctctgagattcttttctccacttgttctattctgctgttaatatttgtggttgcattatgaaattcttgtagtgtgtttttcagctctatcagattggttgtattattttctatatgagctattttgactttcatctcctgtattgttttattgtgattcttagcttccttggattgggtttcaacattcttctgaatcttgatgatcttcattcctatccacattctgaattctgtttctgtcatttcagccatctcaacccagttaataacccttaactggagaactagtgtggttgtttggaagaaagaaggcacttcagctttttccattgtaagagttcttgtactggttctttctcatttgtgtgggctgatattccttcagtttttgaagttgatgtcttctggatggattgttttgctttttttttatttgatgcccttgggggtttgattgtggtataaggtgggtttggttgtctggcttcaattctagtctgctcctgggtcttgcaggaggccccagttattactgcctttgtgtctgcatttcttttgttggttattctggtccaaggggctccctcagactggggctgcagttgagtgacaagccctatcctagccaagttgccctaatctactatctgtgtgcttcctggggggacatgggagttgcctctgcaaaacatctgagtggctcactgcctcaatctagaagtatgttggggaattgtggggaagccaggttgattctctccttctcagtcttgcatgggtccatgtggtaagggtgagtccccctgggggctgtcactcactcaccctttcccgtgttgaagaggttttcctggctctgcactgagccccgacagactggtgcccagctttgcccctctttgttctctgtgttcccctgctgccttgatgtatctcatcatggtttctcagatgatcagcctgcagaacccgtgttcactagcacttttgttttctccccctgggagtggcacacatgaactacttccagtctaccatcttagccctgcccccagatatccaaaaacttagtttcttaaaaacaatgatttatctcatcattaagaaatagaggctaaaaagaaaaagggaaaaatgatgtattatttttcacaattctgtgggttatcaattgatgattcttctgtgctatgccttgcttgagtyattcatgtggcttcattcatctgggagctgtactggagctggagtgtacaagactgaatctcattctcaaaagactctttccatgtggcctctcatcattcagtagtatagcctgagcttctttaccggatggtttctggcttctaagagtaacattccaagataatcctcaatggaaaaktgctcatcatgtctctgtttgcatcacagctaaggaaagtcacatggccaggtccagagtcagtataggaggagactctacaagcacatgaataccaggaattatggttcactggaccaccaatgtatcattctacctcaagtggtataaggcatcttaagtccttcatgtggttgggacgtgagactagaacctgaaccagtagtattgtgacactaagatgctagatagtgcttctcaaactttagtgtgcaacagaaccacttggggagactgtttaaaattmttattcatggaccctaattttagaatcttttttcagtatatctggagtagagcccaagaatatgcatttttaaaagaatccctgggttttcctgataaacacccagtacaagagccacttatgagaaattctgggcagggaccatcttgcatttcctttagtaatctgccatcatcagagtcaagccttataaaagttgatacatgattgaagattcctagtttgttcactatggcaggtcaatagcaaccaaggagatggttagggaagagtcaccttttgattttcagctgttcttataactcagatccctgtgctggattttaggttggtgagaattttttggagtaatggaaaatgtgagtagttgggacactctgctttacacaagtagcttctctaatgcacgtttacttctttatagcagttgtttartgaaaataacggtaaatcttgatctgttgctagacagtgcttagattgatctttctctagtgagattggaatgaaacccagtttcatggaaagaaatagcactggcaaaaatgtaacatggggttttctcaaaagtcatagcacagttttaagctttaataacttcagaactataaataccacaaacaataaatatcacttataagcttaattatctaagtttctttataccttttcagttttttattttgaataatatttaatttcagtgttttgtttcagtaaacatttataaaagaaatttagataattcctgtttttcacttttttttttctattttaagattcagagtcacggtgattcagggaatgatgttattgaggcaacctgacacacatgcctttggaatattcatttgttgacccagtaggttctatgtatgcacagatacttctaggaagaacaacattaatgtaagctttatgcagaattttgatgacagtgccactcctcttgcctgtttttcattcacttgtctgttagaggaccatgccattttagaactcatggtaactaatgctgagcatagctacacatgatttagacctgaggaaaacatatcttaaaaaagagtttgtagcaaagatagaatgtgcccactcctctgctttggaggatcctctagtactggttttctatgtatcctcctaaccctttcctctgcagattaaacatctgcgtaattgcacaatgacaaaaggaagacaagagtttcctcctaccaygctgtggttctgcttttcaggcttttttttttttcttctacccaagagctgggctaatctttatgaatctgtgatccaggattcagracacatgatgttactttatcaagatatgttttaaaacatgaaaacccaaagtagcatgatctcattttataagacttgaaaaaatgattcaagttacatggcagattataaatgctgacattctggcaagataattataattgattcttaggaggaagaaagagggacgatttctaaagaaaaggtagtatctttcagaaaagtctatgaaaagcttgggtttccaaataataagttaaaacatgggaggagttgacatgaaaaatattgaagggacatggtcagtgtaattgatttttgaatggattaataaatggtacccttctttgcttttctatatattcacacatcttacttactctagaaaacctatggttcaaagttctaacttattttagttattagttcttttctaacctatcaccaacttacatctactaygtctcttttaacacttagcatacgtactgtgacttctatgtgtgcaaaataggaagtgagttactcatcccagttatttcaccagagcagtttcatggtggttattgaagaacagccttgttatcaaagggagggtagtcttctaggataatattaaggatttcaatttaagcagattggaaggaactaaagtgactctagtgtgcttaaaaatgactcttgaaattgtggttacaggtctgtgccacagactttcttctccgtttttaaaagttattcttcagaatatcctgaatttgaggtcagaaaatctttaagccaaatcttatttaagtattgggctgaatcagaatatgaagtttcatatatgaaatgaaagtttaataaatgaaacaaggtttggctttgcatcatagatttttatttaatctgttaatgtgattcaaaacatgcacctcaaattatttgatacagaggtgggaaatgctaagttttactcaggaattcatcttagtagaaaaatttagaaatacagacaaatgtctattttaaaaatcacttactcctaccatccagagattctaactgtttacattgttgcattttcttccttccctttcaaatagaaggaaacacaacaaaatgaatgaatttcatagtaatgaacttgagcaaaataagaaagacatgaagcatatatgctgtattactctaatcacaaaaagttcaaatataggcaaaaatcaaccacatatttcaagaattcatatgtaggtggtaaactataaagaaaagtttattccaaagtcaggtaggtgtctcccctaagaggagaaagggtcatgattgggaggcatatatagagggcttcgagggtgggcttttgatgtgggtgatgataactgtagatgttcactttaaaattatttaayctgagcatatctgttatatattttaccataaaagtatattttatattttacaatgtaaaatgtattcaatattttacaatttaaaatataaaaattttcagctatatcaccttttccatggccaaaggagtagttgtgatgctttgttgttctcagagaccttactcgcagtaatggttctgaaacgttagtgtgcatcaggatcacttggattaaatatagattcctgggccctgactccaaagtatctgatttggaatatctggtttagagcccaagaatctgcatttgtaataagttcccaggtcatgctaaagatatttttgcatggaccacactttgagaatcaccagatagcaaagctgtacctatctatagaaccatgctggggaataacagaagaaaatggaggcccatattcagtgtatatagtatatgcttacaacagaaaaggagcaagaattatataccttgtgatccgtgttgtggtattagtctatttttaagtctatctatgaatggcaatataagccttgccagtgctgagggaatcagagccatttaaaacaaacaaaagaaacagtgttcttataataagatgtctaaatttgtgaatttccttaactgtgactttggaaagttagaataagtaaaaatcaacgtacctgtttattaaaaaaaatgttgtgcaaaggctaactttgagaatgagaagatatatgtgtgtgtgtatgtgtgtgtgtgtgtgtgtatryrtrtatrtatatatatatatatatatgttttattttattttattttattttttttgagacaaggtcttactctgtcatccaggctgagtgcagtgacctgatcatagctcactgcaacctcaaccacaacctcctgcagtcaagtgatccttccacctcagcctcccaagcagagcagctggcactacagacacgtgccacaacacctagctaatttcttattttttgtagagacagggtctcactatggttcccaggctggccacaaactcctggactcaaggagtcctcctgacttggcccctcaaagtgttggaattataggtatgagccactgtgccaggcctatgtctttttaaaatagaaacaaacactcaaactaattataggtaaggaacaacatttatttactttgtgttgttcatgttaaagttaatggatccatggtcttgaattatcatttcagtcttctttcattgtgtttgcttgaaaaactaagagatttcctcagcagaaaccttttaagccagaagggattggagttttatctttagccttcttaaagagaataactgtcagtcaagaattttgtatccagaacaaaactaagttttgtaaatgaaggagaattaaagtcattttcagacaaacaaatgctgagagaatttgttactactagaccagctctattgaaaatgctaaaaggagttttaaactttaaaagaaaaaggcaattatgaaccagaatagaacctcttgaaagcataaaactaatggggcctataaaacaataacaataaagaaaccagagggggaggagccaagatgsccraataggaacagctccggtctacagctcccagcgtgagcgacgcagaagacgggtgatttctgcatttacatctgaggtactgggttcatctcactarggagtgccagacagtgggcgcaggtcagtgggtgcgcgtaccgttcgcaagccgaagcagggcgaggcattgyctcacttggkaagcgcaaggggtcagggmgttccctttctgagtcaaagaaagggatgccggacagcacctggaaaatcgggtcactcccaaccaaatactgcgcttttctgacaggcttaaaaaatggcgcaccacgagattatatcccgcacctggctyggagggtcctatgcccacggagtctcgccgattgccagcacagcagtctgagatcaaactgsaaggtggcagcsaggctgggggaggggcgcccgccattgctcaggcttgattaggtaaacaaagcagccaggaagctccacctgggcggagcccaccacagctcaaggaggcctgcctgcctctgtaggctccacctctgggggcagggcacagacaaacaaaaagacagcagtaacctctgcagacttaaatgtcgctgtctgacagctttgaagagagcagtggttctcccagcatgcagctggagatctgagaatgggcagactgcctcctcaagtgggtccctgacccctgacccccaagcagcctaactgggaggcaccccccagcaagagcacactgacacctcacacggcagggtattccaacagacctgcagctgagggtcctgtctgttagaaggaaaactaacaaacagaaaggacatccacaccaaaaacccatctgtacatcaccatcatcaaagaccaaaagtagataaaaccacaaagatggggaaaaaacagaacagaaaaactggaaactctaaaaagcagagcgcctctcctcctccaaaggaacgcagttcctcaccrgcaacggaacaaagctggatggagaatgactttgacgagctgagagaagaaggcttcagacgatcaaattactctgagctactggagggcattcaaaccraaggcaaagaagttgaaaactttgaaaaagatttagaagaatgtataactagaataaccaatacagagaagtgcttaaaggagctgatgragctgaaaaccaaggctcgagaactacgtgaagaacgcagaagcctcaggagtcgatgcgatcaactggaagaaagggtttcagtgatggaagatgaaatgaatgaaatgaagcgagaaggaaagtttagagaaaaaagaatacaaagaaatgagtaaagcctccaagaaatatgggactatgtgaaaagaccaaatctacgtctgattggtgtacctgaaagtgatggggagaatggaaccaagttggaaaacactctgtaggatattatccaggagaacttccccaatctagcaaggcaggccaacrttsagattcaggaaatacagagaatgccacaaagatactcctcgagaagagcaactccaagacacataatggtcagattcaccaaagttgaaatgaaggtaaaaatgttaagggcagccagagagaaaggtcgggttaccctcaaaggaaagcccatcagactaacagtggatctctcggcagaaaccctacaagccagaagagagtgggggccaatattcaccattcttaaagaaaagaattttcaacccagaatttcatatccagccaaactaagcttcataagcgaaggagaaataaaatactttacagacaagcaaatgctgagagattttgtcaccaccaggcctgccctaaaagagctcctgaaggaagcgctaaacatggaaaggaacaaccggtaccagccgctgcaaaatcatgccaaaatgtaaagaccatcaagactaggaagaaactgcatcaactaacgagcaaaataaccagctaacatcataatgacaggatcaaattcacacataacaatattaactttaaatgtaaatggactaaattctgcaattaaaagacacagactggcaaattggataaagagtcaagacccatcagtgtgctgtattcaggaaacccatctcacgtgcagagacacacataggctcaaaataaaaggatggaggaagatctaccaagcaaatggaaaacaaaaaaaggcaggggttgcaatcctagtctctgataaaacagactttaaaccaacaaagatcaaaagagacaaagaaggccattacataatggtaaagggatcaattcaacaagaagagctaactatcctaaatatattgcacccaatacaggagcacccagattcataaagcaagtcctgagtgacctacaaagagacttagactcccacacaataataatgggagactttaacaccccactgtcaacattagacagatcaacgagacagaaagtcaacaaggatacccaggaattgaacttagctctgcaccaagcggacctaatagacatctacagaactctccaccccaaatcaacagaatatacatttttttcagcaccacaccacacctattccaaaattgaccgcatagttggaagtaaagctctcctcagcaaatgtaaaagaacagaaattataacaaactatctctcacaccacagtgcaatcaaactagaactcaggattaagaatctcactcaaaaccgctcaactacatggaaactgaacaacctgctcctgaatgactactgggtacatagcgaaatgaaggcagaaataaagatgttctttgaaaccaacgagaacaaagacacaacataccagaatctctgggacacattcgaagcagtgtgtagagggaaatttatagcactaaatggccacaagagaaagcaggaaagatccaaaattgacaccctaacatcacaattaaaagaactagaaaagcaagagcaaacacattcaaaagctagcagaaggcaagaaataactaaaatcagagcagaactgaaggaaatagagatacaaaaaacccttcaaaaaattaatgaatccaggagctggttttttgaaaggatcaacaaaattgatagaccactagcaagactaataaagaaaaaaagagagaagaatctaatagacgcaataaaaactgataaaggggatatcaccaccaatcccacagaaatacaaactaccatcagagaatactacaaacacctctacgcaaataaactagaaaatcgagaagaaatggataaattcctcgacacatrcactctccsaagactaaaccaggaagaagttgaatctctgaatagaacaataacaggatctgaaattgtagcaataatcaatagtttaccaaccaaaaagagtccaggaccagatggattcacagctgaattctaccagaggtacaaggaggaactggtaccattccttctgaaactattccaatcaatagaaaaagagggaatcctccctaactcattttatgaggccagcatcattctgataccaaagccaggcagagacacaaccraaaaagagaattttagaccaatatcgttgatgaacattgatgcaaaaatcctcaataaaatactggcaaaaggaatccagcagcacatcaaaaagcttatccaccatgatcaagtgggcttcatccctgggatkyaaggctggttcaatatacacaaatcaataaatgtaatccagcatataaacagagccaaagacaaaaaccacatgattatctcaatagatgcagaaaaagcctttgacaaaattcaacaaccctttatgctaaaaactctcaataaattaggtattgatgggacgtatttcaaaataataagagctatctatgamaaacccacagccagtatcatactgaatgggcaaaaactagaagcattccgtttgaaaactggcacaagacagggatgccctctctcaccactcctattcaacatagtgtttgaaattctggcccgggcaattaggcaggagaaggaaataaagggtattcaattaggaaaagaggaagtcaaattgtccctgtttgcaggcgacatgattgtatatctagaaaaccccattgtctcagcccaaaatctccttaagctgataagcaacttcagcaaagtctcaggatacaaaatcaatgtgcaaaaatcacaagcattctyatacaccaataacagacaaacagagagccaaatcatgagtgaactcccattcacaattgcttcaaagagaataaaatacctaggaatccaacttacaagggatgtgaaggacctcttcaaggagaactacaaaccactgctcaaggaaataaaagaggatacaaacaaatggaagaacattccatgctcatgggtaggaagaatcaatatcgtgaaaatggccatactgcccaaggtaatttatagaatcaatgccatccccatcaagctaccaatgcctttcttcacagaattggaaaaatctactttaaagttcatatggaaccaaaaaagagcccgcatcgccaagtcaatcctaagccaaaagaacaaagctggaagcatcacactacctgacttcaaactatactacaaggctacagtaaccaaaacagcatggtactggtaccaaaacagagatatagatcaatggaacagaacagagccctcagaaataacaccgcatatctacaactatctgatctttgacaaacctgagaaaaacaagcaatggggaaaggattccctatttaataaatggtgctgggaaaactggctagccatatgtagaaagctgaaactggatcccttccttacaccttatacaaaaatcaattcaagatggattaaagacttaaacgttagacctaaaaccataaaaaccctagaagaaaacctagggattaccattcaggacataggcataggcgacgacttcatgtctaaaacaccaaaagcaatggcagcaaaagacaaaatcgacaaatgggatctaattaaactaaagagcttctgcacagcaaaagaaactaccatcagagtgaacaggcaacctacaaaatgggagaaaattttcgcaacctactcttctgacaaagggctaatatccagaatctacaatgaactcaaacaaatttttaagaaaaaaacaaacaaccccatcaaaaagtgggtgaaggacatgaacagacacttctcaaaaggagacatttatgctgccaaaaaacacatgaaaaaatgctcatcatcactggccatcagagaaatgcaaatcaaaaccacaatgagataccatctcacaccagttagaatggcaatcattaaaaagtcagaaaacaacaggtgctggaggggatgtggagaaataggaacacttttacactgttggtgggactgtaaactagttcaaccattgtggaagtcagtgtggcgattcctcagggatctagaactggaaataccatttgacccagccatcccattactgggtatatacccaaaggactataaatcatgctgctataaagacacatgcacacgtatgtttattgcggcattattcaccatagcaaagacttggaaccaacccaaatgtccaacaatgatagactggattaagaaaatgtggcacatatacaccatggaatactatgcagccataaaaaatgatgagttcatgtcctttgyagggacatggatgaaactggaaaacatcattctcagyaarctgttgcaagaacaaaaaaccaaacactgcatattctcactcataggtgggaattgaacaatgagatcacatggacacaggaaggggaatatcacactctggggactgttgtggggtggggggaggggggagggatagcattgggagatatacctaatgctagatgatgagttagtgggtgcagtgcaccagcatggcacaygtatacatatgtaactaacctgcacaatgtgcacatgtaccctaaaacttaaagtataataaaaaaaaaaagaaaaaaaaaaaaaagaaaccagagtatstaggtaacaagtaacaggataactggaacagtacctcacatctcaatattaacattggatataaattgcttaaattctccacttaaatgatacagattggcagaatggattttaaaaatcacaaaccaaatatatactgtcttcaagagactcacctaatacataaagattcatataaacttagggtataggagtgcaaaaagatattccactccaaatggaaaccaaaagtgagcaggagtaggtagtcttatatcagataaaacagattttaaagcaacaacagtaaaaawagacaaagaaggtcattatatgatgataaaaggatcaatccarcaagaagatattatawtcctaaatttatatacacttaacactggagctcccagattcataaaacaattactattagacctaagacatgagatagacatgaaataataatagtatgagactgcaacagtccaccgacaacactagacagatcatcaagacagaaagtcaacaaagaaataatggacctaaagtgcactctagaacaaatggacctgacaaatatttgccgaacattctacctaataacttcagattgtacattcttttaatcagcacacagaacattctccacaatagaccatatgctaggccacaaaacaagtctctataaatttttaaaaatcgaaatgttatcaggtatcttctcagaccacagtggaataaaactacaaatcaactccaaaagtaaccctcaaaactatacaaatacatagaaattaaacaatctgctcctggatgatttttgagttaacagtgaaatcaagatggaattttaaaaattctttgaaaggaatgataatattgacacaagttatcaaaatctctggaatatagtaaaagcagtactaaaaggaaaatttatagtgctaaatacctacattaaaaaatctgaaagatgataaattgacaacctaacatcatacctcaaggagctagagaaagaacaaactaaacccaaagctagcagaagaaaagaaataacaaagatcagagcagatctaaatgaatttgaaacagcagcaacaacaacaacaaaaataccaaagatcaatgacactaaaagttggtttttcaaaaagataaacaaagttgatagaccattagctagattaaccaggagaggttaaagtaagttcaattagaaatgaaactggagactttacaaccaaccccacagaaataaaaaagatcatttgagaccactgtgaacacctctatgcacacaaactaaraaatctagaggaaatggataaattccaggaaacataaacactcctagattaagccaggaagaaatagaaaccccgaacagaccaagaacaagcagtgcgattgaatcactaatcaaaacaattgccaagaaaaaaaaatagcttggggccacatggattcacaactgaatcctaccagacattcagagaactgggaccaatcctactgaaactattccaaaagattaagaaagagggatcctccctaactcattctatgaagccagtatcattctgataccacaaccaggaaaagacataagaaaaaaagaaaactacagaccaatacccctgatgaacatagatgcaaaaatcctcaacaaaatactagctaattcaagcagcacatcaaaaagataatacaccatgaccaagtaggtttcattccagggatgcagggatggtttaaaatatrcaagtcaataaatgggatacatctgataaaaggaattaaaaagaaaaactctatgatcatctgaatagatgcagaaaaagcatttcataaaatccagcatccccgtataaaaaaactcaacaaacagatataaaaggaactttacctaaaactaatgaaagccatatatgacagacccacagctaacatcataataaatggggaaaagttgaaagtattccccttgagaactggaacaagacaaggatgccactttcaccacttctattcagcatagtgctggaagtcctaaccagagcaatcaggcaaggataagaaacaaagggcatccaaattgaaaaagaggacatcaagctattgctgttcatgaataatatgactgtatacctagaaaaccctaaatactcctccaaaagactcctggatttgacaaatgaattccgtagtctcaggtcacaaaatcaatatacacaaatcagtagcagtgctatacaccaacaatgaccatgctgagaatcagatcaagaactcagtccttttcacaacagctggaaaaaaataaattacctaggaatatatttaaccaaggaggtaaaagatctctacaaggagaactacaaaacactgctgatagaaatcatagatgacacaaacaaatggaaacacatcccatgctcatggattggaakaatcartatcatgaaaatgaccatactacccaaagcaatccactgattcagtgcaattcctatcaaaataccaacatcatttttcacagaattagaaaaaacaattctaaaattcatatgaaaccagaaaaagaacctgaatagccaaagcaatcctatgcaaaaaaacaaacaaacaagaaaacagacgtagaggcatcacattatcagatgtttgccacaaggctgtagttacaaaaatagtgctggtataaaagtaggcacatagagcagtggaacagaatagagaacccagaaataaagccaaatacttacaaccaactgatcttcaacaaagcatagagaaacacaggctgaggaaaggacaccttatttaataaataatgctgggaaaactggataaccacatgtagaagaatgaaactggatgcttatcccttaccttatacaaaaatcatctcaagatggttcaaagatgtaaatctaagacatgaaactataaaaattatagaagataacctaggaaaaactattctggacattggcttaggcaaataattcrtgagtaggaccccaaaagcaaatgcaactaaaataaaaataaataaataggacctaattaaataaaagaaacttcagtacattaaaagaaataactatcagaataaatagacaacccacagagtgggagaaaatatytgcaaactatacatctagcaaaggactaatatctagaatctacaatgaactcaagtacatcaacaagaaaaaaaaatcccatcaaaatgtgggcaaataacatgaatagacatttctcaaaagaggatataagaatggtaaagaacatatgaaaaatgctaaacatcactgatcatcaggaatatgcaaattaaaaatacaatgagatactgccttactcctgcaaaaatagccattattaaaaagtcaaaaaataatagatgttggcatagatgtggtgaaaagggaacacctatacactgctggtaggaatgtaaattagtacaaactgtataaaaaacaatatggagatttcttaaagaactaaaagtagatctgtcatttgattcagcaatcccactactcagtatctacccaaaggaaaataagtgattatattaaagacacttgcacgcatatgtttattgcaacacaattcacagttgcaaacgtatggaaccaatctaagtgtccattaacgaatgagtggataaagaaaatgtgatatatatacaccatggaatactactcagccataaaaataatgaaataatgtgttttgcagtaacttggatggagctagaagccattattctaagtgaagtactcaggaatggaaaaaccaaaaaccgtatgttctcacttataagtgggaaccaagatatgggtatgcaaaggcatacagaattctatgatggactttggcgactcagaagagggagggttgagrggggtgagggattaaaaaactacttattgggtacaatgtacactacttggatgatgggtgcactaaaatctcagacttcaccactatataattcatccgtgtgaccaaaaccacttgtaccccaaaaactattgaaataaaaaaattttaaaaactgagattttcatataatgagaatagcccctgcataataacattcatgaaaatctcctagaaacatggatttggcttctaatgggacatttgcttactccaaccacatagagactggcctcttaagattaggaagcagctcactctatccatagctggcagtaccctgtgctgtagaaacttaattttactttgtgattgtgtggttaacttttctgtattaacctgactttgactttagacttcatatgacctatttacccaatcttacacagttttcagtttccagcctatctactcagtaccstactttattttgtttttcttagactgtccttgttttaaaactgtgatcttatttcaaccaaggtatagctgttcttagcttcctttgcatgctgagcctgtctttcttcacagtgaggaggaacccctgactactctttcctggaaatcttcattcccataggtcttctctgctgtccctatgatggtatggagcctgtttttattattttctactcacttaattgcatcttgatgaatttcagtacacaaagtcaccatattgtaggtatatctacaaaggtgttgttatactggaccagatgcagtggcttaygcctgtaatcccagcactttgggaggctcaggtgggaagatcacttcaggccaggagtttgataccagtctgggcaacagtgagaccctgtctctacaaataatttttaataattagctgggcatggtggcacatgcctgtagtcctagctgcttgggaggctgaggtagttgaatcacttaagcccaggagttcaagtccagcttgagtaacatagcaaggccccacctctaaaaaaaaatacaaataaaataaagttctattggttactctttttactaccttgtaaggaatgtacagcttgttcttgttaggaaattggtaaggaaaaatgtgaatttcagatttgggtatgtggtgttagtggaggatcagaaatctattggatgaattaaatctgtcttttaaaagctactttctactaatgtgggttttatgatcacctgatggattaatttgagatccattaagacctaagtgccttactggttcccaatttaacaattctgtggaatccaaactcttatttattttgatttgtttttacttttttgagacacggtctcgctctgtcacccaggctggattgcagttgtgccatctcagctcactgcaaccttggcctcctgagccctagtgatcctcccaccttagcctcctgagtatctgggactacaggcacacaccatcatacctggctaattttttttttcatattttttgtagacatgaagttttaccatgttgcccaggatggtctggaatccagactcttgtctgcaattgatttaatataattctacaatatttttccttattgcaaggcagaaaaccatagacatttgtagcttaaaccaatctgagtgcttccattaaaaattacaggaagattatcagtgaagtggtattgcctagtaacatattgctctctaggagacagaaagcttttccacctggtttttatgcctaaggttatttgttatgcatgtttgccaagattagtattaaattccttctgttgactttagwaacacttgtgatttcttttatatgttagcattgaacattaaactctcataatctctagttttttkatttgtctttacacyaatcatgttttaaagatacacgtctattttttagttaaaatggctttgaattttatttcactagatttaaattttaaaggaaatcatatccttccaatttgatttaaattggttatggttattaatattaaacatgtctattttaggcaccagttttattagttcgtgtactcttggctacatcacrattaaaacttttctttcagtttctttccaaaataaactgcaagatttccttgttgacattttttcatttttaaaaatcgtttcgttttatttcccaccacccctgtttattatatggattgtgaagcaaagcatacaggtgatagtgaattatcttgtacaacagcctggtcgcttctttaaatttcagttttgtaagttgtttygctcaccaaagtgtccttttcatgggctctcatgctcgtgagtagggttttgttgtcatctgtatcttgctgttacatccagtaagtttaacattcatggtaacgatatttttcaagtgtttctacagtgtaaggggctcattggctgcaagattgctgtgaggtatattatagatgatagatactatgattttctgtttatttgttttatttttgttgttgttgttctgagacagaatcttgttctgtcacccaggctggaggacagtggcataatcttggctcactgtaagctctgcctcstgggttcaagcgattcttgtgcctcagcctcccaggtagctgggattacaggcatgtggcactaygtctggctaatttttgtatttttagtagagatygggtttctccatgttggccaggctgggcttgaactcaggacctcaagtgatccacccaccttktcctcccaaagtgctaggattacaggcatgagccaccgcacccaggtggtagatattgtgatatcaagggaaaatattgatgccaggaaagaccttaacatcagaataagttattttcacaagaaatatttttgatatagatacatgtggcaaaataaaactattagattattaactatgaaaaccaattttgttagaattttgaagaatactatgcatctactttttaacaacttaatttttttttttttttttttttgagatggagtctcggtctgtggtccaggctggagtgcagtggtgcaatctcggctcactgaaagctccgcctcccaggttcacgccatcctccttcctcagcctcccgagtagctgggactactggcacccaccaccatgcccagctarttttttgtattttgtttagtagagatgaggtttcacygtgttagccaggatggtctcgatctcctgatctcatcatcctcccacctttggcctcccaaagtgctgggattacaggcgtgagccaccgcacctggccaacaacttaatttttaatgatgttctctctattaagcagttttctagaactattaataaacaataaagtgatctttttttcctcctttttctgccaaattgataagaatcagaatggtaagaaggaaagaaatcttaaagtctgaataatcagtaagttaagtgatgatcctctgaacaattcagaatttactacatatacattctataaccatctctgttaaagattttatagtatatattcagaagatcaaacagatgtttcatagctgtatatacacatatatacacatatgtatatttttgcatatacataaattatttaattgaggtacatacatatgccaactaaatattttgattatttattttattataatataatcttaggctctggggcaagcaaaactgggtttgaaattcagttctatcacttactagttattaaggcatattgtttaatccttgaatatagatactcaacatctataaaatgaagattatamtagtactttcctcataggcattatcttagttcatttgagctgctacaatataaataccatagactggatgtcttaaacaacaaacatgtatttcccacagttctccatagtgggaagtccaagatcaggtcctgcaggttcagtttcaggtcagggcccatggttttcttcatagatgacaccttctcactgtgcctttacatggtgaaagaggcaagagaactctctggagcttcttttataagggcactaatgccattcacatgggctttgttcttgctatctaatcacctcttccccacaaaggccctacctttatcacattgggagttaggatcttaatttcagagggtcacaaatattcagtccatagcagcgttgtgaggattatgtgtaataatatgtgactagcttacaccatgtatagatgagaaaaaactagctgtttccccaaatttgtgttatcctttcattgtgtagacttccttctgggaagtaactcttttttcttggagactttatttcctaactttactgagtttgttgaaaagttatctctctaatttgaattgcttttgcacttttgtaaaaaatcagttggacatatttgtgtggttctattttgggatttttttgttctgttccattgatctctatcactgacaatactacaccatctttcggttattgcagttaataatgaaccatgaaattgagtagactgattacctcacatttttcttttttgaaattgttttagttattctagttcctttatcttaccatatrattttagaataatcttatctattgctacaaaaaaaacttgctggtattttgataacaattttgttaaacttatttgtcaatttagggagaattgacatctttattgtgtgaagtattccctgaacactgtatgctcttcatttatttagctctttcatccagcattttgtagttttcatacacaagttctatacatttttggttagattcacacccaattttattttctttttgagtgattataaatgctattatagttttagtttcagtgttcaagtatttattgccagtgtgtagaaatacaactgatctagtatgtttaccttgtatctttcaaccttgctgaaataattagttctagatttttttttaggctatttgggattttctatatagacagtcatgtcatatacaaatagagacagttatatttctgcctttcttgtctgtatactttttatctccttttcttgtctggttgcactgacttgaattttccagcaccatgttgaatcagagcaatgagaatggacattcttgccttgtttactgtcttgcatggaaagcattcagtctttcactattatgttagttgtaggtttctgtagatgctgtttatgaagatggggaagttgccttctatttctatttttttcttacagtttttttgatttatgagtgctgtatattttcaaatgtttttttctrtatcaatatatgcagatatatatctatagatagatatgtgatcaacatatattgatgtgttcatgtgatttttcttccttagcctgttaatatattggttgatagtttgaataatgtaccaggcttgcatatctgaaattaacgtctcttggtcatggtgtataattctttgtatatgttgctaaatttataaaatttaaaatttattggaaattataaaatttctaaaattttaacatttggaaataatttttatgtttagccagatacagtggtatgtgcctgtaatcccagatatttaggagcctgaggcaggaatattgtttgagcctaggagttcaagaccaggctagtcaacatagtaagaccctttctcatattaagtaaataaattattgttttaaaattttttaaaaagtatttttatatttatatttataagggctattggagtgtagtttcgttttttgtactgtcttcatatgatttcaatatcaggataatactagttttataaagtgaattgggaattatcctatgtatacaattttgaattgcactaacattgtactttgaatttttttctatgcaattaaataatatttgaaaatgtgatttttaaagtctgagtaaaaagttagttgtaggaacttattcttctttatctaactttttcctgttttttattatttagaacttaaaatttttttattactaataattctatggtgagcatcttcctatatatcgtgtgaacttgtcctatttattcttagaatttgtaatagatatagattataaatttcttttcatattgattgaagcatagtgtttaatatttagattagattaaatttcatatttagattagggttaatatgtaatcatttttttattatcattaatgagacccttttatggatctgcaagaccaaagctgatttcatacttaattgccttttttaatgtgttgtcatttgcactgatggtgcaaaagcgatggtgaacaaaactgccactgccttagaacgaatcaaggcagtggcaccaaactgtgctagtagttactgtatttttaaccatcatgcatctgcagggggaaaaaaaagccatacttagttaagaatatcttagatgcagtaaaaataattttattactttttgatcctcaaatataggtctttttaatactctgtgtgaagtaatgtgaagtacacataaagctccatataatggttttaaggaaaagcatttgtgagtaatcctattcacaattgtttgcactgtcagctcaattagatgctttttcttttatggaataccatttttacttgaaagaatgactgacagacaaattgtgcttattcagacttgggtatttggcaggcgttgtctttcaaattaagtaagcctatcatatcaaagaaaacaactgacaatagcctttgccaaagataaaatccaagtgaagataaactacaaaggaaaactaaacttagaaccttggaaaactgtattcaccactttcagtttgacaacttcccaatacattgtataacagaatagaaagactattctgatgaaattggtgatgatattaacaaatttttaattgatttttgacgtataatgaaatgaatcagcatttggaaaatctgcataactcagtgagctggtatttgccaaatgattaatgtgtgatrttaaaaatcatgtctgagtcatatcatagtttcattcgaagtacatacaagatagaccagtggattttaatgtaacagggtaaaaaaaagtttattgataaaggttttagattatacattgcaacaaacttttaagaagctaccacttatcaagtaaaggaaaatatacacagttattgtaaaagattattaaaatattccactatttttcaactaaatatactccaaccaaaacaacatatggcaacagattgaaagctgaagtaaatgtgagagtccagctgccttttattaaatgagacattaaagagatttttaaaaaatgtaaaacaatatctctcttctcactaattaaaaaaaatactataatytcttcctggccttttggcttagatcacatttttaaaaaattataattttcctcacaaaatgttatttatgttaacatttaaaggatttttgttatatttaaatattttaaaattttgttttaactcatatcataataaatatggatagagataacctatataaaggctaagaaactaccacttgtcaagtaaaggagaataagcacactttaacttatattataataaatattgatagagataacctatataaaggtcttcagtactatctaagagctaaagggtctatgtgaccaaaatgtttgagaacttctggcctacaggataaaatccaaacctctgtatatggtccataagtccttctatcatggcttctgccacctctgctcccttctcttcygtctcatttcctttccactctattattcagtaagatgaagatacttttattccagaactatggtgttttacatctccttacctttgcttaatgttccttttgccttgaatatgtattcttctccagctctttatataaagtactgtctccaaatgyctcttggcatcayttcagttctaacctctctgtacctcttattctgtctttataactctatctgttggtatgcaatcccatgtcactaattttgtgcagggagtttattttactcattcagccattggatatgctgcatcctcaagatctgatcagtttcctactctataaatgctatttagtatgttttgggtttctatgtccaaaataattcagtgtctttccccttattaatttggtttcatcattatttgttttcttcttaaaagtattgtcattcttccattcacttggattcaaaatcttgaaatcatcttttatccttctttcatcttcatactctgtatccagtttaatcccattgcttcttgtgtgaaaatatcttatattcactacctcctttctctactgctgccatccacgctttgaagctcaaaataagagagaaaatatttaaatatatcatggcctatttttttccaatcagcattctaaatgatttcaaaagcttttgctattctttccactacttattcttttcttcagaccagcttgctcatcactattgcattagtgaccttcctaaaatactactttagttttgtattttctcactcaacatttttgttgacttctcatttcttttggcagtgtttctttttgaaggaaaactattctcatggacgctcagtgttgacataaattattttaatttttagtaatacaacttaaatatgtccaaatataaaactaaatacaaacttttgcacatacaagtgcatrgctaaaataatttgcaaattcgtagcaaggaaaatataaaacagaatttaacataatagcattaatgtgacagaagatgttatttgccataaaaacaagcttaacgtgaatatagtacagactctgagttaggcatgagcctgttctactgtgatgactcagttaatccaccacttttctgtctttgagcttctgagaacctttgtttctacagcatgctatgatatcatttggccttcatttggtacagatgtatcatttgagaaacagatccacctctggctttttctcacccctcagcctgctacaattaaaatagcactacttggctatggtaagatagtaaatacgaatgcacattcagacactaatagtacatggtgatttagggtcactcggtaagatccagatgatccagaatatggtgtgtgtgtgtgtgtgtgtgtatgtgtgtgtgtgtgtgtgcctttgtgcatgtatgtgtaagagacagagttttagttgacttgaaaaaaagaaacttagacttttataggaaacaaatggaatctcaaagtcagccccatttgcccagagactatagactccaatatagaaaccactcatctgtaggataaagactatattcctcatgttggtatccaaggcctttatcgatttgaattcaatctcttttccttttttatttgtttttcttttctgtcttcttactgtcttttaaatatgctcatactttcccagatgtgtgccttctctcctatccctgtataagcccatctgtccacagcctttaaggaccattcatgcttttcatttccccgtgaagcttcttcctatctcttcagttacaatttgatttttctccttctttgaactcttgtttgaattccttctgtatctggtactttggcatttcgtttctttgtattaaataatgccatttataattgtttgatttttatgttctctatatcacctagacttcaggggctttaaaggcaaaatattatcttaaaagttttttgcataaacctcagaaccattgttgatattcttgaagcacttacaaaggaaatcaaatgattagatttaatgctcagtattagggatttaatttagtttctcttgcaaaatatgtgtttttttaaatatagagtataaacaaaaagtactttgctataaaaaaatttgcatttctaagaaactaaaatgtcttaaaattttgtattttttcactcattgtccttcattttcaggactgttgggaaagatcctgatggctatccgagatgcaggttttgaaatctcagctatgcagatggtaggtagtttacaatgaaccataatatttgtgaggatttttttcaaaaatagttataaaatgctttacattgaatgttccctgtgtactcatgaaccacattaaaaataaaagacrtacttactgaactcagtaaccttcctgtagtcaaaaaatggtttttgaaatgatttttcccatataatattttactgagagaagtaatattcaatgatacacctaatttaagcttataaggtaagtttatacaattctggaaactttagttgcaaaataaataaggaccaaaaactgtattttgttcttataaacaaaaagtagaatcaaagtgagaaattgtgatgagttttctgtcttctggattcttcactaaacaaataatgaaggaagagaatcagttcagattttttttccctaaccagtgccttttgctggtttttggactttctctcaagactgtctttggagttagtgtattctagcaactctgttggcacttgtaccgctgcaccttcagagcccacgcttgttcaaaattgcgttgttcatacactcctaggaaacctttcagtgagaaacaacacccactttggtagaggtcatacctttgtgctgtactcatcrgtacatttgactagaaattgggcaacagattattatataaatcagataaacaatttggtttttacagtgtttgaagcccagcaagtttgtgcttttttgatagtgaaataccaaaatagccattttgaagctgagaattttcttactggtattatttgtattttattttctgaaaagaaacagctttctaaagtcttaagattacccaaaatcaaggaccaggacacaaactggagttctattttgtgccaataagccaaaaaagaaaaaaaaaaaaagggaaatagtttacaaagtcattgagcaaaacttaaagactaatgagaaaactgatatttgaagaatcttacctagaattataaagtaawtgtcagccaaaactttctaaaagtattagcttggtgatatattaacaagattgtaggatgacatgtaagcctatttaaaaaaatatagaaatgttagttttaaacactgacctaattctagatctacagtttagcatagtgattggtgattgggtatagtttgtactratgaaaaaaataattttaaaaatgattaattgagcctataggtaaggcatggtagtgtagtagcaaacacagtcgtggacttgtggagtcagaaagatctatttctgaatcttgggtcagctgttttctaggcatgtggccttggccaaatgtcaagcattcttattctcagttttctcatctaggcaatgaaagcattagtatctgcctaaatgggttactcagcagattaaataaaataatcatttctggctcaaattctaagtatttaataaatgatatcttctattagtattttgttgcatttagcaaaacatatgtgaatgttggataaaacactgaaatccaacagaatttcctccctatggtagtaatgttgcccataaaaataaatcctcctagcttaaatgattgtccatattggcagaaatttctcagtgggtcttcaatcctggcaacaataaacaagcaaaatggagggaaaataaaactsggaattctgaggctactttttaaaaaaaataaggtcttagtttttgagaaccttagaatttaacgaaattttattcctaactaaatttaaattcagccttgataagaataagtccctctagacttactttgtaagcacacttttacagttctttttgaagagtagcaggaagtccacatgacttgtataaatgctttaacacaaaccagactaactagggatttttccgaatgcttgggaggaaaatggtattgttttctgtttcctctaaaagtctgaactacttttctttagtaatatttctttcttgtgccactaatctatcaatagtataattaatattgcatataaatcttcttttgtatcaagaatgaggttttattcagagagaggtgtagtgtagtaggtaaaagtattatcaatggggtcagactgcttgagataggatgccagtttgaggaagttgtatgactcctctgagtcttagtagtctcatctgtaagttggagccattaatactacctatgcagtaaggtggttgtgagggctaaatgagatgatgcacgtayagaacctagagtgatgctgttatccattattattcttgatgagttgatgtttaataacactttttcttcaaagagtaatctatgtaaagtttatgttttagagtaaagaagagattacaagtgttaagtgctaagtgtggcttatttatttcccttttgttggttggtttatggttttgttttgttttattttttaatatagttcaatatggatcgggttaatgttgaggaattctatgaagtttataaaggagtagtgaccgaatatcatgtaagtataaaagtaaatgtaaaacatttgtactgttaagtgaaaagtataggatgcagtgttttggactaagctcctgtactaggtcccaaatggccagactgaaaatcaatacagagtcattcatactaaagttctgtgtcaacgacytaggttgttatctgaccttctgagaaatcaggagagagcgagccaaatttcccaaacaggctaattttgtttggtataataatgaagttttctctgtctttcatccatacaacaaaaagtaacctgaggtaacctgatgttaaccagtcagttatttccacattacattcttcaaactgtatacctttcatatctcccaaaattcattgcaaccagcctgcagcttcctaaattcagttctcttcttttttcttccccctctgtagagtcagatgctaggttcagatcttaaatcttctagttatatgaccatcgacaatttatttaccttctttaaaccttgattaacccatttataaaatgggaataatgctattacctaccttatgagattgttgtgggaattaaatgaaataaattatgtaaaactgtctcacatattaaaagtactcagtaaatattacctgctattattgttgtttttattattatttagtctgatataattctttggtagtagattccrtgttgattatttacacctgtattttctgcttcaacatgtacagtcataaaaaggtgataattcctatctcatgctgttactatgatccacacttattatatatattgagtatctgctataagccaaataatcagtgatgaacaaaaaacatactgcctgcatttatggagcttatgctctggagaagatagacatgaaatcaaatgatcctacacatagctacctaaggacagcagtcaaaaggctgtaaaggaaacagaaaggttgtttttttgttyaaaaaatttgtgacttaattaaaaactagggtgacttaaaaattctgagtcaatttttgaaggaacatgttatgcttttgatgaagttctttgtttaacatgttttttctttccattttatacattttgacagccttgtatgtctattttcagtggtatctgtaatcaacactgaaagagaatgagtgagagagacaaagaaagaaaaaaggaaggagggagagagaaaaagaagaaagaaagaaacaaaggaaaaaaaggagggagaggaaaaggaaggaaacaaggaagggagggagaagagcagacaaaatttactcttctgtttttggaaaacttgttcatgccttctgctccttctgaaaatttggctttgacatttgtgtgtaggcagtacttcaatatcagaggcagaaaatcagactcaatataattatccataaaaaatcaattacatatgacctttgtgaaatagcaaaatggctttgggggatacactcaggaactctaatgagtagagttatgagtaccatataaattttgaagtccttttcctcctcttttagcttctgtagtttgtattagctgagatgactgcttttggatcaatattcaaatatattctgtaataaattattttactttgatgttgtgtatcgtaaatcctcaaagtcatgaaaatggtttacatgaccctgcatggtctggcctcatctcttactactttcccgtagtctcactcagctcctagcctctaagctgatcttcatatatccctactgtacttctgcctcaaagtctttatatccattttcacttctgcctaaagtattctttcctattcaagagggtgaaaaaaattatttttgagtgttctagacactatgagaggcatttttcttggatcatgtttttcattatacagctttatatagagagctaagaatcttaaaacagtatacttatatttttcccctattattctgtgtgctgttgttctcatacattttacatctatatatgctataaacccaacaatacaatgcatttgctttgaacaattatgtttgaaagcaactgaaaatacaaaaattagctagatgtggtggtgggtgcctgtartcccagctactcaggaggctgaggcgtgagaatagcttgaaccctggaggctgaggttgcagtgagccaagatcgtgccactgtgctccagctgggcaacagagcaaaactctgtctcaaaaaaaaaaaaaaaaaaaaaaaaagaaaagaaaacaacagaaaggaaaaaaaagaaaaataaagcaactaaaaaataaaaatgcattttatgtttatacttgacatgtttactgttgctttgtatagatttatatttttgtctggcatttttttccttctgcctaaagaacttcctttaatatttcttattatataatgcttctgatggtgaattgtatcaggtcttttttgtcttaaaacgtcttccttttttcttcatttttgaaaaatattttcccacctgggtatagaatacagatttacattttttggtcatcattgttgtcatccttatctttttcccactgttatataatgttctttcccctgccccccccccaacaccctggctgcttataaagctttttgtttttgtttttagctaattttattattttgcatcctagtgtacttctctttacatttattatccttgggttctgttggatctataggtttatgggtttcagcaaatttggaaagtttttagcacttattttaaaaaatatatttatgtttatcaccttytcttctcttctgagattctaattacacatataatagacarcttgacatggttgcacagcagggcttttttcttcttcttcatttttctttctctccatgcttatttttgaatagtttctattgaatgtcttcaaatttattgctcttctgcagtgtcgtatcctgttcaccccattcagtgtatttttaaatttagatgtcttagattatatctctagacgttgtatttggatcttttaaatattttttattttctcctcaccaagtttatatttccttgtataatttgagaatgtggagcttataatagctgtttggatatcctttttatgtcatttatttaattgctgggtctatttattgagttttcttctggtaatggttagtattttcctacatatttgcctgcctggtaatttttttactggatactgtatattgtaaaatttrcattgttacatggtagatttgtaaagagtgctcaattttggtctggcacctagttaaatcacttggaatcaatttgaaacttttgagtcttgcttttaatctttgtaggatgggtatagagcatcttacaatctagggctaatttaggccaactgctatggtgcagtacccttctgaggactctccttgatgctccatatatcatataaaaaggcctttcactctggctggtagaaacataaactcttctcagccttgtgctgtctctgagttgtttggtctackttctggcaattctttccccagcctcaagtagtttgctgtacacatgtgacagattagtagccaaagactcatgggaactcctctgcagatcctgtagcttattttctgcatactcccctcatctctccagtattctttcctgaaaataaggctacattggcctccccgaagtgcaatctttgtcttttcaactcagagaacgttgggctctgttgtgtttcctctacctggtctactggtctggaaactgcctctagacagtaagacagagcaattctacagctcacctaatctgtttccatactttcaggggtcatagacctgtgctgccyatcacccagtgtatgaaaactattgtttcgtatattttatctagtttctagatgtttaatatgggagaataaatctgstcctattatttcttgttgctagaatgcattatgatttttaaaaggttttttaggataaaacctttgaaatttatatatatatatttagtaatgtgaattcaacaacattgtattcaagaaggcctttgcaaggaagatatactagaagatcattccaaataatgaaagtgtcggatgataaagcattatattaaaatgtgataggaatggagragagagagcatatctaaaaaatattcttcaaggaaaaatggacagaatttgggaactgcttgatatgtgggatataagtggggaagaagtcacagatgactttaaggacattagtggaacagtgaaacaattaaaagrggagagttaaaaattgttaaattcttttcattcttttatattacatatcataggacatggtgacagaaatgtattctggcccttgtgtagcaatggagattcaacagaataatgctacaaagacatttcgagaattttgtggacctgctgatcctgtaagttattgtttaaaatattatcctagtttgtgttatctattcactattttaacaggtttaaaatttttcgtttgttcctttaagtaaataatgtaaaaatgaatataatatacaaagttttaattcaaaatggcacttcataaaatttatttttacataacattccaagaaagataattttttttgttaacttagtgacaatatagaataggcagaagcatttactatcgcattttctttttttctttcttcttgctaaattgtccaggtaaatacattttgcaagcttcataatagaaattatctaaggtattatatatcctttgacataggggggccataaataaagcttttataatacagtggcaacataccaatacataaataaatatgggcaataagacttatgtgaaatttggtattcactagtatacctttcagtttgctttgggttttcttcctaaagcaaactactttttcttggacatttaacagtgcatgtatgtatgtgtgtataggtgtaggggagtgacaagtagaagtagcattagaacgctatgataaagctctatgcaaatattagaaacttgataggattatgggaagtattaatgatttaaacactaaccttaatgtaaatgtactgtttcctgtattttactattatttataagtagtttattgaagatgagcagccaattcaatttaattttattcagggcattgtttattatttttaattttttttttttttagatggagtctcactstgttgcccagtgtagagtgcagcggtgcaatctcggctcactgcaacctccacctcccgggctctagtgattctcctgcctcagccatctgagtagctgggactacaggtgtgtgccaccccgcctggctaatcttttgtatttttagtagagacagggttttatcctgttggccaggctggtcttgaactcctgacctcaggtgatcagcctgtctcggcctcccaaagtgttgagattacaggcatgagccgctatgcccggccatttattgaacacccttagatgtaagacaataaatccacagcatctattaagaaatcatcttgtgtcaaagtgctgctagattaagcccagtaggggagaacaacactcctgttgtcagtgatctaaaagtatatacataaagatcttttagaacatttacagtgccacatgcaaataaggatattgttatttcagtaaaatccaaatgttggattgtgtagcaacagagcagttaatatgacctgaaagtagttaagaaaacttaaaggaagagagatataagcaggggtatgaaagacaaattagggcacaaagagaatgagaaaagatctaaagcatgtgcaaaaacaccaatgaaggaatttgcaaatttactgtggtatacagcaagaatattttcttgacttcagtgggaaatacatagctggaagcacaaggaaatacattttcttagatagaggaaatatggtagagaattctggtagagatgggtgtgattttagccttagaagccaggataaaaattgtaattctatttaatttgaatcccatatcataggaaattggaattccttgtatgcagcttaattttgactatactgaattgttactttgatgcaactaggtcaaactaaattggaagagattaaagtcagaggctctagaaatagaaagagacagacctgatgacatcaatagagaaagtcggcaggacctcctttatatcttttcagggagaaagaatagatacttaaataacacatgtggttgtgatagagtaatgattacaaggtgactctgttgcaaaggccattgagagaaattggtaatgatgctgtttattgaaaattaattataataaattaggaagggattgctttttggctagatgagtaaaggtaacagtttttgccatttttaacattttaaatttctgatttctgtttgatgggcaagaggggtttttgtactttttttttttttttttttttttgkgacggagtctcgctctgtcgcccaggccggactgcggactgcagtggcgcaatctcggctcactgcaagctccgcttcccgggttcacgccattctcctgcctcagcctcccgagtagctgggactacaggcgcccgccacygcgcccggctaattttttgtatttttagtagagacggggtttcaccttgttagccaggatggtctcgatctcctgacctcatgatccacccgcctcggcctcccaaagtgctgggattacakgystgagccaccgtgcccggcctgtacttttttttaaggtaagtaaaactgtgagtgatcagcttgacctaacaaacagaagtaaattaaagagataaaaactaaaacaaaaaaggaaagaaataagatgattcattcttttgttctctcatttattcaataaatatttattgagcccatgtcagtatttgtgaatatatagaagcccaggctgggcatggtagcacacacctgtaatcccagcattttgggaggataaggcaggaagattgcttgaggccaggagttggagacctgccttggcaatatagtgagaccctattgctataaaattacacgtatatatgtgtgtgtgtgtgtgtgtgtgtgtgkgtgtatacacacataattatatatttttttctatctttatttttgttatatatatatattatgtaataaagttgatataatataagcctcaaagatcttagcctgtgagtaaacaactgtaagtggctaatttccatgcaatatggcaattgcattgttagatatttgcgggtactctaggaacccagaaatatagcacttagctcagcctgggaatgtgtgacacagtggtttgaatgtgtccacgaaaagttcatgtgttggaaacttaatccccatgtgtatatgttgatggtatttggaagtggggcctttgggaggtaataggattagataaggtcatcatggtgaggcccacatggtgagactagtggctttatgagaagaggaagggagacctgagctgacatgcacactcttgccctatcaccatgtgatatcatgcatcatgttatgacacagtaaggtcttcaccaaatgctagtgccgtgctctcagaccttccagccttcagaacttagttatttcttacagaaataacttttaaaaaatattttcaaatgctctcacccagcagaaatacatttattttctccataaattgcctagtctcagatattgtagcaaaagaaaatggactaagatatgtgacaaatgtcaggggagacatggcttctgagctgaattgtaaggaattagaacttatcttagtgatgaaggtggcaaatgatatggttaaagttttgaatgcctaaaacaacaacactttggggctacagcaagctctttattactgctggaactaatgttcagcgcaaggaatgataaaggatggggtcattcgggaggagctggggagtgagcaggttcacgatcatagaaagaagagtctcgaaaagaaaacaatgctgattcccattttttttctaagtatttattcaaggaacatttactgagtgaatagtatgtgcaaggctcactcctgggtcctattgctggggcataaaaaagatgactagaatacgttatatttccttaaggacctcgtaacctcatgatagctcaatcttgaaactctttcagggccctgaatcttgtctcattaagtatggatggcattactctactgtgtttttttggttcattttagttgtctataagttcctcatagcattatagaaagttgcaccacagggattttaaaatttggaactgatttaacgtgtaaaatgttaacagtggttatctttaggaggtggaaatatgataatgtttcagttctgttttccyatattttgcaaaatttctttaaagtacttatattacttttataataacaaaaatactttttatcttaaaacctgaaagttaatgaacttttgaatgaggaggcatatacttctaagaactgattatcttgtgtctcagactcctgagttacattctgtttctaagtggagatccaggatgtcaggcaggactgtatgcctttgatgggggttttcaaatcagaagaaatactatagtagttacaatcaagctatgttttgaggacaataaaatggctctttccctttggtctcagaatttcaaaatccatttgattccttttctccattcttttctttcccccttttctctccacctcgccaacaaatggatattgaatgcttactgcatgccagtaactgctaggtgctactaagtttatattaatgatcaaaccaatacaggtttgttttttgaagaatgtatgatctagctctaggaagagatagaattgataattaaatagtaatctcaccttaaagtgcagatgtgccagtctattcatgtattatattatcttaaaataatttagaaattcatttcttcattgcctagtcactcccatatctaaagaaagacccttggtgatgagatgtgcaaatataattagtgcttggaagatggccaggtacctaatggccatgcaataaatatttgatgaactaatgaataaactggctatattatatatatatacctaacacctggtactaacttattatttaaatattttttctatcgaaatgggtcctgcttcttacaaattattttctaagatatagagctrttttataaagtgattcacaagaaagttcagcctaacagtgaccattaaatcagtttgtaactatatatgttgcagattgacatgatttcatcattgatgtctgtgcttttggcatattcttccccttccagttcttatagctggaaggaatgctcattatgtattaacaaaatttttttcggtctctctagaagtggtgtccaaagaggagagggtgcacaagacaattcattagggaggggggaaatattagacttgcaatttctatttactatctacaaagtaataatgagattaagttttaataaaatataatgtgtggactgataagactgcatttctataatttatttaaaatatctgcttaaagccctgcagtggctccctattaccttccataggaaggctttcaaagtcctccatgaaacagccattcctacttctagcctcatttcttgctgcattttgtgcctttcctctgtcctctgcatttgcactttaccctccactaacgtcaaactggaccgagcagggtggttccacctgttatcccagcactttggaaggctgaggtaggcagatcacttgaggtcaggrgttcaagatcagcctggccaacatggcgaaaccccatctctgctaaaagcataaaaattagccaggcatggtggcgggcacctgtaatcctaactactcaggaggcagaggcrggagaattgcttgaacccgggaggtggaggttgcagtgagytgagattgcaccactgcactccagcttggacaaaaaagtgatactctctctgtctaaagaaaaaaaaattatatattatatcacactatttattcttccttaataaaccagtgtctttcttctttcttctgtttctatatccttctcttattgtcttattgacagagaaacttcctcagctattgaaactttgcccaagcacctgagaattaaatattggtcccaccaccctcagacagaatggctacttcctcttttgtggccttattttaccctatatatactatttttatatcacctgttaaattttactgtacttatttatttaccgtctgtctacttcctgaaattgttccccaagatcatgttttattcatcttagtatttctagcatgtagcagagtacctcgaatgtggaaaacacttgataaatagttgatggtggaacaaatgaatggaagaatacatctagagtcatgtactggacaaatgaatagatttttcgaaatagaatatggtcctattaaagaaaaaaagtccaggatttcccccagacttttgaatttgccttgttttcaccactcatattgtagtatgacatgatatgtaaaatattacagatctgttaaatatatatgtataaatgtgtgtatatatgtatatattcatatatatacatatatgaatatccaaaatctattaaacaggaaatctcagaagaagagagcatccacacctgaagacagcttagcgtaagatgaggaaggttcagacttggaaagacaacctagtatggggttttagagcccaggtggggtaagcatggtttccctgtagaaggaatggcctggcatagggtgcccratcttatgcacagagaggagggcctgtgatcctggggagcagcctggcatggggagtcagaacctgagtgaggtgaagagagcattcacacttggaggcagcccagtgccagatgggcattgatacagaagggagatctggcctggtgtgtcagagcctgattggcatgaccaaggcatccaggtgagaggcatcgcctgggtcaggatattgaagcctgtgtgagatgagaagagcatcttcatggggaatagatgatgacagatatgggaggttggttatatgtggtagaattcatcaaataactagataaattaaagacaataggagccagatttctctcagaggagagatatacaaatacagaaaatgagaaaactgcaatgaactttgtgttcgaattgaaattggagatatgatatgaaggcatggctttcaatatacacagattaaatgtagaaataawagatataaatgtgtgtatgtgtacacactcagaaaaatacatctctctctctctctctmtmtatatatatatatgcatgtattcccatacacatattccatagcaaagaacatacctagtttccagatcttgacttctaaataccattcttcactctacgaaatgaagatcctcagagaagtgaaatggcaaattccagaactaggggaagcaaaatacaatatgatcttggaaaatctttttatgccaaagtaatggtgacatatcaataggacacagaagccagcttgaaggggttccactagttgaatcgaaaccaatttgagcatctaagtaaatcatgatagcaacacgttataatctattcattgttactaaaataggaaaccaagactttagacaaatagtaattaattaatcaaaattttgtttaaaatgggatatatatagtttcaaaatcccttcccacaaaatatttattaattaaaaaaaaacccttaacattatagttaataatgttaacataggctggcagacaataagaaatattaaaaaaatgtagtgataaaagtgaatatcatagattggaggaaaattaaatcatataccacaagataggatgaaataaaaagaatgtaacattatttctgtgatattcctgccaaatatttataactgaattcaattatacagaaatatgacatgcccatggcctctaatctttagaaatataaaggtcacaaagttgaataaagactgaggaactgttcaggactgaaaaacactgaagagacatgatatctaaatgsagcatgtgattccaagtcaggatactttggccataaatgacattattgagataattagtgaaacctcaccagggtctaagtatgaagactgtattgtggttatataggaggctgtagttgttggtaagaaatataaactaaaatatttggaggtagtggagcatcagrttagcaacttatttttgaacgattcatagcaaaaacaaattatctgtagtctattagtaacttttctataaatttacagttctttcaaaataaaacttaaaatgtcaagtttttacaactcaaaaataagtaaataaataaaatgtcattgtctgtgaagtcaaggccagctccactgaaaatgtgaaagaaatagattatattgtttagctccttcctctcctcgccatagtcctgaggtctcagccckgggttcctctattgtcttaacagaacaaagtctctaagcaggtctggtcaatttggtcacactgagacacaaattactattcagaatcaatatattaccatttccttggggttttttccttttcctttactttttaaacagatttcattatttttattttaaaagaaaatttcaactttggaattttagtttccaggaagctaagaaaagctgacttacaggacttcatagttgcccttcaatcattcatgcattcataaatgtttgagtgcctactgtgtgccaggcagtattctaggcaccaaggatacaccagtgaacaaaacaaatgagaaagtgagagagacagagagataaaatctcctcacagggcaccaagcttacattctagytggagacagataataaacaaataaaaaatagaatacatagtatttcatatgatggaaaatgaagaaaggaagcaacctgagttaaggaagtgtagataggatttgattataagttggagtcatcagagaagggctcactaagaaagtgatatttaagaaaacatttagctagggacagtggctcatgcttgtaatcccagcactttggaaggttgaggtgggaggattgtttgaggscaggagttcaagactagcctggtcaatatagmaagaccctgtctctatttaaaaacaaacaaacaaacaaaaataaaacaaacaaacaacaacaacagaccagactgggcaacaaggtaaaacctcatctctacaaaaaatacaaaagttgccaggcatggtggcacatgsctgtaataggttaaggctgcagtgagccatgatcgcaccactgcactccagcctgactgacagagtgagactctgtctcaaaaaaatttgggtgtgtgcacatgtgtgttcaagtttatgtgtatataaatatatataaatatatttatatattctactggcacatatactacctggcacacagtatataggtatacaaatatatttccatatatttgtatgcatataaagacttgaatatgtataaatatatgtaaacatatatacatataaagctcttgaaaaagccagccatgctgatttctcagtgaagagcatcctaggcagaaggaacagccagtgcaaaggccttgggagaggagcttgcttgaggtaatctagaaacaccatgtaatgagcaaggtggaagataaggtcagagagatgagggacagggcagatctcataggtccttataatgactttagcttttactctaactgggaccgtaagttattgaagagtttggagagaagagtgacataatttgattttaaaagaatcattgttactagtgtattgagaatagtctaaagacaagagtggaagttataatccaggtacaagatgatggtgagttggaccaggatggtggtaatagacatggtgagaaatagtcgggtgttatttaccatgtgtttaccttttttctctttatcttaagtggatgagtagatgaaggttaaattgatgaaatagaaaaagggaaatggaagaatccttagttctacggagtagaaatggaataaaacagagttctctctactctattatgattttatctcactctaytgatgagaaaatggaaggtgaattcatattcctgcctgtcaatttagtacataacaacgcttagagaaggcatttatacctaaccagagataacaggcatatccacagattaacatgtgccaagcatttctattactagtttatagtaaaagaaacatttttcttaggtaatcaacttaatttattttataagcattttgttaactttagcaaatgtaaaaataatttaaaaatacattttyaggaaagtattaagtggtttaaatgcattttaacataagaaaattgaaagtaatccaagtacagtgagtatatataaaaaaagttatgtgttagtaatttattttcttygaagtgatttgcatgcaataacttgtaatacctattaagtgattcagtgattacaaaataatcctggagaaaatgatcatgtgtttaatgaagaaacatttgtctarccgagaaaaagaaagaaaaccctcatctcaatgtcgtatattagttggatgaccaacaccgttcccaatttggccaggactgtcacaggtttcacactgaaagaccagcatcctgagaaatcccccaatcccaggaaaagtgggatggttaatcactctaaataatttaccttttaattgtatacctcttaaaattgaactgtaataaagtttatttatattcacttataatttttaaatagatgttatattaagttataaaagcttagaagtacagttaaactacttccacccacatccacaaaaggtcaattagatttattttttaattaacttttcatttgctttataagttatcctttcattggaattatttacaggtagaggtattaagtacaggcccacttctcaaaacaacatatgggttgaaagctaaagtatagaggttggggaaaacatgcgtaactgaaatgtaagtccgtgttcaaactcatgatttgtgaaaatctttcatgaaggaggcaaaccaaaatgataaaaaaatgaggaaaaagctgtcttggaaggtctccttagccttccttccatcaagtttctgtagcttcttcatcatataaggtatattggaaygcatttcagaataggagatttagagtaaatatttatttatttcaactgtsattatctattcataaattcaggcatttattaaacacttgctatgaacctgatatcatgtttatttattggggattcaaagaggagttgagacccttaagaagctctcagtatactgggagaatcagacaaataaattgcaataatgtattgtaggctgggtacagtgacacatacctatagtcccagctactttagatgctgaggtgtaaggatcacttgagctcaggagctcgagactagcctgggcaacacagtgagatcctatctcaagtcataataattataataagatatgataaaggttatcttagtgagaagtacagaatgctcaggaaatacagccatcctctggtatcttgggggcttggttccagtaccccctcagacaccaaaatctgmgcatagttaagtcccttatataaaatggtatrgtatttgcgtggaacctattcacatccagattactattactacttaatacaatgcctacacatcacttaatttgtgtggattcaatgtagtacttagcacatggcaaattcaagttttgctttttgcaactttgtacaatttttttatttttccaaatatttttgatccgtggttkgttgactttgcagatgcattaactcatggatatggaggactgattttactctgaaggaacccaacccagtctgtgttgagtggggtggggctgaggcctagggaataggctattcagaaaaggcttccctgaggaaatgatgcctggagctataatttaaagaaggagttaaatttggcttggcaaagaaggaaagttccagagaaatgaagagctcctacttataggaaattaaagctcctcccatctgccttcaagtttccctaaggaaagtctggatcttcagcaagaagtttcacccttataggagaaaaagttgtatttaagatccagggcatttatcttaaggatggagttgcattcaaaagtggtatctcacgtcatctgaaatcttagtctcttatttttgtgttttttcctacttccagtggaattaatgataaacactgagattacttctaatgggaatgggtattctctgcaaaggatttttcctctttcccagggctactgtagatgaagacttttggcaggctgcattgattggcattgggctatattmctaaaaaaaaaaaaaaaaaaaaaaaattcaaaattggaaaaattttttaaatgccttaacaggaaatactattattttttctttgctttgctttgtttgtttgtttttctgtttttctgagacagggttttggtctatcacccaggctggactgcagtggcagcctgaatctccccatctcaagcaatcctcccatctcagcatcccgagtagctgggactataggcatgtgctacatggctggctaagttttaaaatattttgtagagaggaggtaccaccatgttgcccaggctggtctcctgagttcaagtgatcctcctgcctcagtatccggtgtgctaggattacaagcatgagtcactgcacctggtccagtagttcttttcaagcaggaaaagttttgtatagagaaatgtaggcaaagtcatttaggatacagagggaagtaggtgaggctctaggggaataagttgtactacggtaagaaactaaaagtgtagctaaactgttctacataagaaataaaagggaaaaaagcagttaagccaccagcagaggctgagcctggggaaagagaatttagcatctgggtgggtgaaggaattttcagaacataatttctaaaatttaagtctgagatatttgtgtttctggggcataaatcctctatatcccaaaacttaaggaaatttagtacatattaaagctttgggtggtggtggtgtgggtagaaaagggaagtataaatgtgtaacacatttaccactactgctggtgcctagaggaaggagtggcatcatattgaaaagyatagtgcagcttatagtgctgctttaagctgtggcaggtgaggaagtaaacagtgaagccgcaaccagcacaaaaaggctacaccatgcaattgattcaaatgtacgtaacagtcttgttttcctaaatatatcaaaggggagaaggcaatggggtaaatacttttcctttctttgacgtttttcttatatgactttttatcctactgttgtgttaagttctgagactaaaggaatacaatggaaggggggctgcaaatagaacagattttacaatttggatagttttcagtcagcactatccaatacgaatgtaatacaagctacatataatgtaatacatttgaaattttctagtagccacatcaaagagaaacagatggcattaattttaacaatatagttaatttaatatatccaaaatattttaaggatataatcaatacaaaaattattaatggaatattttataatctttttccttttttgcactaaacctttgaagtctgtcatgcattttacacttggagtgcatcccaattctaactagccaaatatcaaatgcttaatagccacatgtggctaccatattggacagtgaaagtcgagaccatttcaacagacattgcttaggaatatagaagtcttctccattatttgttattattggagtgctatacttgggtttgttgtcagaataaacaataaagtataatattgcttagttttgatttctttgcatatatttctctctggtttattattttcaactttattgacaaaattgacaaatataactataaaaatttaaggtgtacaaatgatgatttgatatacatatattgtgaaatggttatcacagtcaagttatttagtacatccatcacctcacagttacaacttttgtgtatgtggtgaggacattgaagagctactctctacaaaaacaaaaacaaaaaaaatctgttattcttctgcttttatatcacaacagtcaacagaaaagacctctgtgacttttggtcaccaagaagtgtgtggggatttttccctaccaacaaccaatcaattctgtagcggattcttcaacagacactagctagttgccctctaattcaattcaattcttacattatctacctagagatcccataggttgagggttcaattccacaagactgcccccacttcctgtgctaattgcaattcccagattgttttgcttgtgcttttactgacttgctataaataaattggagtttccacaacccccactttgagtttgattaatttgctagagcaactcacagaactaagggaaacacgtttactgctttattataaaggatattacaaaggatataaagatgcaaaggaaatgtataagaaggggtgtggagtttccatgctgtctctgggtgcaccaccctttagggactttcatttgctcagctatctggaagctctctgaaccctgtccttttgtatttttatgaargtctcatttcatagtcatggttggttaaattattggccactgatgattggctttaaccttcagcttctcttccctccsgaaaagttaggaagtagagctgaaagtcccttctgatcatacattgatctttctggtgaacagctctcattctgaagctacctgggtggtgtcagccatcagtmaactcattagcatacaaaaaggtacttatcactttgaagattccaaagattctaggagttgtatcccaggactaagaccaaatgtgtttagacaaagatcaaatgtatatttcacaatatcacaactcttttagcaaatttcaggtacagtatgtatgctctactttagattcccagaagttagaacttttttatcttatacctgaaagtttatacccttgaccatcatctctccatttcttccatctgccaagccctggcaactactattctactctcaatttctatgaatttgacttgtttagattgcacacataggtgagatcatttagtacttgtctttctctgacttatttcacttagcatagtgtcctccatgttcatattgtcacaaatggcaggatttccttctttttatgatttaataatattctcttgtatatgtataccacattttctttaaccattcatcacttatccattcatctgccttagcctacctttaaaactaactgttttctggcttcccaggtgggccttgctttctaaagctcaaataagatgctaagctagtatttagcaaccttgaaaaaatgagtcacytctccttttttttttgtttcattttgacattagtacctgtcacttctctttacaacaaaataaataataatagaggtaggaggcagagaaactctaggcagacaggggtgagtccctggtgaagcctcaccttcaagccaaaaaacctgaaacccgtggcccaaagtgagaacttctatccctatttgcctggtctttcctgattggttctttctgaataatgtctttttwcaaattgaatgttgcctttttcaaaactacctatggcttaccctgccccccatcctgtgcctataaagaccccagactcagccagtagaggggagaagcagctggatatctagaagaggtgagttgacttcagagatgatggctggatgtcagaaggaggcagcttgacttcaaggagagagggagagaggcaacctgacttcaggggagagatctgcccttcccttcccctccagctcccctttccactgagagctactttcattgctcagtgaaattatccgcattcaccatccttcaattcatttgtgtgacttcattcttcttgggcaccagacaagaattcggggcccaccaagtgtgaatacccaaaaaggctgtcacactggccctttgccctcactggcggagggcagctgccccacataaggcaaagggcccactgagctggtaacacactgctgtccacaggtggtggagctaagagagcattgtaacacaccctctggggtcttggcattgcaggcacccccacttggatgctgccacagggcctgcatggagtttgcttctgccggtgccaaagtggccagctggttcctgcatttgctcacctacgcatgccctcccacaaggcattgagcatggcaggctgagtaaatggggcaccgctgtcatgggtctcatgaagggatcaagaaaatatcctgcattatcaatacctttgtttcttgacatggtcctggagaaagttacaaagcctttttcttttctctttcctctctttttaaataaagttatcctaagaagcaaattataccagatgtttagtgtcttctagtcagaaaatgtttgatgttcttatgagaatttaacaataacttggacctattatcattttttgaaatggcaaaaattcaaacaaaagccttcatggttttgaaatcaataaaggaactcaggggactcagaagagccacacgggttctatagtcatgtttcaaacaagrctgttcccttcttttcttcagcaggctcagagagcaggttaggaaaggaaagaccagtcttttcaaaggggctaacaatggagatcaatattgagacttttttcttggatgtctactcatctaattttaatccatgatataagctccctttccaaaccacttgcttctaacatgtcttcctacgttttatcttgaagagcackttctcattctttatacttggtttgtcccctaaactacaaagcctgaagaggactaaggttttcctttctcataattcacttttgaaattccaagatcagtataattaactgtatagatcttcaaaagrtatgcttgtacatactagaaagcttactgctgtggacatctgtgggctcattaccaccaatcaatatgtattacaaagagaatgaatgtatagcactgggtaatctggagcacctattaactggaaattagcttaacaagcttacaccctgtatgtgtgtgtatgtktgtgtgtatatatatatatatttatttatttattttatttttatwttttttcccaagattattgtttttatgagacagctcaactgctgtctgaccaggatgggtctcttttggccagagctaaacactgacccaaatctctttggacaatcaaccagctaaagaccaggaaaatttttcagttcttgttctcttccttcctttagcatttggcatgtttaaagattagttggttataattctgtacttaagaaagacaaaaaagagaaaaaattaatggggagtgatacacaggaaagatgcctatttcatatatgttcagccttattgatcagggaaatgcatattaaaggggaataatacaactttttaaaccagtgaggttggcaaaatttaaaaaaatagataaaatccagcattggcaaccatgtggtggaagaggtactcgaggctgtagtactatgggtgagatttttttttttactcctgtgcagttcattctcattatttacagtagttawgttctataaagttaccatgaacactgacttggtgaatactgaactattgttcctaggagaaatacagagttaggttcctgtgagcctgtggtcacaacawatatattaatgatcaatatataaccttgttttgtgtgtatttctgtttaaagacactaaataaatatcgttgatctagtaacattgaactcatggccagcatgactgtaactcatgcctgaatgatgcctgcattacatatatattttctttataaggcacatcacagcactgttatacttaggactcttgacagctcttcggcactatgctcaggaactgttttaaatagtaaagtcaccaacagaaaatacaaaaatgcaaaaaatgtaacaccaagtacactgcaaaaaggacacctatagccaggtatagtggctcacacctataatcccagcaacttgggaggatgaggtgggaggatcacttgaagccaggagtttgagaccaacttgtgtaacatagtgagaccctgtctctaaaaatatttaaaacgaaaacaaaaacaaaaaaaccttagctgggcatgatggcctgtgcctgtagtcctagctactcagtactcaagaggctaagatggaagaatcacttgagcccaggacttaaaggctgcagtgggccatgacagtaccactacactccagctagggcaacagagcaagaccttgacttaaaaaaaaaaaaaaaaaaaargacatttgttttaaagtgtgaagtgtgagagttaaaataagaaggcagagagtgtcaccttgttcaccctcatttgggagtactcatgagtactcatttgagtgactcaaatttttgctgctctgcacatgtctaccaatggccatacatgtgctattaatattgattttggggttacaaataaatttcagtgagtaggtaaattcacaaacatggaatccacaaacagtggggattgactatattttctatgttttttaacaatgaatttaaatgactttttwaaaagtatttaatagcaatttattaaataatttattaagtaaagttattaagtaaaacaaatttattaagtaaatagcaaagtaaatagcaactaatttttaaaataaatattttcatttaataaaatattctggctaaagaaaagaatttctcttgaagaggaggtggctgaaaggggtttaatacaattagtaaaaattacatactagaaaatacttagatttcagaataactgtgtgtcttggatttcttttgctttggtgttaaataatgctcaatccccaaatttgttgaaaataattactctctctgtgaatataaaaagaagaaacattgcaacctagtaagagagtaacaaacagcagttgacattaaactactgtataaaacaatattgtatcatatttttctatgaaaattaaaattttattcaaatataatagtattgaatcaacggcaatcttttcctgaaaaagcagaagatgtaattcaaatttacaagtcagaggtttggaattttatatatccttttcttgtaatgcgtggattttttaactaaattttttaaatgaagatttttctcttttctggttgttcctgccattaagtatcataactgggattmaaatcttcacattgttgctctcaacttcatgcctttaaccattatatcatattgttttattacatgttcrtgatcctatcacaatattaccagggcataaaacatgtgcaaatctaatgacttttgaaaattaaatagaaaagtattctctgttaagttttaaaagtagagattgcataatattttttccaggtgatttagctgtaagctgatccaaaagcaacaagatagatgacagtttttaccttatatttcctatatcatgattacttgtattatggatagaaagtcaaaacccagagaaacgttaactgattggattaaaggcaaaaagaactttatactatctcagcctcctaggtatgacatactgtaaatataggaacaaaataatgttttcccctataaaaccatttaaacagcatttttaacagatacatgataaatagtgctgtggtaaattattttacaaaaatgtttattatgtttccagatttattttaaatattacttcatcatatagttcaccaaatatggtaattgtatcctctcatacagtcttccaagcaaaacattatgctttgataaactggaatttaaaaaagaaagggaaaacatgagataygttctttgatctgaaagaactaatgatctggagctgaactggagcttgcaaaagaaaaattaaaaaaaaaaagagcttatgatctatatgagggattcaatagactatggtaggaatatgatagtcccgtgacctggaatatacctaaaagtcttatttaatgtggcctgcaaacaaaggggaaggaagccccgatgaggccaggggaatgaagcagaaacgggagagaacgactggggcagggtagctgataattgttcagtgtgtgattctctagaggtattatattgcctctgattacagaacctcctccccatcccctgctttcttttttcccyattttatttgtgattatgacrtaactggcaaatttgtagtaactgtcattttgtagtaacatattgttcttgttttggcacattgcatttacagtgtactcctttattctgatggagtgtgtgtgtgtgtgtgkatttaaatattatgaatgatttgttctagagcatctgaaactaccacagaaggactatctaaacaacaaacttagaacatagtttctagatgaataccaatgttccaacccccacggggcaccaacacatctgatacagaattattttgccacgataatgtttactattacctcacttaggaaccaagcattgggatgctctctaggttctaggttgacacatacatttctggaatggaggcttcagtctcaagcaataattggaataatatcaacaatactttcatatattcaggcatatcttctagtgtagtggagaatatagaaaagtcttaggaataaaactctcagagattccctrtggtatacagacttgggtaaactagaaataaatttcactttaagggatttttgcccttttacctccatttttgttagattgagatttactcagttttatttgactaaaattattaaatacactgtgggtgttgggtattgaggactgagcatgatagacattggctctgtccacatggaatttatagtctagtgaggaatattgttattaaacaaatgattacatagttgtatatattacaactatgccaagtcttttagaagaatctgataattgtgcaagaaattatattaataacaggaggctctagcttagctgaagtagaggaattcctgaaagattttcatttattctgaagcctgtagaggccctaaatctggggagaacctagcatattctaggaattcaaggaagtctartttggctctagcctacaatgcaaagaggaaagtagcctacaaggtaactaaagagattgcttaggccagagtatgaaggccacattaactagtttatatttactctgagtgcaacaggaagctccatggaaaatttaaataaagaattaatgacatctagrttgtatttttaaaaagctctgtggctatgatgtggaaaatttgttggaggaaaataaaggaaatcggactagaaataatgggaccttgggcttggatggtaacagtggaaggttttgaaatatattttggaaggagaactggaagaacttggtaatttggacatgggcacaagcaagtacatagtttatttactatagatgaagaaattcttgatagaaatgtttgttttattttggaatatatacagtaacagtaattaaaacaccaaagcctttattcrttgtttcaatgtttctctggagcttttccagagatktaaatatcacgtacatataaatagcttttactctcaaaagcaggaggtagaaatagcaaaaatgcatgcaatcttgaatttaaactattttaactttggcatctattaggttttagtaaatttggaaccccctagtctttgatgaaaaaggtcttgagtatgtctggttttgttcttaaagtagtggtgtggcaataatgaggtcttatgctgctccttcagtgttaattttaattttgtagattttttaaaaactcaagttttgtaaaaacaaaaaatgctatatttcaccctactataaccagcagatgttgctttcttattagttctgctgtggagattcatgtgtggatggaattaattgactaaaatctaaaaacagatggactatggaaacacattctttataaccttacaggatcgaaatccaaccaatatatatgtatttttccaaacctgtaaatctatggatctttgtattactttattatcacccataaacttgatctaagtaattaaaggcaacatttagagactttttgggattatttccagttttggcctttaagccttcctactaattaattaacataatttacttctaggaattgtgacacttgctgagatgttacacttattactacacagaatgcaaatgaaatggctctttgaattattaacactataatctctactttcagagctacagaaatgattagaatagaaatatacctttcttctggaaagttttactattattttggtttaaacataagtatgtatgtagatttccactggggagttagctgttaacagccattttttctttgttatccttttcactgttaaacttacttcaaaaggcttctaaaggttcctgacatgttacagagataatatacacagtaaagttggcctgaagtatttttgtctctgatttattcatttattcagtcagccaacccaccaaccactaaccaaccaaacatttacagactttcaaagtgcatatgaagtattaatagttcttagtactagcaatgaaaacatgaacaagacacctttgctgagccagaggaatttatgtcctagttgaagaaaagaattgtattgtcaataattgcaataaagtcttataattgcaataatagacatatattaaatggaaaaaaatttacgatcaaataagattgagaaatactggtttaaatgaagttaagcagatttgtgtactaaaggactctagaacatgtcaaatgctgacatgcattgtgaatctccaaaagagggcatctggtatgaagtattttccaattttgttgccaaaagttacagatgacaaccaggataaggagaaattcctgaccataattcttgctaagctgctttcagggaccttgaagagaacataaagaactttgaaacatagcttttactttttagggaagagaaaaaagataaacaggactccataaatctagccttcattattttgttttctttatttccagactaytcactccagcaccctcccttccccaccgcatcagatmtttgcactgatttggaggcttctatgctttcctgcttttgaatttctcatcaatgttagaaagtaacattgtcctgttattaaagcttattcatactgatacaccaaaactcataaatayttgcatttttcagactattttctagttataaggtgaaaaagattgcctttagttaaaggaatttggaaaaaaatcattttgttttgtttttctttgttgtctctttttttccttctgcttcygtgatagtgaaggtgtagttaattttgatcctcttcccccttggrtgtaccctgagactaatcctagagcaaggttcttatcctgatgtctacagacccctatggcttttgggaatagaattcaggggtgctctagtttggtttgcttgactcccccaaatctcatattgaaatgtgattctcagcrttggaggtagggcctagtgggaggcatttgggtcctgggggcagatccctcatgaatggcttggtggcatcctcagggtaatgactgagttctcactgtgttagtttccttgagaactgtytgttaaaaagagcctggcatcgttcccttcttcctcttgcttccacccttaccctgtgatctctgcatgccrcttccccttcaccttccaccatgagtagaaacagcctgaggccctcatcagaagcagatgctggtaccatgcttctggtatagcctgcagaaccatgagccaaataaacctcttttccttataaattacctatcctcagatgtttctttatagcaatgcaaacggactaagacaaggggtctgtgaacttggatgagaaaaaaagaatcgtgtttattttcactaatatctgactgaatattagaattccataaatataaacaactaatcactgttatagctatgtgttaatatagtagttaacttagcaaccaccagaaattgcaaacattttcacattgcattacaattgtacatatcttaaaacatcatttacagtcattgctattttaaaattataagagttattaaatcagctgctacattttaataaatatgtacattatatcacaaaatataaaatattctgataattttattttagagtaattaatttcctgcaattctatgtattttatgcatttaaaaacattgctttgagaagggttcataggctccatcaggctgccaaaagaggttcttaactttgtctttgcataagacaaaattatgaaccctagtcctaaaggaagatacacaaaggtcaaataagaatccctggagttgaagaccaagcattaacccaagacagcttcttcctttttattccttgtcctagtattaatcctccctaccctcygtgttccaggcctctgaggtattcctccttgtaagacttgtagccatccattctttttcagtctctcaacatcagctccaacttccatatagatatttgaattaattaattagttaattcatcaaatattttctggggacttactacatactaagtactattctagatacagtagaratacagtggcaaaagracaaacaataaaatctatcttcacagaggacgttctagttggggggaaacagatcaggagcggaataaataagtaaaatatataatatgatggtaagtgtgtaggggaaaayaaagcaggggagggaaatagggttttccagaaaagggagggatttatagtttttaagtagaatggacagagaaggctgcatttaaaagttaacattggatacagacttgaaggagatgagggtgacagtcacctagcaatccaggctggaggaacarcaagtgccaaagctggagtatgcttagtatattggaagaagtcaggaggacagtgtggccagagtggagtgaatgtgtgaggtgaggtcaaagagatacaggatgggaaagaagatcacatagagcgtggaaagctgctgaaaatactttagcttttactctgagtaagaaggggaccattgcagagtttgagcagaggaccaacataacctaacrtgttttaacacaataatgctggcttccatgtggtgaatagacaaagtggggccggagcagaagcaggaagaatgaataatgaatgccagtacttgacatgtggtgctttgcagtgggctctagagccaggccgcctgagattcttcatctgtaaaatataatctgtttcttcaccaataaaacggaaaaagaataagccggttgtgaggattatatcagctaatatgggcaaacttcttagaatattccataaatatggatttttcttacttttctcagagcctaggatacatgctgtgagggtaccacacaactatttgacacataatgggcaagatgggaagacttgaatgagttttgggcaaccttgttcctatgtcttgattttaggagagtaattgaggaaaggaagcaccagatgttgcctttagatctggaaccttattcttttcatacatatatgtgatgatggtgctaaagctcaaattacataagatcatgggaaaacaattgacactgactctgattatagaaagtagtgaattagtaaatgaaaaaactaaaagtgtggttataatagtaagtattgttttttaagtaaactgcaacattacattgtcagtttatcctaaagaacaataacataagcatactattttgctagactaattattagtgtgacaatagtaaatatatatttataggcttcctgctttggtcttatagaataatcttatagttgatcaaaaaattagatggaaaactgttttcagtatgagatgttgggccatccttgttttatgaccttcaagaaagaaaagaaacttccaatggaattacaccatctgtaaagatactaagcttgcccaaagaacacagatagcaaatttgagagctttgataagagttcaaaattgaataaaattgagtcaataattatttaytgaaatgtagtggtagtcaaggcattactagattttgcttgcaaactgttgtaagaaaagataagtttacagacaatggcaaaataaatctgacagtaagataaatgctttaagagagatacaggttgtgaataagattttcaaggaaagtgcttacatctctggagtaagtgcgtaaggtttccgagagagtgcgacatctgaaagaaggtgaaccctgtggaatacttagaatttctataatctgamatgggaatctgtacttttaaaatgagagattatgtcacataggcattgagattgcawggctgagtaatttagtttgaagcattggatatagtataatagtagacaataaagctagagagatattagcatcataatgagtccaaggctgggaattttgttacttaataaacatgaaaaaccattgaaggttactgacaaagtagcactgtcatgtgatcaaagtaagagttatgtgacaatatctagtatggattgagtgaaagtttaggaggagaggcagccagtactgaggcatttgagaaataaaaataaaatcccaagctccctactgactgaacagatccctcacttggacaaggggaccccagagaaaccttaaaagctaaattccctggcctggtgtggtgactcactcctgcaatcccagcactttgggatgctaaggtgggaggactgcttgaagccaggagttcaagacaaaactgggcaacattgtgagatcttgtcttttcaaaaactraaaaattaaccaggcatggtggtgcatacctgtagtcccagctacttgggagactgaggwaggaagatcacttgagtccaggaggtcaaggctgcactgagctttgatcaaactactgcactccagcctggttgacagagcaagaccctgtctcaaaaacaaaacacgaaaataaacgagttcccagccatgaggggatgcgggatcagacacatctcattatacctactcctttgctaaccatcattagccttccctaagggttaaagagaaactagccattttgaaaaacttgctccactgctgatatcaaccatataaaccattgctgccctcccttctgtagttttgacagggcaacccaccagcattccttcctgattagagaccaccaaccacagaatggttctggccattctacggagactgagcacagagggcttttatgtcctctgctttaccttttgatttataaggcctaattgtaatacattcaaatgttaaatcttcaccctagagtgaacatggtgttgcagtctcaccagtgcaccacagtgtagcagtctctcattgtgaggtatcacccagaattctttgtctcacaatcaagagaattaaggagcgtggacacaaagagtgaggttggagtgaaagtttaataagcacaagaagaaagctctctgacagggagagagggcccagaagagggttaccatttgtacagttgaatacaaagacttttataagaaaacattgagggctgggtgtctcatttgcataaggcatgaatttctggtagctccagctcatcctcctaatgtgcatacaggctttagcttgacttactccatatttctttgttccccttactgcacatgtgtcaggggatggaattttccattgcaagcctgactgggcaagtcacttgtgtagcctttcttatcagtggggctgtgggcatgtcttaggcaagccatcctgtgcagttcccttacctgtgcctgcaggctgttcttttgtttgaaaggattcaactgaggacccaccctccctgcccgcctgcctgaccagcttcttcctttctcttctctcaatgggacacatgtttcatacacattggcctactgtgcatacccatgccattacttcatgaatattcatagctcctcctataacccattgaatatttatacttagccaaactgctcagcataaatttctgttccctttacccctccctccaattgcatgtttctggcttctggccagagattatgcttcctagcctgttggtatggccacccttcagactacaacccttaatgagaaataagctctccttttcaaagttattaacctcatcattcttcaatggacacattatagcagtttaagaagccatgctttagagagattgcaaaggagaacaattttataggccttacttaacttctgtaggcctatgtcatcatctcttaaacctcactgagttactgtgttaggctgttcttacattactataaagaaatacgtgagactgggtaatttataaataagagatttaattggctcatggttttatagggaggcatcaggaagcttactgttatgtcaaaaggcaaagcaagagcaggcatgtcacatggcaaaagcaggagcaagcaaaggagttggtggtggggaggggggtgccatacactgttaaaccaccagatcgcctttgaactcagagtgagagctcacttatcaccaaagggatggcccaagccattcatgagggatctgaccccatgattcaaacacctcctaccagacctcacctccagcactggagattacaattcaatatgagatttgggcagggacaaatatccaaactatcagttactatgtgcagcaaatgaactatacatgtaaaacacatgacataatgtgggaaacatagtaatgctgaagaaatattagccatctggtgatgatggtgatgattatgccattgttgctgctgctgctgccagactccccagattatcttaccacatccattttcttttgcaaacaccatttccctacctgccttttaagttgtggtgtttcttggaattctgttttcaacctgaactttgatatttttctgcatgtcttcctttgataattctatccacttttatgaccttaaccaccaccagtaggctggtaactctcaaatcttgtttccagtctaagaacacctcctgagcaccagatccatgtttctaactggctattagtatctctacaagaacaatcctacaggcaagcagatcccattctccttccttgcaaacttgcttctgtgcttcttttcttatctccataaattcattaccagccacagtcagctaagccagaaaccttgaagtgtgtctttgcttttgcctttccccaacccattatagtcaatcaagtccttcaagataccttctcaccatctcgtaaatattcctttctgtccatttccagttcccctaccttaattgagattttcatcacttcccgactgttttataccataacctcctaattagtctccataccttcagamttacttcactgcaattctgtaaccacactgctgcctgagtaatctttttaaaatgtaaatctagtcatattatgcccctgcttaacactgttctgtggctyccaatgtctcctgagtagttaaaactcctcagacaacactttacatggtcttgcccctttctgtctatgtagcagaatttactgaatctttgttttatttatttatttatttattgagacagtctcgctctgtcacccaggctggagtgcagtgatattatcatagcttgctacagcctctacctcctagactcaagtgatcctcctgcctcakcctgccaagtagctgggactacaagtgcgtgccgccacacctggcccatgttttaaatttttgtagcgatagggtctctctatgttgcccaggctggtctcaaactcctgagttcgagggatcctcctgtctcagccttccaaagtgctgggattacagatgtgagccatggcacccaggcttgaatctttgtttataatgtcagttttattatcattcagggatggtgaggccaatgcatcagatgattgccattgaaaagatagctacaatccccaagaggacagtgcacactgcacatgcagggccacacagggaaacatgagggtgggtcagraaacagaagaatagggggaaatatgggcaagagcttctattgtgatttccttgggaaggaatgggtgaggaagggctaacaagttcaggaytggctagtttgaataatttcagtggactgtagggtgtacagggctgttctaagttgtctgaccctgtccctgaggaaattagggcaggggaatattgatccagattgtaagagcctgatagaggaggttggagtggatggggtctgacctggttggtttgcatatgaaaggcaatctcacaggggagccctttattatctctagaagatggctggccttgggagggacagtctcctcagggtcaataaggccccagatgttaaaacatcagaataaaaagatgtgcttaacacagtctcttaccstcactggctatgctccaagcaattctaaatgacttgaatttccaaccactcaaggctaaattcctctaccctcttcctggagggaagatatcttcttggaaataattgcttatctcttaatttaatgatattcttggtaaagccctcccggatgtttccaacagaataactccctgccatgtttattgagtattgcttatcacgttatatagtgatatataaaataagaattcttattttacaccttttcccccacccccaccagtccacaccataagccccttgaagaatgggaccgtcatactcattttttactttctggagtttgtaacctagcagggtgcttggtgtgtagttgactttcagtatatatttgttgactgagatgaaaaataactaatgaataggtgaatgaattaataatgaattaataagttctatatcagtcatacctgtggaaaactcatcatcattgaatttcctttatttcctaaaacctgaagagttaggccaaagtctttcagttttatcatttgcactaagttgtcatcaaactaaatgatttatgcttctccttccaactctaaaattctgaattttggctgagtaaacttttagtacttttggtgaattataccttttccttttacctttatatggcttagagttataatgtgcagttttgaaagttgcagctctgggaaatgtggtacatgatttttatttttgtagacaataggaaccaacaagtatagcaaagtggttaagaccctgggtgctgttgggcatggtgaaatacactttagactcagctacttgggaggctgaggmrggaggatcacttgagcccaggagtttragaccagcttgggcaacatagtgaggctccatctcaatttaaaaataataataataataataataataataataataataataawaaagaccctgggttctgttatctatctaagttcaaatcctacctccaccactcagtagctttgctcttggcaagtgtggtatcctttgaaaactttagtttcttcatttgtaaaattgtaataataatgatatctacctcatggaattattattgtgaagaataagtgagataatttatgtaaactttctagaacatagtgaatacttaataagtgttagctaacattattgtcactcttgtaatagaggttattataattatcactatttaatgatactctgcactcttaaacagtatgatactggccaaggtttcaaggttcagtggccttatttgtgataaatgaaaaatagacataatatgatgtagacacatgtagctttaagtacgtttaagtattattattattattagtcacattttatgaaatcgaaatacaagtcaatgtaagaacatcttttttgttttataattacctaggtggcctgtctggtaatttaattctttcagagaagtctttttaaaaaggaaaataagaaaatctttgtgtaaaaattgagcaaggtctatacatgtgatttttaacagctttattgaggtgtaattcacataccaatatgattcacttgtttaaaaacatatagctcagtggtttccatcaccacaattttagaatattttcatcacttcaaaaacaagccctataccttttggctatcatttgcctacttcccacctcaccctcagccctaggcaatcactaatctactttctrtctctatagattttcctgttctggacatttcatatgaatgagatcatataatatgtggtctttcatgactggcctttttcatgtagcataatatttttaaggttcatccacattgtatcatgcattcagtactttattcctttttatggctaaatcataatccattgtatggatataccagattttgtttattctttcatcaaatgatagacgtttgggttgtttctatcttttggctattatgactgatgctgctgtaaacactgtgtacaagtttttgtgggaatatatgttttcagttatcttgagtatattcttagtagtagtattgctgagttatatggtaactgtgtttaatcatttgaaaaactagtagagttttttccaaaatggctgcaccatttaccattttacattaccactagcagtatttgagggttctcacttctccatattctcacgagtatatgttagtatgactttttaattctagccatctcagtgggtgtgaagtgatgtctgattgtggttttaatttgcatttccctattgactagtgatatcgagtatctttttatgtgcttattggccatttgtatatcttccatggagaaatacctattcagttctttgcctatttttaaattaagtcatttttattattgacttgtaagagttatatgttatcaataaaagtcccttatcagagatataatttgcaaatattttctcccattctgtgggctgtctgttacttttcttgttggtgtcctttgaagcaggaagttttttaacttagattaagtctaatttatctattttttgcttttattgcttatacttttggtgtcatatctgagaatcctttgtcaaagccagcatcataaaggttttactcctatgttgtcttctaagagttctaaaattgtaggtcttgcttttaggccttttattcattttgagtgaatttttgtatatggtgtgaggtaaggattgaacttcatttttttgcacattgctatccagctgttgaaacattatttgttgaaaagattattatttcccccattggttggccttggcaactttgttgaaaatcagttgaaagtggatgtatatatttatttctgagctctsarttctattccattaatccatatgtctatctttgtgccatgtgtacrtttgatctttaggtattttcttgttttgtcttatttttctcctagagaatgttgacatctaagaatacacacacacacacagagtagtttttaatyaatacacagtttttagtcatgattatagagctaactagacatcagaaatgaatcatccagaattacacacttaaatatgaatatgaatagaaatttcataaataaatttcataaacctgaaatttttctaaataaaatctaaaagcatagtttttattttgacaagtattatatttttccaaaaatctttttcaatttataaagcagttaaatatagaacatttcattttggtcctaaggctaatatggtgaaatataggtactcttatttacttatattattgtaactccattttatctatgaaaaaacagaatcatgaaaacatgaagtgatctgtccaggtcactcactcagcttaagacaaatctgcacaaatttcctaaccccgttctgtactctggctactctatcaggctacctctatactgttagattaggaatcagcatcttattatataaaatattttctctaattataacaagtatatcaaaggcttttatatacaagaggactgcatcctgggatcttgaatctccagttttcataccattctagcaaataacttgctgcgtagccgtatgctcagtcgtcagtagagaatgacagagcctcatgttatgtgagcagcttggtaggatgcactcactagctgagtgatttgctcccactcaccagcctctgcagtattacaaattagtgcacatcacatacttttagaatttctcttaagtagttgaagttgcaaatattaaatctctaaatttcaagcctttattaattgtgaaagtatcctaatgattttctacactgtggttcttttctaaaactaattcttacttaccgcttttatttattcaaccatgtatcaagtgctttttatgtgtcagacaatgccaagcatgcggatactgcagtaatggcacaaaaaaatcccttttctcacaaagtttttgttctaatagaaagacagacaacaaatgagtaaaataagtactgtgagaataaggaagcaatatgagagatggggagtgctttgagaaggaagcctgtctgaagattgataaccttgaacatggcattaatgagtgctgctgctacatggtcaaaagaaatggttgcgctttaaacaaatactrttctgtgataggccaaagagaagttaagaatagcatgaagaatagaatatagttgtaagaatatttcaagataagattcttccagcaaatttagctttcttatgcctttggataacagtaacaacaatgaaacaccatccatatatcatccacaatttattcgcagaaatccaaattggtacttagttacctcagttatttgtgcttagtagtatttgtgcttgaawatctcattctcaaagagatcaaagcctaccttttcccacccacatttatagttgtaacagcctaacactcaattacttatcctactatatttggttttactttcttctgtaacaagtaagtattagctttaaacatactataccatttactattgaacacacttattttttgtttcctttcactagcatgcaagctcttggaaggaaaggatttttggtttttcactgatatattcagaaaagtgtctggtacatagtaagaactcagtatatatttttgagagaatgagtgttagtaaaagatgaattaaatgtccattctgtattgtttaaatacacatctcatgaactatttgttatgactgctatatccagttaatgacccagaaacttgataacgatttgctctaatcctcagttcccttcaaggtaaactttctgatgttcatcttatagttggagaaatgaggctcaaagaacctaattttaaaacctttttaaaaaagtatcttttgaccagacatagtggctcatgcctataatcccagtactttggaaggctgagatgggaggatcacttgaggccaggaattcaaaaccagctgggaaaaataaatataaaaataaataaataagtagataaataaataagccaggtgtggtggcacatgcctgtagtcccagcgactcaggaagctgaggtgggaggatcccttgagctcaggagtttgaggctgcagtgagctatgattgtgcctgggtgacagagcaagattgttgtctctaaaataaaattaaagaattttaaaagtatmtttttattgtttccaaaagacatattcttattaaaaagccagcatcttaactctgttctacctggttccatcttgaattgtttgtgttttaaaatgtcaagaatatatttccaaattataattrcatataatgcaaaaaacatgttttgaatgcccttaaagcatttaagaatataattctgctgctgagttagtctctggtctgttctccatgatttctgtctgtgataatagtactaatatatatgttgtagatgagagtggtaacaktctaaacaccaacctcaaaagattagttgtataatattccarttaacttcagtaaccaatcatgaaactgtcacccatggaattttaactctttgaggatatttgcctaagtatccttttggrttaggtactttttctgactctgcccctaacattttgaatttagttttgactttgcctgcttctctggccttagcatcttctattacagctaagaattgtcaaaagacaaaattacaacaaatttagtttaaagatcttaattgacttttatttgtgatactagaattgggcaacacctcattctgtaaaatagaatgagtgccccaataagctgagcagttggttttatagtcacaaaaggactgaggaaagcagaaacagaaaacaaaaagtgggttggttatttcaaaattaatttccttgtaaaggttaaagcagagaggattttcttatcatgccagctaaaacttgaagattttgctattatctctcactctcctgatctctcagaaagtcagataaactgagttttggcttggtaacatggaactttaccatctgtgactccattttggtttggtgtgttgggccttttgcaggaaggagttcagtccagaccagtgggctcctatcaatattatttaaacagaactatgtcgccctgtctacttccaaacccaccttcttgtcccttgccttccattccatgtgtgccaccttagcccccatagggattgagaaattttgatagctgtcttcttccatagtgtactttttctttttttaatctctatgtttttatttcattttggaattcaactggtttttgtttccccattccttaactcattttcatttccctactccttgtatcagtcttttttgcctcgctatttttcagtatgtttatctgaatgattctcataaaaagtgcctttcagttccttcattttttcttttttctttttaaaactattcttccctagtgatttttttttaactgctctttggctgcattcactatttttctttttttttaacaagtgatactgttttctttaagatctcagcttaacattttacctcttttatttctttccactctctttttattcttagaataaatatgttcgttgttctgaatatctttaaaaataacyctattccaatcagacatgtccctatcacagtcagaaggaggggctcaagtttccctaaaaagtgcacattaggaatggagcatagccaccagctggagctgctagcatttcaaaatctcaggaggctgcagcaacatgtgccaggccttatctcygtaatacacatgtgctgcttgtcagtttcaaatgttaaccctcagcagcattacttaaagtcagtaggctttgtgttgtgatggaaggaaaatatttttaaatcttcttgagaccctgggaaactaccgcttttggacatgaaagagcctgccaccttacaaatccatcaataagtaaaagccactgacaccagtgccatgtttcagttcagttaagttggcatgaatagtactgagccatggtgttctcaggatgtarttactaaggcgttttatttatatcscagtgaaacaatcctaccacttgcaaggacaaaaagagagactttgggggcccttaaatgtaatcagcagacatgtgccaccctttcacctttgtatgttgatttttgtttagtgacactgtagcaaaacaataaccattagctccakatagtaagtatgtacaagcatgatctttattattattattatttgtggagatggggtctcactgtattgcccaggctggtctcaaactcctggccttaagtgatcctcctgcctcagctcccaaaatgttgggattacaggtatgaactactgcacctggccaagcatgatctttttaaaagcacttaattgaaatataatgaaaatattaactcacggtatatatatttcaggaattgactattcatattataaaataattctatattttccaaaagaattcctttcaggagtgcttcaaaaaggagttttcctgcattctaaataaatcctaaatttaatatayttgtttaaaaaatgaaatacacacagtttggggaaaacagcctggccttattcacagaaggctgtatatttgtacatcatgcatactgttttcaagttaccataactaagttgttcagaccaaatagtttttctccacacaataaccataccaagagctctaggtatataaaatttacagaactgttacagagtaaacttatgcaaaggagggttgagtattaccatactcccttttttcttattttccaagtaaagtactcctcggtatttgagggagattggttccaggacccctcrgataycaaaatctgagatgctcaagtccctgatataaaatagtgtagtaattgcatatgatctatgcacatcttcctttatcatctctagtttacttatacctaatacaatgtaaatgctatgtaaattttgttatactatattgttcagggaataataagaaaaaaagtttgtayatgttctgtataggtgcaattttttttcaaaatattttttgatcccagattgtttgtgttcacggatacagaatctgcggatacagagggccarctatactgtctttcctttaagatgtctccagctgccccaatcttgagtgacctttgccttccttcaaactcctatgccgttaattgtctacacctctcacctggcagttgtcatatgcttcttgtatagtttatcttttatgtatatttacttcctagtctaggaactaactagagaagtctctttacacctttttggtatctccaatacttgaaaaatgctcttaaaacagtgcttctcaaacatccatgtactgtgcatagaaaacacctggggatcttgttgaattgaaaattgtgattcagctggtctggggtggggcctgagattctacatttatgacagactcccatgtgatgtgatgcagctggaccacagaccacattctgagtgaccagtgtctgtcaaaccttcagcaaatgtttattgatgatgccattttttttttcagaaaaaggataagagatttaaatttgttaagtgctgcatttttatgtaatatgcaaatagcactaagactgaactgagatattgattgaaaaaatacgctgaatgattgaagatgttagatrtctttttttctgatttctccatctgatcaataggaatggactttagcttatccattttcattaataccagactggatgagattatacgtgaataacttctacttctgtcttcactagattcaggctgaaaagcaaaagtctttataacacatttctagtcacgtaaataatacaaactttttctaacttttctcttatttgggacacctagctttgmggagcagatggttttcccagtaaactcttagattctataggtatcacatttcagggtcaagaattacgcatatmctcagtataaactctgtaaagactttttttctcttgtttgatggaactcaaaaatggagcaataatagttatcaacaagcaatgagtctgagtcctcaggctttaatggcaaccaacaaccccatgctccttattgcagaggaagagtgcattgttgattcgctttatatccccaaatagaaaacacgttaagggtaatcctgggaaattatgcttacttcaaaccttgattgccaacactgaagtgtctaaatagcacttcaccatttttctggttgttttcttagaaacagttcacttgcttccttcctgtgataaatgccatatttattttagtatgagtcaacctacactttttttatattgcctctctccccagacccccaaatctccaatttctcacaagtgaatttaggcaaactaaagaagacatctctgttccgtgagtattaaaataaaacatttttaaatgtaagttataaaaataacactttcattgttttcttcctaattactaaagtagtccatgtttattacccctattccacctccaaaaaaaaaaagaagaaaaattatggaaaagagtcaagacctaatagactaaaaattttaaaactattcttgtttgcctacttctcagaaataaacactgtaaaataaacattttgacctgacctcaaaccattgtctttttatatatatattataaaaataaaattaagattatataatcattactactttgtaacatcctttttaaattaaaaaatatattgtggtcttctctaatatcattaaatatatttccataacatggttgttaacagctgcatagtgttccagcatatggattaactaaccattcccctactgttgatttttttctaatttttatataagaggatgttgcagagaccagacktatacataaatgtttgtacaagtttttaccttggaactaatttctagaggtaaaattgctaggtcagaggataaaagatgttcatttataatttgtttcatcttgccctttctaaaacgacagaagtagtttaatagaactttgacttatattatttcatagtttcttttgaaaattattttctctcaatagcaaaacttttgttggctcctgacgtacattaatatacaaaagagctacttaatatttggaacacgaattaacctgaggagttcataaacagtaggcattgcaatgaacagcatttatcaacttgacttaccagcttacactgccatarttctgttatagtcatgtcacatttgagacattagttgtacaaacagtacatgaagcaactcacatgaattttaattgagaatgaatatttgccaaaacagtaatttgtctttttaagtctttgtttcatatgcagagaattttatttgttaagcatastgtactcagagtcaggccaatcagaaataatataagaaaagaaaaactggttaactctttctatctatattagtctaaggagtaccagggctaacaaatcttgatagtatgctaatttgttgtgtttcaaaacttgctctttatcctgttgcgaaagctgaattcaatagaaaaatgattatatttttaaaataaatgaattacatgagcccacagcactgattttaaagtaggacttgcattgatacagtttattgaataaagcaaaaatttttacaagtattttataagtttaaatagcaaattgaaattgtgcgaaaatartgattttgtgattattaaacattcattgttttaagagtgcatgtaacaaaaagtatctgtagttacctaacactataatagttaaaatacctgttaatatgtataagttaactctacatttttgtaaaagtttacaacattgtcattgttgtgttcatttatttattttaaacttccttttttagtaaaaatgtaaggccatttataaaatttatgcaatataataaaataaagtgaatgaggaaatcaagacagagagcaaatgaggctctaaacaataaaatgcatgccatgaaatcctgtacttttgttatgggtagccacattattactcagcttttagacttccacccaatcaaattatatgactgacagtgtccatgacaagcaaattagttgctcacaaaaagcccaacttttcctgatacctaatagaaaattccctcatggatctcaaatgaagacactatgtgatccagcattcactgtcctcaataactaccagtttcttagaatattccttttaagatgcttatggtatcacctcagtgtgtaacaattatatgagaagtcaaaatgatctgatcccacagctggtgcaatataggaatagagttttaaaggaaaagatgtgtttgttgtgttcccttaagcaatcttytatacctgttctttaagtcaaggttttgattaataccgaatgacaataggttcagagttaaactttctgaaaaatagctggaatgtggttattgtatgtccacatgcaagtgcagagcagtgtgcttcacctcttagccaagccaggtgtgctctttgtggagattcagaatagcatggacattcaattgaatggatggatacccctaatgagggagtacccaggcaggacctgaactcattcccaataatttgttgcatagacgtgattgaacaatcaagtttccaaagctctgtagtatagatcatgattgtacagctttagcctgaaatttataaaataagcaggtgtgatcagttgcttgccctatgccatgaaataaaacacccacacattcaaacaaagcaaaacaaaaaccatcaataaaatacttatagacatttgtctttgaagctgttattttctgatgtactctccaagatgaacttcgtacaaaatataccttaagggcagccagagagaaaggtcgggttaccaacaaagggaagcctgtcaaactaacagcrgatctctctgcagaaaccctacaagccagaagagagtaggggccaatattcaacattcttaaagaaaagagttttcaacccaggatttcatatccagccaaactaagcttcataagcgaaggagaaataaaatccttttcagacaagcaaatgctgagagattttgtcaccaccaggcctaccttacaagagctcctgaagaaagcactaaatatggaaaggaaaaaccagtaccagccactgcaaaaacataccaaattttaaagaccactgacactatgaaaaagctgcatcaactaacgggtaaaaaccccagctagctaatgacaggatcaaattcacacataacaatattaaccttaaatgtaaatgggctaaatgccccaattaaaagacatagactggcaaattggataaagagtcaagacccatcagtgtgctgtattcaggagacccatctcacatgcaaagacacacatagtctcaaaataaagggatggaggaatatttactaagcaaatggaaagaaaaaaataaaaaagcagggktcgcaatcctagtctctgataaaacagactttaaaccaacraagatcaaaaaagacaaagaagggyattacataatgataaagagatcagtgcagcaagaagagctaactatcctaaatatatatgcacccaatacaggagcaccaagattcataaagcaagttcttagagacctacaaagagacttagactcccayacaataatagtgggagactttaacactctactctcaatattagacagatcaacgagacagaaaattaacaaggatattcaggacttgaactcaactctggaccaagcagacccaatagacatctacagaactctccacccgaaatcattcttctcagcacccacatcgcacttattctaaaattgaccacatarttatacataaaacactcctcagcaaatgcagaagaacgaaaatcataacagtctctcagaccacagtgccatcaaattagaactcaggattaagaaactcactcaaaactgcacaactacatggaaactgaacaacctgctcctgaatgactactgggtaaataacaaaattaaggcagaaataaataagataaataagttctttgaaaccaatgagaacaaagacacagcataccaaaatctcttcaacacagctaaaacagtgtttagagggaaattgatagcactaaatgcccacatcagaaagctggaaagatctaaaaytgacaccctaacatcacaattaaaaaaaccagagaagcaagagcaaacaaaagctagcagaagacaagaaataactaagatcagagcagaactgaaagagatagagacacgaaaaacccttcaaaaaatcagtgaatccaggagctggtttttggaaagattaacaaaatagactgctagccagactaataaagaaaaaaagaagattcaaatagacacaataaaaaatgataaaggggatatcacctactaatcccacagaaatacaaactaccrtcagagaatactgtaaacatctctactcaaataaactagaaaatctagaggaaatggayaaattcctggacacatacaccctcccaagactaaaccagaaagaagttgaatccctgaatagaccaataacaagttctgaaatttaggtttttaaatgaatcttaagtatgaaatatattgtacatagtcaaayccctcagagcaatagagcattcaaatccttagcctgtgtgttcctatgaagcctgtccaaataagttgcaaaatagtgtctagagcctgcaatcctgtccgtggtgctattttgttatttgtstgagtctcaggtttcaattctcaacctaatgaagtaccatttaaaagcaacaattagagaagcagccacatctcttcccttttgcagtagaaatactctaattttattacaattccccaatgtaaattctggttggtcttcctgtattgcctagagttcatctttacccattttgcaattcaatctgtttggtgcatttctacttatatatttttaaaaatatgtgtattttataaatactggtgtatagtttttgaatgctcagaagattgaaaggcctagagaagattcagtccaatgcaaacatcatatattaagtacttccttgtgtcagaggtactgaatgctgtaagggatactaagatgagtaagacacaatctctaattctaatgtatttatcaactctaggaagagacattcacaactaagtttttgcatgctaagtaaatattaattgaacaattcgacacctattatgtacttggcactgttcttggcatctggatatagcagggaataatacagttctgatctgtgctcttacrgagggacagacaacataaaattttagttacaatataaatcactgtgctaaaataccctttgtagcacagaggtttattaactctagctatggattragaaatgcttcatggaagtgacaatttttctagagtcttagagtttcattgaccagaaaagaagaggaaaaacaagctaagggaaagcacagcataaacacataatggcaagatgtgaaagtattaataagcttcaccccattctgtttgacagggattttgartatcacagagaaaatacacaggactcaatggaagttttgtaaagaggtttactgttatgacaaatatgtatgttctcttttttatcctgggtcaaatttcatctgcctttttcacttytaaatattttctaaagcataaatcatgtagaagtgtatgaaggaatgatgaggctgaaagagtagctcaagcaagatgaaaaagttccttgaattgtcgtgtcttattttggacttattaattgttggacttacaaacagtggaggcccatcagaggtgtttgagtcaggaagaaattgtatcatgctgactctcaattgcattttgctgaactaaagtagtagctttagttcagaatggaaagargttcacagaaccaagaggatcctgtgaaacgttgcatgggtaccctagagttccctcttttgtgctccccttatagcactttgcatatatctctagtagagctcttgttacactgtgagtgcttttagagtgttgtgttgaagtcagcttgcaccagcttgcaagatctaattgttagtatcactttccaattctatgctctgccttggtaggaatatttacaccatgaaaatgagcaaacaatacaaatctgttttttattgttgttttttgaaaactgttaaacagttactagcacatcaccgactgtttattaacatgtctgacttcttataagactgtgaccatttagaataaaaataccatcttatttttatttccttatttctagcccagtacctcacaaattataggtatcaataaatatttattgaatatgtagagggacagattaacaaatgagatcaacaaattaggtaatgaccaattgattttgggaatggatgaaatggttggaaatagccctatattatgtagcctgaacatttggtaayagtgatactactagaaactgaagaagaaaaactgagttgagagggagaggcagagggagggatcataggggaagataattgttttgatttgggacatgttgtgtttgaggtactgtcaaaagaccaggattagagatgcccagcattcactccagttactatcaaatgacagttttgaaattactyttcctgtgactttctaaaatacttaactatacagactagttgaagttcaaagttatttatttttttaaaagattgcttcatttcaatagtacaagagaaaattgcatttttataatacattytgaacactacgtttgcagggaaaagcagagatcagatagcctagaagagaatgactgaggaaatggaattttgtttttttttttaaaaacaatgtaagtgtgtttcaagatcatagtcacagtttacaattctattaggaagagaaaaatgaattttgggggaggataaagttaaagttaccttttagaatataactcctaataaaaagtttttcttttcaaaaaagctattataatgtgaccatgagaaaaaaaaatctttttacaataaagtattagggaagtaaaaacaatatactttcagaaggcaataactttacattayctaagaaatggcatattctgatttagtaaatgttctcattaataggataatacagtataatctgtacacatagggcttttcttttttttttctttttttctgagatggagtctcgctctgtcgcctaggctggagcacagtggcgtgatctcggctcactgcaagttctacctcccgggttcacrccattctcctgcctcagcctcccaagtarctgggactacaggcdcctsccaccatgcccrgctaatttttttgtattttcagtagagatggggtttcaccatgttagccagratggtctcaatctcctgacctcgtgatccrcccgcctcagcctcccaaagtgctgggattacaggcvtgagccactgtgcccggccagggcttttcttaagaaatatgtaaccaagaaaatatacttgacttgcaactatagtgaacagagtttattcttttctttataaatgggagtcttgcctcaagatcatatataaagatgtgagttattgcttatagaggtgtatatatttaaaatatataatagtaataracawgtctaacataagatgaaagattatttattatatgtgatctctcatgtttagagtgaattggtcttttctatgctatggatattcaccagaagattaagtagttctttggggaatagtcttaatatctcaactggaaaagtcatttatgagcatgcacttataaacttaatgctattctagtggattagtccaattccacatatttgtcacatggcattttatatctgtgatgaaacagtaatattatcctcaatcaaagtcacagagcaagttactttcagagctatggattagagcttagagttctcatttccattctcaggcaggtgtgtcctagtttgagaaaatgtgatacacaaaaccaccacctcacaaaatagataaatggtggttacttagatttcaaaaggatgttcttcggggttccttaaaataggcacttctgaaggatctaatatagcctaaggagcccagactattggtaaccaagaggcctagtttctctaccctatcattaacaaagttaatggggtatataaatttgagcatgttagtcattccattcatccattcacttatccactaaatcattaatattttattcaatgaatctttcatgaggattctgtgtgttggatataaaaaggttgtagtccttgtttttaaggagttaagacagaagggtaaacaaacagtacatttttaatggtagaggtaatgcagcctgttagcagaccactaaaacctaaacaagatgtgaaggtgaactgtgatagtaggagtagacttggaaagtaaggaaagaatgctatgctaaagaaatagaatctgtgtgacttggtaacaaattagatggggggcccaaaagggagagagaggagtcttaggatgactcccaagctgttggcctaggtaacttggtgtaagagtggtgccatttatgamgagagggaatttaggaagagggggagttttgggaggaagacaatgaggttagttttgtgcaagctgagtataagagccctgtgggggccaggcacattatagctcatgcctgtaatcccagcactttgggaggccaaggcaggagatctctgaggccaggacttcaagactagcctggttaatacagcaagactttatctctacagagttgttttttttttttttttttttttaaattagctagttgtggtggcatgcacctgtagtccgagctactctggaagctgaggcaggaaggtcacttgagcccaggagttcaaggctgcagtgagcattaggcagttgtatagtccagcctgcaactcagaaaagagaactgggcagtagttaaagagtcgtctaaagatatatgatagtagtgaatgaaattgcccagggagagccagaagataagaggagaatatggagtggaccctaggcagtaggaaggtggaaataaaggagcctgagaggaacagtcaggaggagatcctggactgtggtatcatgtgggctgagtaaatggagggcttcaggaataatggaatggtccagagtaataaatgctgaagacaagtcacaaattgagagaatctatgggcaattaggagaatatcagtgtcctttgccaaagcggtttagatagtgttgtgaggcaaaaggctgaagagtaaatgaaagtggagcttattaagacttctaaaaaggaggggaagaggtaggacagtaattaaaattgtctatttgttaagtgatgggagagacatgagcattttgataggatgcataaaataaacttgaaaagagaaaggttgaaaacacaggcgaaaggtaattataatgaaggaagtttcctgacctagagttgcaaagagatgggagggttaattatcaaaagaagaagaaatggcactttctttggcactgaatggaaagggggaagggaaggataatgtgtgtgtatatatgtgtgtgtgtgtgtgtgtgtktgtgtgtgtgtaggaatttgagggagctgaatctcttgatatcagtcttaatttttttttctgtgaagcaggaaacaaarttgctgagagaaaacatgtaattgaggatggagccttgaggataatgacgaacattggcaatgccagctgtggaggawaagtgggcaacagacatgataaattatagataggtaggtagatagatgatagatagatagatagatagatagatagatagatadaatagataggattatagcctaggatggcagcatgagaaayatggttagattgactgccctcaagcttatgttcaaggtttccattagcatgagagaggttaatactgcagatattattagtcttggctcagcccttaatgtagaatgttgctcagaagttaaacctcggtcctgggagagagctactattctctaggtctctactgtccaatatgatggccattagccacatatagctctccagcacctgaaacatggctggttctaactgagatgtattatacacaaaatacacacccaggacttgaaaatttagcataaattaagaatgtaaaaaagctcattaataatttttattaattacctactgaaatagtattttgaatatatagggttaaataaattattttgttaaaattaatttcacttcttattaatgtggccactagacaattttaaattacataggtggctcacattacatttctttttgacaacattgctattggtaattataggagaagattagatggtttcaaaaaatgctcaccttggtctggaatcttagctgcttactgcaactttaaagggaatcatagaagacatgcggcagtttaggaaattaacctttaaagagagtttgccccaagtggttggatctttggatatactctttcttcattgctggataggaggtctgagactgtccgtagaaccaagttacccatatctgtaaaaggcaaaaactgtctgcctcgtcagcaattgtgctgacaaggggatttgtgggattcctgtgaaatagtacatgcttttaaaaacacaagtactatataagtgcctcattgttagctatgagtttatttataatactatgaagacaatgattatatctactaaatgcctccagtttggccagacaccattagacattttatgggcattatcttaattaattcagccagataacgctgaagctaggcctttaaaggcaccaaaatctttctactaactgctgagactaatgttgctactctaggacaaataaacctaaattttataaaatctctrtgttattttataaattggatatamctgtactaagatcagtttrttagacccattgtttctttctttgactgacatgccttttttttttttccaacttttattttaagttcaggggtaaatgttcatgttacatgggtaaatgtgttccgtggtggtttgctgcacagatcatcccaccacccaggtattaaatccagcatccactagctattcttcctgatcttctccctcctcccacccctggtcctctgacaggccccagtgtgtgttgctcccctcctcccctccatgtgtccctgtgttttcatcatttagctctcacttataaatgagaacatgcgggtatttgrttttctattcctgcgttagtttgctaaggataatggcctccagctccatccatgtttctgcaatggacatgatcttgttcctttttatggctgcatagtattccatggtgtatatgtacattttctttatccagtctataattratgggcatttaggttgattctatgtctttgctattgtgaatagtgttgcaatgaacatacaggtgcatatgtctttataatagaacagtttatattcctttgagtatatacccagtaatgggattgctgggtcaaacggtatttctgcctctaggtctttgaggaatcrccacactgtcttccacaatggttgmactaatttacattcccaccamcagtgtaaaagcattcctatttctctgcaacctcaccagcatctgttgttttttgactttttaataatagccattctgactggtgtgagatggtatcacattgtggttttgatttgcatttctctaatgatcagtgatgctgagctttatttcatatgttttttggccacatgtattagatccattatttctgatggtacttttataacttcactgctatacaagaggttttaggccaggtgcggtggctcatgcctgtaatcccagcaccttgggaggccgaggtgggcagattatctgaagtcaggagtttgagaccagtttggccaacatggtgaaaccccatctctactraaaatayaaaaattagccgggtgtggtggcrcatgcctgtaatcccagctactcaggagactgaggcaggagaattgtttcaacccacgaggtggaggttgcagtgagctgarattgskccactgcactccagcctgggtgacagagcaagactctgtctcaaaaaaaaaaaaaaaaaaagaagaggtttcagctagaagtctaattgattataggtgactttggagggagcaatttcaatagagcagtaaagctgaaaaccagatagcaaaaaggtacttactaagtgggaacagggaaaacagctttctgtagagatgaggaagaaagatggagcctcagaatatcactgagagttcagctcaagaaacagaaaccagcttagggatgttttttaaaggagttcgattcaaggaagtagctatttacgaacttaagtttcttaagtgttgcagggccttaagtcaggagttgccactggagctattgatttcaagagtaccttcccatacctagaatcctgaagttgctgctgcctccactgctactaccatggcagtgacttaggcattgagtctgccacaactcaaacacttgtgtctcctaccttgtctgcctgtagcaacattagcaagaaggtagcttctgctttgtcctgtcttccaaatctcatttaggacttccacrtcgcaagaattctagccaaaaatgtgtctggggaatgtagtttttagatttctaatttccatctagaaggaggatagaataaagagttgagagagtcactctgtagaatcgatcacatctgatttctgttgcttattgtaagccatttgtaaggcaattattaagaaagaggagaggcygggcacggtggctcaygcctgtaatcccwgcactttgggaggccgaggcgggcagatcctgaggttaggagatcaagaccatcctggctaacacrgtgaaacctcgtctctactaaaaatacaaaaaaaawttagyyrgrtgtggtggcgggcgcctgtagtccyagctgctcaggaggctgaggcaggagaatggygtgaaccygggaggcggagcttgcagtgagccgckatcacgccactgcactccagcctgggcgacagagctagactctgtctcaaaaaaaacaacaaaaaaagagaattgctgagccaagggaaatactgtgtgttttcatgcttgaggtaggaaagagcttggtgcctttgaaaagttggaaggggttgatgtgactagtttgaaaagttggaaggggttgatgtgactagttcatttcaggtggggttggagagttaagcaggagccagagcatgcaggactataggttatgttgagaagtttttctttaagagacagggtcttgctgtgttggccacgatgatcttgaacacctggcctcaaatgatccttccaccttagcctcccaaagtgctggggttatagggatgagccaccacacccagcccaagaattttgcattttctcttaatgaaagcatcagagattcttcggcaggaaagtggtatgattcaacttatgtttttttaaagcttattctaactgctttttggacaatatgtttactaggagtagaggtatctaggaaaccagatagaccagcaagtataaaatctaaaagcccaatattctaggcaggagaatatggtgctagagtggatatagaagccgactgatacagggtatatattagtagttgtattgacaggatttgccaagaattggatgttagaagtgccaagagtgggtcccagctatttcattattttattcctttgaggaagtttctgagcattgaattgtaggattctttaaaatagtaaagcaagactggatagtaattatgttatagggatggagtagaatgtggaacgattcttttgcggggagatattaagaatgcctctcttgctttcaggtccagggtgttaaaataaaagaatgcctcttaaattttttagtagtaatgtgagtatacattaaaggttaaatgtcttaaaatgtatttagaaaaaaagaaataggaaaatatttaccaaaaaacccaatcctctatgctaatgtttatgttcttaaattttagttgtatatgtgaatctttgtagtttttgctaaaatactaagtaatttatataaaagtgagttaagagatttttctgactcttcttttttagttgagctcatccttctgaagaatgcccaattctttctaaaaaagaaccaagagatcataatttttacttttaaaagtaacacctgtgtcaaataagacttcattttcacttcagccagttcctattgttggctgaaacagcaaacagatcagtaagaggcaatagttacgatgccatgtggtctattgaaacctaatgaaaaagacaggattgaattatctaaatatttcacctgaaataacatttaattgtgaccctcttcaggttctataaatttacattacagctattttttatctaatgaaaagtgagatgtgaagcctgtcagagtccacaagcctgatgttttagtgattcctcatatacaaacaatttatgtattttccagtgccaataagtgtatttactgtgaacctgcaggtggctcactcaatgagattagtattatataaataagtagttgagtttaattttgcaattactctttctaaagcctatgcataggttctagaaggatccttagacttagcagaaagtagcctctgggtctctccctggcttccttttctacttccaattccttccccatctttcattatctcattttagtttgaattcatctgacattgcttatctcccaggaatataaaactgcataactgtattagtacaaagttgcatactactgggaaaagctgtttgatgggtcagttttggtaagatatttttgaagtgccggaggagtcaagagagcacttagcatgtgctgtttagtattacaaracttgttgcagaagaatactagtaatggatagaaatgaaaatatttgctgttttagttatagtggtcccctcactggcatttgatattaagttttattaccctcattgcctgtgaaaggaggacaatgattgtaacattgtttcacagctgttttagggttactaggacttgagctatactagctcctcttttaatgtttatccatatatgtatatcactgctaacatagttatcctgtagtccagagaatatttttttccttgtacttagattttcctggaattagactagtgacctcgtgataaaccaccatatgctactcattacagtcatgcactgcataacaatatttccatcaacacctgactgcatataggatgctgatcccataagattataatggagctgaaaaattgctgttgtgagatagtcacacaatgcattactcacgtgtttgtggtgatgttggcataaataaacctactgtgctgccacttgtattaaagtatactacatamaattatgtatagtacataatacttgataatgataataaatgactatgttactggtttacatatttactatactttttatcgttgttttagagtatactttttctacttattagaaaaaaagttaactgtaaaagagcctgaggcaggtccttcaggaggtattccagaacaaggcattttatcagaggagatgacagctctatgtgtgttattgtccctaaagaccttccagtgggacaagatatggaggtggaagacagtgattttgatgattctgaccctgcataagcctaggctaatgcatgtgtttgtgtcttcctttttaacagaaaggtttcaaaagaaaaaaaacttaaaaaatagaaaaagcttatagaataatgatgtaaagaaagaaaagatttttgtacagctgtacaatgtgtttgtgttttaagctgtgttattacaaaagagtcaaaaaaagttaaaaaatacttagaagtttataaagtgaaatagttacagtaagctaaggttaatttactattgaagaaataaaaatatttttataaatttagtgtagcccaagtgtacagtgttttataaagtctgyagtagtatacagtaatgtcctaggccctcacactcactcaccactcactcacggactcacctagagcaactgctagtcctacaagctccattcatggtaagtgccctctataggtctacatcattttttaccatatttttactgtaccttttctgtttagatatgtgtagatacacaaatatttatcattgtgttayagttgcctacaatattcagtatagcaacatgctatacaagtttatagcctagtagcaaattatatagcctagatgtgtagtaggctatatcatctaggtttgtgtaagtacactctatgatgttcacasaatgaggaaatcacctaatgatgcatttcttagactatatctctgttgttaagcaatgcatgactgtatctgaatatattctacagttgatctttttctgtaattagtaaatttcataaatctttttctagtttaatttgtttcttaaatagaagggcattttcaattcttacatatctcttctgtgttgtggagaactgaaactgagtggctttattatggaagtaagttattctttgtccagacatattttatcaatctgatagacctattcaataaacagtgacattctttacaataacacagccatagaataattaaataaatattcccttctttattttcagtattttgccaatcactattctatatttggtgcatttttttgatatcttagatttagaagtcattctataagtcagaattcttcctcccacagcaggattacctgagcagaatttttagtacttatgatgagctgtaacatagccaagaatttgacttgatgggactcagcatgcaaggttttaggggaggatgaatatgcctggaattttgtggaatttgaaagactgctgaccctccaagtacaaataagtrtcgctctttaatgagtctgattttctcagcataacctgttatttataaatactgcaataactttttaagaattatttatggtattagatgaaattatatgttggtactttgtgttgcttttatgatctcataattgcttctgctccttgaagggaggggaactatgcgtggtagtatggtcttcaccagagtttaagcagcaagaggaatgtaaatctgttagaaaaaattagggacaatccatcaggaaatggaggggggaagtgctgttattatttcactctcacttttagtattttttaatatttttgtattttttagtatttcaatatttttyactttataagcatatgtgatattttatactaatcaaaactaaaattaatttatcaataccttttttaaagaggatctaacatgaaagcctagattttaagagcagatatgaagaaaatacctattgttttatatctttaagtttcattgttatcatttacctaaataaaacattttatatcagtaaaaatacttcatgttttctgaggtttattaatggataataataggtcataattagcttatgatctaatctaaacttatacctttattctaaaactatgacgattacaactcttaagagatgttatatatttatttaaagataatataatatttggttagattatctttgatatttgtcaaaacatacctttctgtctctttaagaattgtcttaatctccttaagacagattctattttatccttgtcttacaaataagaacattaaagcaggcayagagaggttaaataatgtggtgtggtcacacaactgttaagtggcagaggcaaaattcaaatccagagagcctttttccacagcccccacccttatttgctactccatcctgacactctgaatagaagtactgtcattttatatcagtcaacaaatatttaccaaacatttactgtgtgttcattagtaagatacagaatataagggaagttttatattgtgttcagggattgaaatctaatgggatcttactaaaataggctcacaaaacaactatataaattgcaagtcaagaaggcctatattggaagtgtaaactactgtaggaacattgaagaagcaaggattactctgattgggaaggcttaatttgcttttatagaggaaacagtgttttcactgggatgtgtaagctttcaaggcaggtgtgagtgaggtagatttaggcaagaatggggaggaccttgaatgccacactggggagtttagacatttggccataggcaattatgagccttcaaagattttttgagcaagtaaataacatgatcrtattggcatttaggtacaaaattatagcagcatgaaaaatgaaytaaagatggtttgttgtgttggagaaatagagaatgtcagtaagatgaagtgtcatgaagatggcagaagaccatatgtgcccatcatccccttgcttaccaagtccttacaggaatttacaggagatactgtttcactgtgtgttgttttaaagagtaaatctccagtgatgctggaaaacaaggaagagtacacacatacacwcacacacacacacacacacacgtatgtttttgtttttgtgggtttgttttttttttgtttttttttagttttgttacaggccataaacttcaaaagactcaaagcagataggattgtatcgttgaggaaaaccaacactctaaaacgtgcaggagagaactgctccagaaggggtaggggtactgggtgggctgcacatcagacatatggatgcaaggctgaggaagggcatggggccttaagcagggtggttagttggagggctgcatgaagagcagcagagtaaatcagcgccttcacatttgcttgcttacattgagcagaaggcagttgatacttttagccacagcctaaggcactgaatgtggggcttgagctaaagaggcagagcaatgggaaggcagctaataacactcaggaaaaatggtagcacccccttctgaaaggaaggcaaccagaatacctcatctagcagcatgtccctggcatctatgacaagcaaatagagaactcataaaaaaaaagaaaaaaaaaaaacagccaggaattaccaaccatttttgttgttgttgttgtttttgagatggaatctcgctctttcacccaggctggagtgcygtggcgygatctcggctcactgcaacctccgcaccgccgggttcaagccattcttctgcctcagccccccaagtagctgagactacaggtgygtgccaccatgccctgctaatttttgtatttttagtagaaacagkgtttcaccatgttgatcaggctggtctctaactcctgacctcaggtgatcyacccgcctcggcctcccaaagtgctgggattacaggcatgatccaccgcgctaggccaacacacatgaacctcttcagatttcaagtgctgtkcatgtagcagacacttatatgaaagtaatcttttaatgaatgtagtgcaagttaaataaaattttctttttttgagacagggtcctactctgtctgacaacccaggctggagtgcagtggtgtcattttggctcactgcagcctcgacctcacaggctcaagccatcctcccacacagcctcccaagtagctgggactacaggcgtgcaccactacrcctggctaatttttgtattttttgtagcaacggggtctctctgtgttgccraggctgctctcaaactcctcccaaagtgccgattataggtatgagcctggccatcaaacaaaatttgatagagaataggttctaataaaacagtttactgraactgagtaatttaaaagtgtttttttccctgacyggaaataagaaaaagaacgttagtactcacttttcacaatttcataaattacatcttatgtcacaaaatgacagcttcccactatataagcagagtaaggcttctgcttgttttctgagatggagtctgatctgtcgtccaggctggagtgcaatgcacagtctcggctcactgcaacctccatctcccaggttcaggtgattctcctgcctgagcctcctaaatatctggtattacaggcacgcaccaccatgcccagctaatttttgtagagacagggtttcaccatgttgagacagggcttcaccatgttagccaggctggtctcgaactcctgaccacaaatgattcactcacctctacctctgaaagtgttgggattacaggtgtgggccaccacrcgcagctgagtaggtttttaatattggatacttacttgctagaaaaattacggagaacagaatgaaagtaataaatatgaaataaaatataaagacatccttattttctactttatcaaaatgtttttcctaaacataatacatttatagctgacatttgatggaaccctggcaaataaaacttaagtaattaaataaatgcatgtctttaaaacatccttaagtgatggaaccacaaatgtgagtgctgctcagaatctttgcaccctaagctacacctgtcatgattctttctgatttccactttcatagaggtgacccacttaygaccttggcctctcaatctgttgttcttctttcttctaacattcttgccctcagactaaccttakccatggttatgccttaaaactgatcattatcaatcactatagccccctctcctcccacccacagtaatctcagtctcgagtatcttttaactttccagctctcttcttctaacatacagatctcaataattatcccataccactaggagctcaaattcattgatccaccttttcattgtcaattacctctttatcccctaggtcctctcttcctgtctttctcaatttaaatttttttgtacatcattatcattcccttgcctctctctaaccctcattaaattcagggctatttgtgaccatattttttctcttaaagatgaactaccattaagttgatacagctaacatttttttaaaagcttttgaaatcaatagcatcaaattggttcattttaaatcaaagttgttaagatctctactgtctttataaaatacaagtctttcacagtaatgaactagcttcacattttgtgtgattcccataatctattgataaaaagaaatgcaattattatttttccccgatgtagatgaaagcagactttacattgggccacagaaaaacccttataagcactgtctatatataacatgtatttcataaataagttagcrtttcatatagctagtgtttttcttatttataccatatgactaacattaatctatatgtgaatgtatgtttaataggaaattgcccggcatttacgccctggaactctcagagcaatctttggtaaaactaagatccagaatgctgttcactgtactgatctgccagaggatggcctattagaggtaagataaagaaggtaaacatcctatttatatttcaagctcataaattatctcaggagttctgatgtgtaagaaaactttttgttttattgttatacttcaagttctaggttacatgtgcagagagtgcagttttgttacataggtatacacgtgccctggtggtttgttgcacccatcaacccatcacctacattaggtatttctcctaatgytatccctcccctatcccccccaccccctgacaagtcctggtatgtgatgttccccttggatgactctgttacttggccatctgatgattttggactgcaactttgaaagaccaaattgtagcatgctgcatagctttcaaagaatttagatttttttttctgtttggcatacattttgattttaaaataattaaattctgtgaaatttgtttttatatcaggtgactataccatcaccataaattgctagtcatgaaaatacatacagttgacccttgaacaatgtttgaactgtgctggtccacttatatattcatttgttcaataaatatattagaaagtttggagatttgtgacaatttgaaaaaactcttgggtgaactttgtagcctagaaatatcaaaaaaatagaaaaaaatgtgtattatgagtgcataacatatatatagatactagtctatttatgtgttaatcgactttttgttatcgatgaagctcccggtcaacagcattagtagttaagcttttggggaatcaaaagttatatgtagatttttccactgtgcaggggataggtaccccatacctccacactgtttaagggtcaactgttttccaatgaaattaagaagtctagccaggctcagtggcatgcacctggagtcccagctacttgggaggcttaagtgggaggattgcttgaagccaggagttcaaggccacagtatgctatgattgcatttgtgaatagcccctgaactccaccctggacatcatagcaagactttgcctctaaaaaggcggggaaggagtctaatatacagtgtgatagtgttacccatggcaaattcatatgggtctgcagcaacctcagtayctgcctcttcagaagaaagaattcaactgaggaagcataaggcagaaggagagactgaggcaagttttagagcaggagtgaaagtttacttaaaagctttagagcaggaacaaaagaaaggaaagtacacttggaagatggccaagcaggtgacttgaaagacaagtgtatggcttgamcttttgacttgaggtttttatatgatggcatacctccagggtcttgcactacttctgaccacttgcccaactcctgagatcttattgagaagccgctcgtcaccagttttaggtgttttctatctactaggagacygccgttccctggcgccagctgtgaccaattattacttcagagagacagttaacaaccacctgaccatcacctgatggtctcccaacactcctggtgtgaggtatgggagccctttcctgccctgctcatacccgactagctaccaagtataacaatagcactcaaagtgatagctaacattttggtcacctttattaaccagattctaccatgacacatgtgttgtataaatgatttcttttcattgccatagcaactccaataggctggtattcattatatctgtttttttaggaaactgaaattgagactcagagaggttaagtaacatccccaaaccagacagctaatatgaaacaaagccatatttgatctctcatcttttaaattaacataaaatatgaaatgaaaaattctgagaaaatataagtgaaaatgggtccggtttagggttaagaaagttatttctaggscaaaatccaagaaggaaactgtaaataaawattttatttttttaacttcttatagattttaaaatttttgtgtcaaaataagctaaatgaaatttaaaaagaaataataaatttaagtgattaaatgaagaaaaatggttgatatccttaatacacatttattttaatgagtattatgttttatgtgatcaaatctattagtcttttaaaaaaaaattatgtcctggaagttgtacatagaaaagccttccccaaatattttgttttcattttcatacattgaaatgttcaatccacctggaatttattagacatatagtgtgaggtatggatttagccagctatcacaatattgtttattaataataaacaatttattttatttaaatggctaaatccatccatcctttcattgttctttctcatttattgaatacttatatacatccttgcctgtttctgaacttcctattttattccattgatctgtaccagcaaaatactgtttttattattgtaggttatttatactttacaaaagtgttcttggttagtccctaaaatgtattcctccaaatgaactttttatttatttattgagagggagtctcactctgtcgcccaggctgtagtgcagtggcrcratctcggctcactrcaacctccgcctcctgagttcaagcatttctccagcctcagcctcctgcatagctgggattacaggtgcatgccaccatgcccagctaattttttgtatttctagtagagatgaagtttcaccatgttggccaggctgtctcctgacctcaggtgatccacccacctcagcctcgaaaagttctgggattacaggcatgagccaccacgcctggccaacctccgaatgaactttaaatgactttttaccgaggtctttactccacccctacaaaatgcaagtgggacyttcagtgacattacaatatgtttataaattatatggaaatgtcatatctgtaatagtgagtttctccaacttcatatgtggtatgcctctccttttatgcaagcagtagagtcactttttttcatatagttcttagtaatagtctattaaatttatcaccataagtttctttgttgttgttatagaaaatgactttgttagctccattaagattttctgttataatccaagatatttgtaaaaccttatctattatgcatctttgtatgaaatttagacatacttgtgaaatgtaaaaatgtaccaagctttattttttaataaccaaaaagattaaatgtttattttaaattttaacttattttataaataaatatttcctcactttctgatagcttggacctatcaactaggtttgaatagagacttttayttaatgagactgaaatgttattaaccatgaaatttatacccattaaaaatattatccaagagggcctgaggggaaaaaaaggaaaaagtattatctaaggtatgcctatgattttgttcatattgtttgaaatagattattactgcctgtagtttgcaaagccatttactaaatgattgcaatttttctgatctaacttcactggagatttcagtgtacattaatgactgtgtrgtttagagaattaatcaaaaatcagaagttagagcatcagtagcttcctcttatatggctgattattttcttgatatgaacttgaataagtcacattttctttccatgcctcacttcttttatcaataaaatgaaataaagagtgctgagatagtcaaggatgcccttatcaattagctactttcagattattatttggcttcagatgataaaatattatgaaaatacataaaggccaaatgaggtatctggctataggtcttcaaagtgaaaatccgagtgacacaagacaagttgtctgatcagtgagcactttgttcctaggatcagctcttcattagggggacatcctttagatgcagagtgaccataaaatttattgcccaattaaacaccctttgaaaggcagctctaatcagaaaagatgttcggacaagaggcataaaccagaactgtcacacgcaaactagaatatattgttatcctatttatatggcaagaagagaaagaggggaacatgctacttctctttaatctttccctaatgtgatgtttactgagctatgtgtcatgggtatagagctcagaaagtatggcttcagtttatattttgtcattatccattattttatttatttatttatttatttatttatttttatagcaaacaattatagaacatgttttacttgctggattgtgataggatcaaacaattcatttctactgttctcctagaactcatagtaagtttgagaggtcaaagatcttagcatgaatacagaaatttgttttctttgaatattgctaattgtgacccagtcaattttgtgattataggaataaattatggtatwtataatatgagacattctagaatgttctgtcactgttaatgttctcttatactctgctggttgtaactacaatgatcttaaatttgtgtgttaaagatagcattgatggtaaaatgttcagctgagtaatcaaatactagttttctattaatggcaaagaacttttgaagtaataatgcccactgctggcaatgctacagtaaagtagataccctcatatagctggtgacaactatgggcaaaacatattgaaagccttggaatatttctataacttttgtcccagaattctacttcttaggatctaagcaaaggaagagagtggcagcaggactacaaaatggaaagttatctgcacagatgttcatggaaggagtatttgtgatcattaacaatggaaataataygcatgtttacagatacatcccaccttacctcctctaagaaaccttccatggcacccatagtctgcatcagtccgtatgtgtgttttcatagcactttgccttcctatactatagtggtgtagccaagtcaraatagctctgtactcctgggcaagttactcatctcactatgcgtaggtttcctcactctgtaaaacgaagataacagtacctgccctatcaaatatcattgtgcctagcaaatagtaattgctcaacaaatgatagtagttattattattattactattacagcacagtgtctgtttgctcatgtgagactgtgagtacacatagtagggaagagattttttcttgcctggcatataaaagctcttcaataagtgatttttgaaagaaaggaaggaagagtttagttaaataaattrtattttttgcactcggtgaaaaagtatgtcacactttatagagaagactctataacagtgtttcctagccttggttgcacatcagaatcacctagccagttttctaaatactgacgtccagactcacccccagagattctaatttttttttttttttttgagrcagartctcgctctgttgcccaggctggagtgcagtggygcrgtctcgactcactgcaacctctgcttcccgggttcaagctattctcctgcctcagcctcccgagtagytgggactacaggtgcawgccaccaygcccagctaattttttgtatttttagtagagacagggttttgccatgttagccaggatggtcttgatcgcctgaccttgtgatctgcccgccttggcttcccaaagtgctgggattacagatgtaagctaccacgcctggccaagattctaatttttttaaacaactttaaacttttagaaaagttgcaggtacagtacaataaattttttatgaacatttgagagtaagtcatcaacattatgtgcatacttctgaatcctttagtgtgtatttttaacataaaagggcatttttttttacataatcacattacaagcatccaaataaggaaatcaacattcatttattactaccatctaatccttagactccactcagatttcaccaattgtctcaataaggttctttgctagcaaaaggatccaggtcaggaccatgcattgcatttagttttctccttagtctctttcaatctggatcagtttctgaatttttccttgactttcatgaccttaacacctttaaagataacaagtagagattctaatttaattgatccatttatccctttgctcatcagaaatttttctagatggcttccacctacagttctaacaagatactggcaaatttattttgctgtatggcatacrttactcatacgagatgtcatttgttggctcccccttgtctatgaaaatgaatgatgcctttgtgatgttatgactcaacctcgtgtacgcctcccctcttctccacttcagtgttagttgtcatctcatgtcaccagtgatacttgtgagaggcagttttactttctccttgcttccttcatctttccccaggattcgttgaaaaacatctttgggaatcattgttatgtggggaaaataatatctacttctttgcctttcactttacctttaaacatgtggtcttttccaaggaccttctttttctgattttctcttatgggaacaaccaaaactttgcatgtactaaaattgagaacctcaatgttgctgaatgggtatatggtagaaaattcaagtatgttcaaattttaattctgtataccaaaatgataggtcaatcattcatttaggtacttttattattattattattttgagacaaggtctcaccctgtctcctgggctggattgcaatgtcgtgatcatggctcactgcagctttcacctcctgggctcaagcaatcctcctgcctcagcctcctgagaggctaggactataggctgtgtgaccatgcccaaataattttttttttgtaaagatggggtctcatcrtgttgcccaggctggtcttgaactcctggatttgagcaattctccagccttagcctcccaccgttttgggattataggtgagagtcaccatgcctggcctgtatttatattttttaaacattaaaacacttcactgagaacacagcagtaaacagaatacatgtggctcttatcttcacagagcttacctttcaggagacagttatgtatagcaaatattttataggatgatgaaaacataggtctttcctgtttttttttttctaaatgttctgtaacttggtgataccacttttgtgattataaaattttaagaagcatataaaatatttaattgtatgtataagtktaattgcccaacgggttcttcctgccccctgcacagagaaaatcagttcaccaagactgtggtattgaagttaccattttaattgacaagaggccgcccacataagagatggaattattactcaaatcagtctccccaaaggatcaaaggttaaggtttttatggacaatttggtgggcaagggctaggaagtgtgtactgctgactgactggggatgaaatcatagagatgtagaaaacggtcctcttgtgctgagtctacctctgggtggggccacaggatcagttgagtcataagtcagggtcaaggtgaggtccatcggttgccggaatgcatatctaaaaaaaacatctcaaaagaccaatcttaggttttacgatagtgatgttacctatgggatcaattggggagatcacaaatcttgtgacctctggaccacatgacccctgagcagtaaagcattatagaacctaggtctacattttagcagcattcaggcccctcccataatattaatattgtggcttttcattagttttacaaagacagttttcagttccctagccaggaaggggttagttcttgttttcaggttaaactatagactaagttcctctcatggtgagcttggctgacacccaggaatgagtgaagacagccagtctgtgaggccagaagcaagatggagtcagctatgctagactcctctcactgtcataatctttgcaaagtcagtttcataagtagttgatcaaatctgaatttggatacataattacttctgcatggattcttattctggtacactctgggggaaaaaatagtgaatcaaggattaatcagaaataaacataggtgcatggtgactaagatgattggacaggccccaatttcttggccgtgattaacgcaggcctctgcacatactgacactcataatttatctttagttttagcttctatcttgaaagaagaagagttgtgatttttagtagtacattgtcaaagagggaacaacttgtacaaatacaaaagcaaacagctttctcttagagatctaaaaatagtgcagtaagactggggctttgaccaggaggtagaaaatggcaagagataaagctggaaacatcagcaggggcctcgtaaagtcatattaagacaactgaacttcatcttgaggccattagggatccaaataaatgttttactcaggggaatagcacaatgatacctgtgttatagaggtcactctggctgcagtatagagaacagatgaaagggccctggggtcaggcagggaaacaagtgggtggagtctagggggacagagactaggtagaagtctattaagtaattcaggagaaaattctggtttcctgaattgctatggcagaagggatagccagaagcagtgagcttcaaaagacatttagtggggtagaacagaaagcctcagagactaattggatgtgaaaggtagcctgtgggaatgaatccagattaatgcctatccccaagcaaacgtgatagtaccatctttatctgtgttaccaaaatctaataatctaaaaatgtctgaaaaccaaagttttttcataagtttaatggtaaaacctaacctgtcttatatcaagttgtgtatcattaaacagttttgtttcagtagcttgacaaaacatttaatgtatatcatttttatttaacctatttagtgtgactcttcacactgctgtaaaaatattaatgtatttgatgatgagtgacttcccagaccccttggagtattatataatatatactatatattccagattattattgtaaattccaaaacatctagtaccaggagtcttgaataagagatagtagacaaagtttgaagtggccatggagaaagtgctgatgacagaatatatatttatgggttgtatttacaattcagttgatttaggagattacatgtattatggtgttattattttctggtgaacagtttggcccaggggtgaggtttttacaggagggtacgatgaggaaagataattgaggatgttagcaactatagttgaagttataaacaaggaaagatgtgatggcaggaggtgcttgaagaaagggataaagtagatgggccaagggaccgaatgcttttctaaggtacctacagagaccccaggaataacagggaaagagctgtgtcactgtacacttcagaagtggagctttccatggtaatggatgatatgattcagggtgtggccatggaaggaggtagccmgtgtggagtggagatcagtatcagtcactagagatatgtaagtctaggaactgagagaagctttcatgttgagtggcattgaaatcacctaggatcatggttaggaggtagggtggagargaaaatggtgactcaaattctgaagtctttcacaaactagggaagtttgtgaaccaaaggtgtgacagcaacaaggagaaaagatctagccagatggcataagcctcaaaaagtcaggagttcatatataaggggaggaggtcttaaagtagcactgggacaaaggatagaactactcctaccctcctggccagagattcttatcctgcggactccaaggaattgatgcccttaggggatatccaagtttcatttaaggctaagaggcctatgaagagattcaagtttcaagggagtttacaatggcactgaagttctgcagaaagcaataggaatagttagagattgrggaagggaagaagaatctcagagccatgtgagaatagcaggatcggagaaaagaggtgaatataatggcctccatgttggtgggttggggtgtgacaaattaataattaattttctggtcactagtaaatagagaccytaaaatcatctttaaaaatgagaacttttatttttccgccccataatttgagatctgaaggtaggcatgtgggactggtatggcaactccgtaataccatcagtcacccagtctcctcctccttggtaccgtcatcatctttagtatgtgctttttgccttgttgccacagaatggttgtcagaactcgagttatcacttcttttttccaggcataaagaaagaagagtgagggcaaaaggcgaagaatgccagctgagctaacacttcctccctcgcccacctttaagcttttccaaaaaccagagccctcacccaacagcttcaggttatgatttttgttgttgctgggatttagtactgtggccgcccctttttagaaaggaagtgagtaaatgtagttctgttacttgggaacattgctcccactagcaaaaatcaagatactgttagaaggaagaaagggagaatgaatgttggaaaggtaaaaagcagtatcttctccaggtggtcaagaggcatttagctagtaaacaggcttccaatggaactggccctagctaatccctagtgcagtggttcttatgtgtcctcccctgctccagaacagctgcatcacctgagaacttaggggaaatgaaattctcggggtccactgtaggccagctgcttagcaactcggggatttgacccaggaatctgtgctttaacaagccctccaggtgcttctgatgcccatgaaatttgagaactaccgtcctagtgcagcggttcccaatcaatggcatgcattaaaatcacctatagagttttttttaactatgtaagcctagagccctattatagaagattctggttaaggaggtctggtatgagctccttatatctatagagtagagccccgttattcatggtttcactttccacagcttcagttacccatggtcaaccatggcccaaaaatataaaatggaaaattccagaaataaacaatttataagttttaaattgtatggtaccttaaagagcagggttgcaaaaattaaaaaataaaaagttttaaattgtatgccattctgagtagtatgaggaaatattacagtatattgttataattatgctattttattgtkaatctcttactgtgcctaatttataaattaaactttatctctcatacatatggaaaaacgtagtatagatagagttcggtactatccacagtttcaggcatccactgggggaactggaacatattccccacttataagggggcactactgtattttatgttgcaggtgattctgatattctgatatggctgatagttaaactagcatttagaaaccactgtcccagtgagtaggggcacaccagacttttttaaaacttgtaaaagaacctatcaacatagtaaacagacaacctatcgaatgggagaaaatttgggcaaactgtgcatctcacaaaggtctaatatccagcacttatacaaaacttaaacaaatttaccaaaaagataaaaaacctccatcaaaaaggacatgaacagacacttctcaaaagaagacatacaccagacttcttcgaagtcggctttggttctgcttttgaggaaagcctagaccctgtgagaaggccagcaaagggattgttttgctttcaggacttaactgacagttggaagcagcagcagcctcttaactttgaaaggatcaatagcctctctagatggatttaattgtagccaagggttgttacacttccaasggaactccagtctctgaatgggggaatctgtggcttctstggaaggagccagccatgacctgattgattacccagattttttggggggaagtctcaatgtgaaggctgccatttgccctcccagggaggaggagaggcctgagatatgtggtatgcatgtattgcatggatgctgagggtaacaagggcagaggccctgggtttcttgcagcttaaaatagttatctgcaggttcatcaaatctgcactcaccatttggcatggtcatgtggctcagaggtgtacaggggaccaactcttgtcattctccctgtgggttgtgtaagtgccttgaggrcctgggcttataagggacttttgtatctccagctgctaacatattgcaggcttttagtctgttgagtaaatgcatgtgggaatatatcatgaatggggacagtgcacctccataccctctctctctttatgtggcggaaatgtctcaatgacctgakgagagtgagccccactttcaagtaccacatctcaccattccctccacctgccagttgccagaaaagtccactgcagcatcccaaaaatgtgaacaattattatgtatcaattaaaaaggccacgtccaccagcatcttctttcattgctgtttattcaagtaaaacctgaaatatgtgcatgtggaaagcgaatggtttgcatggattcttttcttccttctcaaacctgatatttcagaagtctctacattcatcgtaaaaacatcatgataatataagaggccttaagctatcaaattgtaattctttatggcccagttagtatttcatcagcattggttgttttctcagataaaagaatcttggatwaggagcaatttcacattccctcctatatcccgtcatagtggggcataagttcattgctagattcaaagggagttacaggttcataggtctttctgtttctcaagtacagtgccagctccacctttcttcagataggctgccttctgaatctgaaaagtaacaagcttaatgacttaagaactgtatttaatataatttatcccactttatataggcacttataaaatcatttgccraagactctaggattattttagattaatttattttgkataaattggttaattaataactatggaaaatccatataaaataaatagacacaatcattggactaaaagtgaccttacagggggcatttaagaatctccaggcattttgtctcagcactttttgcatcttctctacctattccctgggaaatggttcttcaaacagtagcacaattcctggatggctttttaattttttttttaatttttttgagacagagtctcactctgtcacccaggctggaatgtagtggcatgatcacagctcactgcaacctcgacctcccaggctcaagtgatccctcctcagcctccctagcagctaggaccacaggcatgcaccgtcatgccccactaattttttttttttttttttttttgtagagacagggtccccctgtgttgcccaggctgctctagaactcctgggctcaagcaatcgtcccaccttggtctctcaaagtgttggaaattacaggtgtgagccaccatgcctggctgggctttttaaaaatacggattgctgggctgtaccccccagtgtctagttcagtagacctgagatagagcctgagaatttgcattctaacaagttcccagttagtgctgatgctattggtttagagtaccacacttggagagccactgttctgagccaaaaaacactgtgcactctccattaagtcaagttgttctcttgattaatttttgtcaagctgttgtcagatttgacatttcacagacctggaacatttcaaaaaaaaaaaaaaaactaaacagtaataaaacccacttcagggatagacacaatgataaagtttttaaaatttaacaaatgaagacattagaaaaatttgtttcccatcatcatcgttttgttttaaaaggacatttaatcaccaacagcattttatcacagaataatggactgtctcttcaactgaataaattcagctttacctgaagctcactttattgctattgcatgccaaaggcatgatggtcgaagcagtccacttcaggcacaggcaaaacagcattgcatcttctgtrgatcattttaaaacaataatagaatccactaatagtttgtctgctttttgttatcaccataaacaggcagttccaaacaacgtcagtgagaaaatactgccccttccccagggtggactactcctgccaacccttgcttcatcactgctttgttgccctcatttttcccattttgccagaaagcagtgaaatgtcatcctagaccctcaccatctgrtggttgggagcaactgggctaagttacacatgcttatggagtctttgattgataattttattcaaacttgatatggaaaacatatatcacatttcataggycaaagaggaatgtaaactagttgagtcctgcgagtggtgattttatctatgttaaagaaaattgggacaggtgctgtggtaatcccagcactttgggaggctgaggcagragsattgcttgagccaaggagttcaagaccagcctggacaacacagcaagaccctgtctctatcttaaaaaaaaatttttttwaattatacaaattttaaaaacatattttaaaaataaagaaaaaatcctttataattatttggagaaatagagtattctttaacacttatacatgggcacaaatatttttaaaaatatttatttaactaggactaatggacaaaggtagaaaattctgattttttttttttttttagacagagtcttgctctgtcgcccagactggagtgcactggcttgatctcagctcactgcaacctccacttcccgggttcaagcgactcttctgcctcagcctcctgagtagctgggactgcaggtgcmcgccaccatgcccatctaattttcgtgtttttagtagagacggtgttttaccatattggccaggctggtctcgaactcctgatctgctcaccttggcctcccaaagtgctgggattacaggtgtgagccaccgtgcttggcctctgattttcaaattcaaaataaaaagccagagatttttttataatattgagttcttcaatgtaacatgaggaattaaaaattaattttatctccttaatccatggcttaattttaagttaactaccacatgttattttatttaaatttcattcattcattgatatgaatccgcagtcatttcaccaggtattgttttgaagatacacatttctgcccagcacagtggctcacacctgtaatcccaacactttcggaggctgaggtgagagaatcacttgagcccaggagtttgagascagcctgggcaacatggcaagacccagtctctaaagaaatacaaaaattagccaggtgtagtggcatgtacctgtggtctcagctactccaaaggctgaggcaggaagattgcttgagcctgggaggtcaaagttgccatgagctgtgatcatgccactgtactccagctggatgacagagtgagattctgtttcaaaatataaaatgtgattatccctatttgactgggcacaatagctcatacctgtaattccaacactttgaaagaccaaggcaagaagatcacttgagcccaggagttcaagaccagtcggggcaacagagggagatgtctctacaaaaaataaaaaaaaaaaaaaaattagccgagcatggtggcaggtgtttaaagtctcagctagtcaggaggctgaggtgggaggatctcttgaggctgggaggttcgagattgcagtgagccatgatcacatcactgtactccagcttgggtgacagaacgaaactttgtctcaaagaaaaagaaaagtagagggtttagatggaaaagataaaaaaaatgtaaaattaaattgtaatataaaattaaacaccagcataagagaatgttaccagatagtgtatgatgaagtgttagaaacagtaagtatgagagttcaatggagagcagtatgagtgtggctgaagggggtcaggaaaatttcatgaaataaatttcatgaatttaatgaaatggtatttgaagaataaggcagatttttatacacacagaaaaagaacatggcaggctggttttaggagacattgagttcctctggttgaagtggagggttcctttggtagagtatgrgagataaatttggaaatgtaaattagagctagattgtggagactttggaaagctttctgatggcaataatgaacattatggtaacagtgataaaaataataactttaatttactaagcaatatataccaggtactatgccamattgtttacctgcattacctaaaaactctgttgaatagtttctattatctccattttatatgctaagagagtgaggctcccataggtgaaatgacttggccaggatcaccccaccaatgagtggcagagagctgaaatttgaacccaagtttgtctaagtccaaaaccagtgtttctatacagcawactaggtcaacgatgacaaaagtgtttcaattcamgtgccagtttttgatttattgataaaactacaaccaaatagaaaaaaaaaatcaccatgatggattactgatgtttgctgtaaatgctggatgggagtttcttggtatgtatgacacacagtggctacttaggctctagaaaactggaagccatcaaaggtttttgaacagggaagtgactcgataaaggttccaaaactttaaccaagcagcagagtttaaggtgagtagataataggagtaatggacgcgtatactctgatcatccagtaacaagtcttaaggacctggtagtctaaaataggaccattcagaaattttcttctccttcaagtgatctatttctactatcaaggtgtaattctttgaagagtatctgtctcctyccctgtcctctatgatccatgagaacagtgaccttgtgtgttttgttcattcctcarttctccagtgggtaggcattcaatatagttttcttaaatccagtaataataaaagcaatgatgatcatagaaagcactccctttgtgcccagactgggttaagtactttcagtacagcaaatgcatatggaatcagactacctgggtttgaattctagctctgccacttactagctgtccaagcaagcaggttaaactcttgtgcctgaattgcctcatctttatggtgggaataataatagtacttacctcagagagcagcagcaagaaatagattaggtgatataggtaaaacaataagaataggaagtattcaattaaatattggttattattattattatctttttaaattattatctttaccattctatacttaacttgtccattagaaaataaatatagtagagtcaaaggaaaggctatatataacttctatggcaggcctgtttcgtgtcaggcctgttaggctcttttataaatgatatcccagctaagttaaaactctaatttcactgtcagaacttacttaattatctttttaccaaatataaaacccacacaaatctggattttcttttcatttcaactgattatgggctttaacaaatctggtttcaaataatgtatttttaaagataaattggaaatttatcatgggagggctcccatgaggatgcaaggcaggctgaggaggcaggcttcagatcaggtcatgtaggggcaatgaacccgagggaggaggcagatggacagaggacatagacagagggagggggtctgcagagggaaagagatactgaccgaggtctggaatgaccatctctaccaagaggccctctgcctcccacagggtgtccagacactggtgcacacattcttacccaagggcctgggctggcacagccctcaagaaggtggcacccactctggcagtcagtgggtctggcctggtggaaggatcatcacaggcttcagggggctggacagcctgggggggactagcggaggtcatctcttccagcctcctgccctcaaccaagtccagctctgagccctgggtcaccgagggccaccctggattcattggaatccctccacctccagtaggtcaagttctgtagaggtctgaggatggtggtcagctggggagtcaggagcgggtgaagagggtcacagttctaccaaagccttgtccagtcatcctccatcccctcgaggcctcttccctgatctcccactccatcctgccacttcactcatttcatcagctgcccctgaagcacccgggactcaggactggttttatcttccaaggccttggtgaagggctggcccaggatctacagccacacctcatacagcaycagctctgccttcccrcctagagcaatgagggtggagatggcatcagcctgggccccctctcctggaagccctggggtgggactcatacccaagctctaatgctccaatccagcagtcaaccaatgttagtctaagggcccatcccttgctgcctgtttttgtgcggcccatgagctaagaatggctttcacatgtttaaatggttgaaaaacatcaaaagtagaataatattttgtgacacatgaaaagtatgtgatatgcaaatttcaatgtccataaataaagttttataggaacatagyggrgaaaaggcttttattcttttagtgtagccttttatgtttgaagagcaaattatattgccttgcaagaaattcaaaggtcagtacccaggtgctagcctctgtacctatctgaacttgctcctctttttttttttttttttttccttttccagcctctcttctcatcatataaaccctcttgtctgtcacctggcagtacaattaaactcatggatgattcccttttgtagctgaagtttgagaggcaaaagttagctggttaatagaaaggaagtgagaatacatgttttttctagacaaccaaaatatccctttgcctactgtttattaaaaacaaataaaatcaaaagcttgttccatcaccactaagcaatgcttgtctctattttgtaggcctttactatgatgatcttcagtaatgttaatatattaagtgagtttggccaattcttgatcttttatcataatggagaaattaaggggttagcaagggcccttgaaatccagagagatactagcaactatttgtccattaaatgcaatgtatttacaatataccttaccttttttataacaagtatacagatagactagcttgcccttagactcttaaatatatttttctcagctgtcttatagagcacaaaaatatttgttatgggcttaatatgcacacacacacatacagacatacagagtaaattagagacaatatatatacatattgtaaactagagacagagtctcattctgtcacccaggctagagtacagtggtgcaatcatagctcaatgcagccttgaattcctgtgctcaggcagtcctccactgtcagcctccaagtagctgggactacaggcatgcaccaccatgcccagctaataaaataagtattttataattgaatggaagtgattaagaatcatgaagggacccaaagtcataaactagaaagatgttaaaagactggctcatatcagaactgtataatccgaattcaataagtcagtatcacagtaatctccccttatccacagttttgctttccattggtcccagttactctcaatcaactgtagttcaaaaatatttaatggaatattccagaagtaagcaattcgtaagttttaaattacacaccattctgagtagcatgatgcaatctcatgctgttctgctttgacccttcatcatcacaagaaggatgaatacagtacttaagatgttttaagtgaaagaccacattcacaacataactgtaattacagcatattgttataactgttctattgtattgttactgtttttgatcccttaactgtgcataatttataaattcaactttatcataggtatgtttgtataagaaaaaacatagtatatgtagggtttggtactatatgtggtttcaggtatccgctgggggtttgggatgtatcccctagggataagggggaaatactgtaataaccaaatataatcctctagcagtagagagaaatgtgtaactaaaatattaacttctcttagttaaatattatttattttatttttttattatttttgagatggagtcttactctgtcacccargctggagtgcagtggcaggatctyggctcactgcaacctccgcctcccaggttcaagcaawtctcctgccttggcctcccgagtagctgggactacaggtatgcaccaccacacccggctattgtttgtgtttttggtagagacaggatttcaccatgttagccaggctggtctcaaactcctgacctcaggycatccacccacctcggcctcccaaagtaggattacaggcgtcagccactgygccctgcaagttaaatattacttaaaactaacaaatagatatgctcactagtgctcttatttctagtaatcttgaagttgaaagaacttccagaagagcattggtatagaatatattgtgtgtatgggcatcttgtgaaagagaaaactgagaaaagatgccaaggacaatacatgtatgggtacatggctttgatccacatatcaagtaagggagacaaagtgccctttttaacctgtgacttttgtgtctactcacctaagacagctggtattgtgttcacattaccaaccaccaacactgtccagtcccttcattttcctggctctggaagactgaggagaaagatgaaaccaattcactcattgtgctttgctctctgcagtttgaccctgaactcttgactttggtctgctccctgcctcatttttcagtcagtgactaagcagtttttgagttaataagtaactcttaggtgactgattaaaaattctaggaggtgacttagaaaggagtctaaaacatggttgccctaatagaattcatcctgtttttcattcataaaatattacagctactcycactttggctttagggtgaaaattgttaaacctactactgttctttgtcctttagacagttatgggctttcctgttttaagaggaaacagaagactagtctaacaggaaaatattaggctcaatgttttcaagagcacatgtattgagaaggttttgcaggttatggaaagcttttaaagaaatgagtccgggygcagtggttcacacctgtaatccyagcacttggggaggccaaggcaggtcaatcacttgaggtcaggagtttgagaccagtctggccaacgtggcaaaatcttggctctacaaaaaatacaaaaattagccaggtgtggtaatgtgcacctgtagtcccagttactcaggaggctgaggtaggagaatcgcttaaacccaggaggtggaggttgcagtgagcagagatcaaagcactgcactccagcctgggcaacagagcgagactctgtctcaaaaaaaaataaaataaaagaaacttgaaagaaattttctttcaagaaattgaaattatttctttcaagaaataatattgtatgagcaattttctgtgagataattgtgaaagaagttataacaatcgctatatccttctcacctttaatctgaatgttaatttagccacaaagatagcaataagacaacatcttgaaagtatcttatccacagcaaagtcacactttcttaagcatagatgaaatccaaactactatagtcgttacttttaaatctcatattgggcaaatgcttacttgatatagttacgaatttgatacagtcatgctcttgatgaagtttaaaagatagctctgctattaaatttatttgcattaactctttcttatcattgcttattgattttttatttttatgtatatggtaggaatattaactagcttgtagggagtcctggccatatgccaagcattggtctaagtgttttatatgcattaattgacgacttcatttacagatgagtaactgaaacatagaagagttaagcaacttccccagggccacacagctagaacataacagagcacagacttgaacccaggcaatctgggtccagaatttatactctctaacctcactgcctttctgtgtgatcttaaatgtaacaagtattatttctttasagttcatgataggatggggagtgagactagaaaaactaagcatgagggaagatataataggaaatagagtcagaatatttggcctccctcaaaagtaattagaatgattagatatttacttaggttttatmcttattaactgatatttttattcacaaacttgtccaactcagttttagattaaaaatataaagttatttattccttaaaaaattcttaactatcargctgctgtattgtcagcagcaagaggcctttgagttcttgagggggatgagagaaggtcacgtgcccctggaattccaaaggattattctgatctcactgtgatttcactgtgcttacccatgagaggggcatagtcagtatttgttgaatgaccaagtacataattctcatctcccattctaataataatgtgtcatatgaggaacaaaatcacaagtactttctcctctttgtccccaytgtccttatacatacttctgttaacatacttggtgtattgttaaataattatttgtttctgtgtagttcaccccttagtgtgaactccttgrgggcaggggccatgtcttacctttgtatcccaagaacctagcctctgtttatcagtaacttagttgattattgacaaatggctgtggaaggaagggaaggagtaaggcagacctagagctgatatccttgtgtatttattttacatttattaaaaggtcaytgggtttaatcatttgaggcttytgaaatatattyaaagatgatatttcttggatttgatatgactcctctgatttaacccctgggaagaggtcactgggatttaaagartatgtatgttatagtctgtcccttaggtacaccacctgattttattgctaaattatgtcatactccaaagggctttggctgtacttttggtgagtttatctgtaattattgataaatacattcatttttgcttaatttatacagaatgcctgtgtgaatcaccccaaatcactgtagcatttaaatttccatctcatggtatagctatggactaggaagtctgccttggaaattagggcttattctttgaaaaaccacagatgtatttattatttgagacaaatgtgtagtatgggatcttttctccctccgataatattaaatgctrtgttctcacttgtaagtgggagccaaacaatggttacacatggacatacatagggaaataatagacactggggactctaaaagcggggagagtgagaagaggatgaagattgaaaaattgcctattgagtacaatcttcactattatggttacaggtatgctagaagcccaaacctcaccatcacacaatatatctatgtaacagacctacacatgtaccctctgaatcaataaaaataatatgaaatgctgtatctctccactttttactttyttyttsaggcccactatactctcatattataccacatttagctcacatctcttgtggtatgcactgtgcactcacaattgtgctggatgctgtttttgtttctaggggttataacaattcgattttcctccataattctatttcttgtttttaaattcgggtcaacatacattgtgaattccatctttgttgtaagcacacccttatttactgcttttactgaccttgtcatcttacagaatagtctactctatcagtgagtgatatctcccattctgtcattaccactatggtctgagcaagagtaggggctggaaagaggctacaatgaggctatctatggattttcagtgggtaattttaaaaactgtgcctccatggaagcttctgataatgcttctgtcctcacctccaccccgcctcccactgtgcttctataactggccttatgacaacaaatgaatctggcataagagagaagagcaccagagtaagtgaaacagaattgwgtgaattagccgtctcgttggattctacccaatcacactgtgaaagtccattatgcattatgcttatattccattgtgtaatgaatggtaattcttctaatgataaatactggtcccctttggtaccaaccttagagttagaaatagcttaatctgttgagtaaatgrataaaaaccgcaagttgaaaacagcaaaaataatttctttgcttggaatatcagtgtacatatctttccgtgcaaagttctccacttttctcattacccattaacttgtttgttactctacaatctccatctgagagctaaaatctgctgcttactattcacaaggcagagagaattataaaacgttatacaatagtagcacacagcatagctttgaatctttccataaagtcatcataatggtacgttttctgagtattgccttcagtttgttttaataaagaattcattgttctagtgtttacatgatgattttctgtaacagaaactgatactgacattgataccttaggctaatgcaatttttagtcattttactggggtaaaaataactttgttgtataataaacaaattgctgaagcaatcctcctgcttcagcttccagtaattgggatggcaggtgcacgccacagtgcctggcttcttctcacattgataattttggtccttctcaggttaacatacatttattgaaggcctgtttgtgccattcactgttctaggcactacggctaaataagacayactcctcattctcaaagaatttaacattctccaggaaaaattgttatcgaaattgacatcagaaagtaaatgctaggagattgatccttcctgggtttcatgaaagcccctatcaggaagtaaatgctaggaggttgatccttattgggtttcagcacaagaatcagatgagcctcctgttagatatgaaatctgctccaagtattggaggatatgttaaaaaaaacaaaacatagaatagtattccaggctgaagaaatagtgtgtatgttgtataatatattctcttgtaatggcctttgtggataattacacattgcaagtattcaattttatttgctagtattccagtttgtcttctcatttgagggatattatgtatccattctcttagctctttaccttggttttttrtttttgtctttgtttcctgagatggagtctcactatgttgcccaggctacagtgtagtagctactcacaggagcaatccctaattccatgtagggaaactacatggaatttgatatagcatagcttaaaaagacattagagaattgcagatgagcatggaaaggtagctaaggctcaagtcatayaattattttatgccaaatttaggagtttgaaatttattcatagggttagtccatggactgactggctgaaattgtttgcaaaatgttgtggatgtattcattctgggggggaaatggtccgtagcttattagatctcaaagttgtccacaataaaaaaaaattgttgagaatatttgcagtgaaaagtttaagtaaatgcccatactgttcactaattagagtgaagtaaggcataaccatatccatgtttcatattacaagaaatgtgatgtacagagctgtcagtgcaatgaatggaagttgccaggaagacttctgtagccaaaactaaaccgtaaattcattcattgaacatttcactgaacttttcctatacaccagaaattggtaagcactgaggagacagtaatgaacaagagctcctrttcagacacacattccattcagggctcatagtctaatgaggaaggcagacattaatcagataatcacaaaaggaaatggacaagtataaattctgattattgctgtgtagtgaaagacaggatgagttgtaatcggggaacctggtgtagataggggattaagaaaggtttcctttagcaaatggcayttgaactgaggcctgaaatgagtgtcagctgaggaaraaggtagttgactccaggccgagaaaatagcacttgctaaagcccttatgcggggaattggttggtgtgttttagaaaaggaaagaagaaatataaaatgcaaaaaaaaaaaaaaaaaagcctgagrtgacactggagaaatagagattgggccatgcagggctttgtgggctattttaagaatatggatctttatcctcaaaacatcaggaggcaacccttgaggggaatsggcrttgacataatcaggtttatagtttttaagaggtctctccagttaccatgtggaaaatggactgaagggggtcaggttgggatagatttgttaaataatagtataacaactgaaaatacattgataccatgtactttaatttatgggttgttataaattcataaaatgtgtctaggcattagtttctccatgtggaaaatgatgaggctgaacttgtaattctcaaagcttggactcccctacaaatgagctgaataattgatcctctgagacctggaggcagcagctccaatccttaaccacttcctgtgccggctccaggatgccatgcgagaatgagcattttctaggtgcaccatgaggtgacaaagattgagaggccctcctctaaacccctttcctgcactaacattccatgattctaggttttgaggaaatcaaattctaatccgacaccttggttttaccattgaggaawgtgttgcccaaagaaggaaaatggctcacctaaaattgcatggcttagtgtatagaacattactctcctaactagtaatcctgggtttttctagtttgccatactgtctctgtatcctttgtaagcagtataatgaattattataattatcaaattgcaggtgcttctttttctttcctctatttatgaacagaagtacagtttattcttttttgattaccagttaagaatttattgctgtaagtcatcaagcatcgttttactaaaacttgaagactagaaatggagaaattaattcctaggaaaacaacacatcttatcttattctggcttagctgaaaatattgcaagactagcatttctatttcaaaatcagcccaaaggctgtgagcatacagaagtgatgaatagaaagatgttagctgagctcttaatgacttttacttgatttgaacttgagttcaaaggtaaatcaaaagtttaaagttgaacttgaatcttactatgccatataggctttccttagccttctggaaaatctaaagtataagggaggtccaggagtatagtgattctgggcacagactctggagtcaggtggtctgagttcaaatccccagcttctcctcctaccaacttcatgacttaggaaaaattacctttctcagactcattttatctacttgaagagtagaaataatgacatttcacagtaaaaattaaatgaagcaatatatgaagtaattttctcttaaatcttaaattacctcagcatatgctttcacaatttctttccaattttaagtgacaaagtccatcccagctattcacttcattatctcatgaattctgattatgtattctctcagcttttatccaatctaagagctttttcacttttctcatctgtccttatwaaaaaaaaggcattccatcttctaaaaaatttttatttctattttctaactctattatttttgtcttggagcttttctaactgaaatgtgtatgaagtatagcaataggaacttcccaagaaataaaatattctgtggtttgtttttcttgtaaagagtactgtaattccttgggtttaattgacaacatcctttatgaggacactcagcatatcagcattgatggcctcgtagacagcagtcttggcccaagtattcagggaatgacgaggacatactccaagatccttttcccgaatcactgtttattgtttataaaactcatcttgtaagcctgctttatttccttatcaatacccaaggtaatcctgttgaagtttactctgcttttctgcccatattccccacttcatcttttgaggcctacctgtctccttggcacattatccatgttaagtgcctccaaggtactgtggatactagtaaatgccaaattaagtgaggggttttattctttccccagatcacatataatgatatcagatgggcttggtttgggctctgatttckgaggcrcctactttgactaactatctaggacagtagttttctttttttttcttcatccagaaactttattgtaaatcatttgtcaacaagatctgcatttctaatttcagtttgtcattcctctgaggcacagagaaaggaaaagatgagattagggttaatgtttattgagcactatgtataaaggatcttatttagtccttataaacaatactagggcagtggctttcaaccccagtggacatcagaagtgtctgtgaagctctttgaaaatgtggacgtctaggacctacccaagacctaatgaatcagactctccagggtgggggtgtaagcatctactttttggttctttaaagatccatagggtgattgtgatgtacaaccaagttgaaaatcaccaatcttgagaactggtctttatatctacaatttcttttatttgaaatctttttttttttttttaaggatagactgttccctgtcaaaatcttttcttctctgggagccacaaaatgaatttctaagaggaagtgtcaaggtcacctgagtttttcccctctgcttgcttggcattcataactgagaaaacccatccctgaagctttactgtagctgatttgtagcagagcccatcctgggctactagtttcagagtgggaacatggggccatatgtcctttttaaaaaagtattatttgtataatgtgctacaactttataaattcacccagaaacttacatgcccactaaatccaatgaggtaggttttattatcttcaatttttagattaggagacaggctcagagagtctaaatgatttgcctaagagcactaggaaatagtggctagaataaaactcaattcttccaactccaaatctagtactctttctgttctttctactgattaatatttttatcattccattttgaaataatttcagacttatagaaaagtttaaaaaaatactttccacaagccctttacctatatttgccaaatgttaatattttaccatgttaatcatcctttyttctgtctttctgtacatatgaatttaattatttataatatttaacagtatgttatagatgtaattcccctttatctctcaatacttcagtgtatatttcctaaaaacactgatattatctacagtcaccacagaaagtgattgcgaatcaagaagttaacattaatacgatactattatcaaggtacagaccttcattttttacccacaaatgtcttctgtggcaaaagaagaaaaatagtttctggttcaggatccagtcagggatcacatattgcatttggttctcacgtctgtttactatcttagttttcaaagttttcttagtctgcctctgctgttcatgacttgaataattatgtatgctatcatctgataagctggaattgacagttctggctgtcagcacttgatggagttattcagagatacttgggttcagtgacatacagcaggatgggccataacattaggagaatatttggaaaccaataatagtgatatttattatgcaatatttatgctggacactattttaaatgtcttccatataattcctcatttaaacttcacwacaaacctacatagtaggtattgttacattatagatgtggaatctgaggaacaaagaagttaagtaacttgctcaaggttacctggccaggagatggcagggctaggagtcaaattccaacagccaggctacatccctagtgtgagctctgaaccagcacaggctgaaccagagacatttaacaaagtgatatgtctttaggcaaattattagctcaaaaaacttgagtctcatgaactgaaaatgggactaataataccaatgtcataaaggtggttgtaaggattacacacaataatctgttaaagcatttggtatgtagcaagaacttcattttttaagagtaaaatttaaaatataaatatggaaaaattgaccgataagcatatctgaagaagatactgttatgactaagaagatactgttatgactaagaagttactgttatgactaagttcacactgagatgagaaaactctcagagaatacctttttaatcattacaggtagggaggagaagggaacagaagcaacaaacatctgttcatattttgagagactggggagataccagttacaaccaaaaccatcttcgaggcaaaaggggctagataatgatgagtcatgaaacacaattttatgatgaatttatggaaagttgtagcctttagttatattagcaaagaaggtaaatattttccataaagagaaaagtcagcaccactctactctgggctgagatataattaccttccagcttttaaaagggaattttctccttagtgggtggcagtcagaggaatcaagaggtttttatcttttgagtttttaatttcatatatacatatctatatatattttagagagtgggtcttgctctgtcacccaggctggagtgcactggcatgatcttagctcattacatcctcgacttcccaggctcaagtgatcccctcacctcagcctcccaagcggctgggactacaggtgtgcaccaccacacccagctaattttttttgttgttaatttttttgtagagacagagtctttctatgttgcccaggctagtttcgaactccygggctcaagtgatcctcctgccttggcctcccraartgctgggattacaggtgtgagccactgcacctggccttgaggtttttaaaagagaactctgaagacattgggtttccagaattagaaaaatgtatagtcattttaatgtgacattttcatttagtcttttttttatttttatttatttatttttttgaggagtctcgccctgtcacccaggttggagtgcagtggcacaatctcagctcactgcaacctccacccccggggttcaagcaattctcctgcctcagcctccytagtagctgggattacaagcatgcagtaccacgcacagctaatttttgtatttttagtagaaacgaggtttcgccatgttggccaggytggtctcraactyctgamctcaggtgatccrcccgcctaggcctcccaaagtgctgggattacaggyrtgagccactgcacccggctcatttagtcttaaaacatttcaaatatgtcaactaaacctacggagaagataagcatatctgaagaagacactgttatgattaagttcaacttaattttttaattagaccataaatagatttgtggggggtacatctgcagcccaagggcttttggggttctatagctacaacaataggcaaggatggatttttcatctcctttctatcaaggtttgaatgtttcctctgagtctttccacccagagaaccctagacttctttcagttaccactcctttcctcactattgaccacttctgagccccatattttgggagctgaaaagtaagtagtgccttggagagggaagacaaaaagggaaagggagcccagcaaaggttcattcaaggctcacatgtgcatcccctactggtagctgcctcttgccatccccacagcataagccctcccctcctcacccctgcccaaggctgcagagcgccatcacagggcctctgttccatgcccgctgagtctgccagctcacaccttccataatctgcctcaccctgcaccttccccaacccgcccaactctcaaccatcgatctgttcattgcttattttaaaagcagccttttcaaccacatttttcattcagtcattaggacaaccatgctaaagcaaccctacagtagacgcccttggctttaagcagaactggtgcagaataaaaatgtcaggcctttttttcaaaattcattaagaatttcaagacagcagcagcagagcattaaaccaaacacaaggctcttctaggcatgtggccccgtgcacagactgcaggcccatgcagccagccttggctgtaaggggcccaagtgagttgaaagttggtcatctactaaatacactgatatatttaaaactcagtatcatattattggaacactaacaaaattgcacttcaatcaaactgactagattttatccaaaaatctagtgtagtgacacaggcacacatattttaatttggtgctggaattccacaactgtgcgatagattctctaagtgttcaagcacatctgtactcttatttaaaagaaaatataactccataggcatttctgatactcaatcaacattaaaaaccattggaaaatagatgcctgcattccacctctaaagtgtctgatacactaatgaaagaataacaagcttcacaaagctattgggaaggaaatgagatttatatgtgaaattagactatgcactataaagtagtaaataaatgtaagctattgttcttatttaaatttaatggtgataaagacagaacgagccttcaacttaatcttataggtagtcaagtatcattatccgttggatatgttgaatatgttamatgaatggcagaagaaggaggggaaggaagtggtatcratgagaatagtttagaccatgtaagacgtttagaagtacaaaagtaaaaatttcatgaggacctagtgtgtttggacactcccctgtgaccccctacctctaccccaccccaacatttcattgtcagtgctgggtacatagyaggtggctcaggagaaatttgcaaatgaaagaaaagaaaggcctgctctaggcaaaggtttcaaasgtttatggtaggcatggacttctccatctattatgtttcattttctgcagtataacctgagttgtattatactattatactattctcttgctgtctagaggctccaaagcagactcatcagaacctccccaaggcctaatctttacctgctggttatttcagaacccctgctccttatcaaaaggaaaggatcctatgtcctattcctgcaggattgttccatactccttgaagcactccaaaagacagaccaagtaatgactatatcgggcactgtggctggctgttttaaattaacccgtgtcacctcctgcctggtctgtatagggtcaacactaagggggaatgtatgtgtctccttggaaaagatagccctagaggccgcctatgattttatgaaatccaagttttgtaaaggctttgtgataaagctagctacagatagtatgctttactacaatatgggcattctcttagggtctaggatgcctttgtgactaaatgaaagagctgaattctgtagtcaataagagtcaacaccttagtaagatacttaatccctcagaaaggactgatgctgaaagtccctcagagaaaaatagagaattaaagcatgaaccaagatacccgccttgtttcacccctttgtttcacatgactaggatatgggtgctcattggaaccatcggttggaagaataacaggcttatctatttcttgatcatctttctcagtgtagagcccaggggactacagataacatgtctggttaacagtagccccctcttaaagaaaaaaggagaaagtcatgttttctcagttgaatttgaaaccaagatcactttattcactcaattaaaactgctattgtctgttccttggatagtttccctctgtattcataaggtcccttagtcctagattttcaaggtaatgttatttggttctcctctgtgagccaaatatacacagatatcaaagtgttactaatcctttaagaagccaggagtttaagctattactgagctttgaaaggttctcataacggaacttttgtttctgatcactgataatgtttttaatttggagttggagcagttccctctggtattaggtgcagctggagcagacagggcatgctattgttctaaagtagataggttctgggtaatgccgtttttggttgttttttttgtttttgtttttcaagacagggtctcactctgttgcccaggcttaccgaagccttgaagacttgaacctcctggactcaagctgtcctaccaccccagacgtccaagtagctgagatcacaggcgtgtaccaccatgctcggctatttttttttttttttttttttttttttttttttgtagagacggggggatctccttatgttgtctaggctgatcttgaactcctgggctcaagtgatcctccaacctcagactcttaaagtgttaggatacaggcatgagccactgtgcctggcctaaaatgctatactgtcaagcagagtcctaaattttagccaaccatttatcacttccatgctttttatcatatttaccacctgaaattttactatttttctttaaatccattcagtgctatacttgaacaaatttattttactgctataaatggaaaactacttgttttaaactattsttaattgaaggtaataaaatacaatgaaaaccagtttaaaaatcctagctaggtaacatcttatggcaaagcttctgacaccaaggcctgtccctctttgtttgcaagggaaattaaccagggttgaggacatactaactcggtatttcagttttccttccgagaatatgaagggttgaaaagagaatcctttttctctcttcagtatttaaatgcttttcattccaagtagtcagcctatctttgaaaaactcaatccctttatattgtgtaaggaattaagtatttgacaggacttgtgtgaaaacccatttcttgaatgtaagaacaccccaagggagatagatggcactgtccctacacccatgaaatatgtcatctactgagggtcagaataaactgattaaaaagaaataataaatgtattgaagagtctgagaaatatgcaaatggttaacactagaatatgagcagcagaggaaaaaagatggagttttgtctgttttgttcactgatagatctctcactagctgttagaagaatgcttggcatatggtaggtatctgttgagtctaagaacacaaaccacattccccagtctcctagtggtgatataacactaaagatcagkagtgggaaataggttggcacaatctggagaaattaagagaagcaagatttggagagaatcttggagaaagttacagacacacacaatggcttagaacagaaagtacacaatacatacgaaaacaggtyaagtctcaccaaggtcgtgaccttatagcagccttaaaaatgcaaaataccctccagtttgaatgaatgctcccctttcctcagacctaaagccccattcccttattcacaagcatcacaaatttaaatatcacatacaccttacaaaatgagctgatgtttctgcaagacaaacttctatttccataaatgtgggttactttgagaaactcagtttcatgtaggtatgttagtttgaggatttttctgtgtcatttcaactactgaagtctcctaaagacttcaactattaaagttaagcagttgtgccatttttcatagttcccttgctatttttttgttaagtggagtcattgttcctctggtactaatttcgcatcacacaatttgttgctctagaaatagcaaaacgagaaatagattactgtgattataaatatgaagcagtaggtggaaactgaagctgtttctggcatttctcaccaaaacggccatggcctccagrtctgtctctctgtaagagggcagcacccctgaagacacagtgccacgtcaaggatgtgtgtgagctcctctgcctgcacaggctttgcgaaaggtttccgtttcagaaatacaatgccctgattttagtgtgggcatttcccatgttagttaagtgatactaaatctttaataattatagctggaaaatgttttttggaaagcttttttatcttctttcacactaaggctaatttttaaatacagctaaataaggacttaggccaatccctgaaccaaaaagcaaggtatgaaccttaatttactgaaccacaaacctaacctcattttttaaaaactgaagtgctaacaacttttttttttaacacatatgtctagtgaagcaatagcaggaaccaacacttcatgttttctaaactgagtgaagtagcagtagcactgcaagatgatttttttaaatggaacttcaaactggagcttcatcgattctctgcctctgattgattgattaacttttagtgtctttgggaaggggtatgccagtgtctgaagtcctgaccaacctcttggactctgttaagtggaaaagaccaaaatttgtctgaactaagaaattatgtgtttctccgtttcaggttcaatacttcttcaagatcttggataattagtggtgtggaaagtaaagaagtcacaggttgggacatttagacaagagtgaatcacacacgaggaatgkgttcattcttttattgtccrttgttttaacctgactgaatacaagatcaacaagagcactgtactcmtggcaattattacatatgttagaacatggattttgcactgtagacaacatttaacaccagtctatggggtactgcattgctttttataaagttcaaaataaagatttattttcaaacaagtgactttggtttatttcatacattacactttttcttgcagaaaaaaataaaattgtacaactgcataaatataaaattcttccaccatgaaaatggttaaaacattcataaagacacagcaccagcatgtgatgcctccagaaaggaaaaaaggaaagtaaaagaaaatgtataaagcaaattaattagccctgtcactagccaaagtgatgggcagatccagatctcagacacagctttaraacataccggaggacaaggcaagagatgtcaagacagcattcaatacaagcataacacaacccatcacctttttgtgtttttctgtagtgtcacttaaaatttaaagggcagttcccccatgacaaacccccaccccagcccccaggaaaaaaawaaaaawaaagacctaacaccacaggaaaagactatggagtatgttaaaaatgctcatcgatgggccattacctttgaaagagccaaaaaacaaaaaamamaaaaaaaaaaaaaattaccatgccagttttattcccgttgaatatttacaccttggacagcaaaccttgctcacataaagtagaaaacagatacaataaaacatggcttgaaaaatgaccagagtatgcacctgtagtactgtacactaaataaaatacacaaggcagcaatacttaggggccagaaacactgcttactacaagtcagttayggaatcataatttacagtaaaaatgggcacgtcccaaggctcaatttttctttttcttttgtcatttacagtagaataaatattttgttgctattgctacactttaatttacattctaacctattaaatgcagaaagctagtgtaaagcatatagattaagtgtaggtcccatacgtatgacagtttgttcaagactagtaggtttttgtttttgtatctttttttaacttattaaatggctagtkggaaagatttgtgcttgtgatcagctcttaacttcaatttttacatcaaaacgtccctgaaaacggtctttctcactgtacccaatgttctcaccgtacgccttacactctatgcgaatttcagtgtccatggtaagattggtgaactgtacggccagcaggggctgcaggtatttgggctgcaggagtttgccatagtacggataatactgcagaggaaaaccaggggagttgcccagtccaaaatactccacatttccaactttatccttatcttcatctcgctgaaatccagaatgaaatgaaattttaatggctcacatcatgcatcactatgtgtactcaaaaacaagactcaatctacacagtagtttgcaaactactgagagaggaaagaacatctactcagtctattccattgcagccttgagaaatggtcataagaagagactattctcaatgtgcaaatggatggggaagctgagtcaaatgccaaataagcattcttcaagcctcctagaaacaaggccaacattgaaaggcagaaacaccttgctgttggcccagtaaatgatctgtctagtgatattatctccaaagtttactacttgcctctcattttcttgttgagaaatcaatctccacttccttgcttggtgctagcactgtctgggaactccctttctttgttctgcctttctctctaaacggtccattagtttttggatccaaaggaaacatgcactaattgttaccttagtctttcaatttttttttttttttttttttttttttgagatagtcttgctctgtccccaggctggagtgcaatggcgtgatctcagctcactgcaacctccgcctcccaggtccaagcgattctcctgcctcaggtcctcagctgggattacaggcacgcgccgccacgcccagctaatttttgtatgtgtagtagagacagggtttcaccatgttggccaggctggtctcaaactcttgacctcattatctgcccatctcggcctcccaaagtgctaggattacaggcgtgagccactgcaccaggcgatatttcaatatttttaaaagagaagcccaaaccactaatttttatgtgacattaatttttttttaatgttggccccaaatttttaatacatgctgtgggccagagaagtacttctgtgggctaattcacctctcagttctgataagcaaatatcccaatgtattaaattcagatatttgagtttcttatgccagtggagaaactgacatcagtcttattctgattacatctttctgttcttttaaaaagttttacctagtatagctacaattcatctcactgagacttatacttgaaagcaatgtttcttatttcttctattaaaattctacctgtcacttaaacagtcttcttcattctcccctcttcctctgcctacccttccaccaccccagtaaccctaaatttgtctttaccttgccagtgcactgaacgggaaggacatttgggttatacttcatcactgggtaagtctccaaggactcattcttgggaggctaaaaataaaacccattatgatcagtagattgtaaatgatttcttaagtttctgaaaaataaaactactccgtagtccaaacaagtacacactggtcacagtaagtcaaccaaaataacaaaagacatcaggacagcagaatgaatgactcccctaaccaatttaaggtcatgtttgtgattttgttgaaatgaaaataagtgcccaagtttataacgactacaattaagctgtgatgcaaaccagtactaaatggaacttttaatagtagcccattataagctttgcttaaagacactgaaaactaagtcaacccaaaatataatgctcgttatttgctaagattagattacatgagaaagatgattgacatttctgtttttataaagcgtgggctttcctcctgagtcatgaataaataatgtcatccttttccctcaagcatgacttcaagtaggctttccttttttgttgttttaatctccagtcggggagactgccatttaagragcgtttctttgcaattttcttaggaaagtccaatatgtaaaaaaggcagaggtgtcactgccctaagaggaagggtggtcttgaaggggtgaatccactgaagggacccagaggacagtctgaaaattactgctgtcatgaaatatccagagcctcctcttctacacccatggctcaaatctatctcagaagtgtgatgaacatacttcgctggaagacagtcacttgcttactcagatcagcacagcaagtgagtcttgatgtgagatgtaacacatacatagtctaatcaaagtcagataaaatattagttccacatcaggaaggaactactattttgctactactctgttttggatgcaagaaaatgatcgtctagatttgactctttgggacgtttctgccagcaatgtatttgtctttaaaaatatgtagagaaaatgctcactaagaagttgccagaatctatcctccaatggtgaggatagtgagatgctgggatactctgatctctgacaaaaataactccaaaatagttggagatttgggtggaggtgatgaattaggcagtggcaatggataaccaagtagagaccaaagaaaaaagaaaaaaaggactgaaaagaaagagtagctgaatttatcactgaaccaagtaactctaaagatgtgggaagaaatcaatcacaatagactagactgcctctgtggggtccaaatgtcattcagtgtctacgatgagtaatgtcaaaagcaaggtactcagaaagtatgggatgagtcttctcttggccatgccacaacaatttcttttgctgctaaatagctgattgatctcagtgaagtattccccagcaatatgaatatcaaatacattttggcataatggttctcaccgtttttcttccattatatcctgtctatgtggaaagaagcttaaaatccttttgagaggtacattaatttctgccagcagtccatcaaactagccagccaggcaaccatccatccccacctactcatttttgcctctgatggcaataaaggaactttgatgcatccttcagttaacaaaactttttatctctgtgttgattttcttttgaaaatattattcatgggtaacaagcattgtagaaataaattaatagcattcaatagaaaattaatgaacaaaagtgccagatttcagaaatgaaatgagtttgttcacataactcaatatactgcagtcaatttctatcaaaattagaaacaacactcataatgccaacgctcatatacgggtgattagggggaaacctgccagaagaagccaggcttaaggggaaaggacagcattaattcatgatctggaggagaggatgaaatgaccagctttacaaaagcagacaacaacgataaattttccattcttatggagaatataatctcaccaaatggtgagcaatggcaatttgctcatttttcagtgatccagagtaatgtttatccattataagttgcagtaatacaaaaagccaacagcatggctagcaaaattcagcctagatgatgttaaacttctacttccgcaataaaattcagaaaaaatattttttcagattatcaatttttttgaaatgttcctgtggcttccagaggaccaaaactggactatacatgcaagtgggttaaaattttttttttaatccattctttatgaagtaaaaaataaaaaacttttttttttctctaaccactagaccaccagggaaaaaatatatttttccatttttacttttttaaagagtttatgttatagaaactgttatctggatactgagcaggagtattaagaaaagggccacagactcacttcagaatgcagctttgcctctcagaattcctttaactttagaaaatgagattaatgtcctaactacaagaattgcagggtggatacagaagtttttggtgttactctactggctacgtttcaaagtcagcactgagtatactttaaaactatcttacattgtcttctcagatcaattaagtacttagtgtaaatgactcatctaaattctatcatttaaaatattacttgccttaggtttgaagcctagaactcggttgagctttataataatgcacggtttgccctctttgtagccataagtttcatcatttaatccagagcaatttcccagccattcaagcttgaatctgcagacctttcgctctcctcgttcatgattaaagtctcctcgttctttcggttcactgggcacatctaaaaataaaaacacaacttttatattgtaccagcaattcccttagcagttctaagaaaaagaaactgtcttccttgtcatagttacctattctgagagtacgctattctgcatttaatgcatgatctgaattaagcaagatctccaggaaaaccatctctcacctcttcactcatattaaaagatattttaccaaaaggaatagctggtatatggccccacaccaaagcttcatagtacttgatcagcacgtaatatttagtctctggcaatatttcccttcttttaaataatggattactcagctatttagaagactgaaaggagacggatcacactgcgtgagtagcatcattcacactgtcaacactggcttagctcagtaacagggatattataatcagaatacaaaaggactgtcaataattttcagaactaggttttttttttggtcagaatttttaaaaaggaactggtattttccttttcaaccaccacttaagggtttttttgagacagggtctcactccgtggcctaggttggagtgcggcagcatgatcatggcccactgcagcctcaacctcctgggctctaaagatcctcccacctcagcatcctgagtagctgggactacaggcgtgtgccaccctgtggctagttttttttaattttgcagagactggggtcttgctgtgttgcccaggcttttttgatttgagtttctgccttttaaagctatgcattaagcatttgctggactgagaaattttattctggcatttttaattcaatcctcatataaaagccagaaaaagaccaagtgaatatagaattcaaagttaatgtatagcatgctggaggaaaataatgcaaaccataatttatgtatagtttttaaattcacaaatgaactattttcccttcaaatagcgaagagtctgaatttagactatctccttgaagtgattcaccctgattatccctcaggccttttaattactgcaaagtaagatgaaaacctcatttaaattctaatgagaaaaattcacactgaaaatgttcttttaagttactaaatatttccaaaataacttaaaatggcaattcgccccatactctgaccaagccacagcctgccttataaagaactggagttggtaaatgct

SEQ ID NO: 95708 - DNA, 14635 bp, Homo sapiens
tggctaactatgaatattgcagccacaaaaaccgctataccctgctggagaatggcctctcactcctactggtcgttagcattggctttccttccccattctccactccagccaggctggggcctggtgtcctagtgcctaggttgccacagtacagagacccagaacaaacctgagatgaggaggcattcagcggcaggtgagacctgtctaaataggaagttcacagcgacttgatgactggaaggcttcttgctggttctgcagcaattgctaagccagtcctgcctccccgctcatcccccacctctacccagtgcacgtcatggtggccatgttacctacttgcctgtccagggtgttagggggactaagagatgactcttaagcaaagcttggaccctgaaactccggtgttgaaaaccttcaatgtgtcctctctgctcttgtctgttgggccctgtgtgcattagctgggcccagccgcgtccttgtttccctttcatgtatgctcagaattccttgatattcttcaggcatttcctcctgcacactcagtctccacctctttgctgataatcttctcttctctttccagttcttcctccacccctggctcttccctccacttgaaaacagtatcttctaggtccagtgcagatgccacttcctcttgaatcattccctcacttccactctgcttgcccaacctgggggtaacctttgctcccaccttctctcacaagtgctgtgccctgtttctgagacgcattctcagttgtgtccctgtcctgtctgctcactcatctgtgtagctgcggctgactcactcatctctgatgtattaaagcaaatacaaaggcctccgtaaacatatattgactgacaccagggctcctaataattgtggctcacattcactgagctcttgctctgggtggggcaccgtgtcgagtgccttaggacactgcttcaggcactgcctatgacagccctgtgaggaatgtgcaatttttcaggtgaaaaaattgcttatctcaccatatattttctctctttctccacctcagggaggttctgactacccaagcactgtagcctgtgtgcttgctccacagtgacaccgagggtcacctggcagccggtcatggtggaggggaaatgaggagtttttaatgtaaaattccacaggtgtagggagttgtaggtgggagacataagcaatcctttgggggaggcagtagagactccagattggttccagtcacaggctgataggcattccctggaagtcttggggcagattcctccatactaatttttagtttcctgttttgttgattctaaccttatgcctgtattcttagttctagtggactgggaccctaaggcacttgagacatagtgaggggggtggggccattcatttcatttaacaaatatttattgaacactgatggtgtaccaagcacagggctgtgctaaggagatgggacatgtattcatattctatgtcattctagaactgctgttggtttcatttcaacaaaaattttttagtaccttagataaaacatctggaacttgaaacaaaattggcaaattcatattcttcttggatgaagtcagaaaagtcgcagaggtatgaggatatctaagtaattaaaacaagagaacgttagaaccgcagtcccatgtttgaagagccaggcccttggttgtttctgagagaatacaagggacaccacagggagctatcttccactccagttctggagcactcaggccattggggagctcccaaaagatggatttgccctcctatgtcactttggcttttctgtcccttttgttttgcactaaccaattttggattgtcagacactgtacaaacaaggcaggataaagattgttcacaacagtagatgtgtaatgagcgaaatgaatcccaggtttcctctttgaaagggtctgcactcaagtttttgatgtttaacctgcacctgtcccctttcgtacctgggctgacttcttggagtttgtgtccttgcaccctgaaacaatccacctgtttcctcccacagaatgtcttctcccttcacccattcttttcctttggaacattttttctttctagttagcagttgaagcagtgatgttgcaagaacaccagttccttttacagggtgacctgcctgcgctctgtctcacttggcactgtggttcatttcattacagtgtaaggggccaaggcctgcaggggcctgataatcataaactgtgtgtgttgcaccattcatgcccctggcatccaagaaatagaaactcagaatgctggcagttttgccgggaacacacctcctctctaatgaggaaagatttcattgtccattgtttatttaaaacaaaggcatgtgaaaggagtttgatgctcatgagacatttcttgcttcatttctcctcacacttccctgggccctgtaagaccagagatggtgggtctgacatgagtgccctcggggtctttgtctttgatatgggaataggctctcttggacttgtcacccaaatgctgaccagcagagaccaggaggccagtttagaactccttcagcatacaataatcttatataaacatgaccttagtgtgacttgaagggctttggagactgacgatgagtgtggctttgaaattgtcaggcctacctgagagagtccttgaaggaagtgggtcagtacaggcacttcttattacagcccagcctcacctcctccaaccctgtaggtgtgtttccattgcgcacacttggaattactctgagcatatttggctaaatgttcctttatcttttttcagactgttctgcattagaactctttgctcaagggtatgtaatgcttaaggcacattgagaactttctcccaaagtctcagtaaggggctttgccaaaaataaacagcttggaacccggagctttggcccacatgaggagcttttaatccttaagatcttttgatacttaaaccatcctttcaaaagacttttcattcccgtcttgtcctcctgagagctcagggcacctcaaaggtgctgttcggtcacctttgttgtgaggtaggtatattacatttttctaaacaagaattaagattgctaccccaatcctcccagaatagcgatgagtagagcttcactgcctgcctaaggtaatttctccttgtgcctagcttaggtttggctggctggaggaaaaactgcccactccctttccagttggctgtcaacagactgtctgctctgaccctccaggacctggctatgaaagtgaacaggtgctgccgatgcccagttgtattctaggcctacccttctccctgatctccaccctctgccaaaggcttgtgtaattagagaccaagggagctgggggcaagagagccatgcacaaggatactttgctcttcgctgctggggcaggtctaatgggcatgggggtagtatgggatggtgggatattaccctattagatcaaacactagcaatttcacataaaacatccagatttctagtactgttagaagacccagtggatctggcctctggactcacatgcctgcaggtaacactgctggcgtgggggtgggctgaagcggggaggtgatttcccattcattgcagtcctgtttggccagctttactcattatgcccctcatctgactgtcatgggcctgtgagtttgtgtcccaccctcaattaaaatatgctagactgtccttactcatgctgatccatgcagtgttaacaactcttaataagcactctatcacttagtacttttgtttcttaaataggcctttgagtttattgaacctctgataactgctttcgttatattcaaaattatgtaaaaataacacaactgaataacgagcacttgaaagcacttgtgaattttgttctgaaaatactaaaaccgtctacctatttactgagaatgagatttttttttaatgtacagtagacaaagcaaaggtacatgttactaaagtggggatgtggagacagtgatgggaatttgcttatgaagtcacttatccatgggcaggagggtacatggtagttatcaacaggaggagaaactctttttggggagtctggcttttctaacgagctgtttcgaatgccaaggagtcattcctttttagtctgtcgtgtgcctttggaatggcctctatgcctgccctttctctttctctctgccctctttctggtttctctcattcaccccaacactacctcacacctacccttctgtccatgtccccttcccagagtggggtttatcactacacttaggaaccatttcatcaaaaatggagaaggaacacggtaacccaattatttcaagagacagttgaaatgctccctagatatgtaattcctgcaattttgaaaaatagatttatgtgtcatatagtagtttgtttggaaggagtaggactaacaggaatgtaggagggtgcctcaaagttacatacagagttactattctataaagatgggaacttactgttctagacttttgatggtaaaaatgtgaaaatttcagactacagcagtggagaaaatgtggggtgagaaagaggatggaagtgttttgagagacagtgtctaggggaaaaattatcttatactgttgagtggtagtggtggagagggaaaaattttgagatctcatctcctctagccaggcctatactcagtgatcatttttttctgagaaacccggattatttctatttttaaagcacttgacttgagtttctcaatggatcaaatgtgccctctgataattgtccccatcccttaagaagaaatcatcttctgtgagatgtttcgtaaaacttttgccctcggtggctgagaggttaccttctgggaaggctgagcactaatggcttgtttacaaggctggcctcactaagccaaggaatcttgtcaaattttggaacagaagcctagagggaaatagagaacattttacagaatatatcacacttaaacattgctatcattacgatggccaaagtcagctaatagcagccatatagtgaacactttacaaaccatttttatatttaactctttaaccatcctataaagtagccaagtgcaaataatgtcatctccattttactgatgaagaaatcaaagctcaggtagtgtgatttgccttgagtcactgagctagtaaatgggtcatgttttctgacttttatttccactgtatcctgtgttttactacatccctttgtttctttattacttccttctgtttatatatcctttaatatttccatgaactcagtttaattagcaatcttgtcctcacttcttttaggaggtaaagaggaaaaaaaccaagctttgaagctatagacaactggatattgatctctgttcatctacttcccaggtgcctgtctttggacaaatacaacttatctgagccttagatttgtcctctttgaggggggagatgatataatcagtgtaaaggtcaatgcaccaaaaaagagagtttcatgagagcagcaatttttgtgtgtttcattcacggctgtatcatgagcaccccaagcatggcttgttacatgcaggcattcaatcagtatctgtggaatgaacgcatggatgcacgggacgtcccagctgagggcctgacttaataaaggagcgcaacaaaagcggccattatctctcacctactggcccagcctctttccttgtcctctcttgccttacccagtccttcagatggcacatcccatctttcaataggggattgctggggatttgccttcctaggctcagagcattcgggtttgggccagtctccaggagaggagaccggaggtccttcgagcagccaggagggggcagcagtcacgtcgcgatggttccagccggggaagggtgccctcgctaaggagattgcggcggacccggaagtgcttggccacagtcgcagccccggcgccccgaagcgggaaaaaggctgggtgccgccgtcccccagctgcgcaaccctaggaactctcgggtaggtgggttccgtgtaacggtcagtgtttccggggctccttttcctctgctgcctcccgcagacccaaggctgagtgaggggcggcggcggaagtgggaggcccacccaaaaagccaaatggggtgccagragagtgaaggcgcaccctggggtcaccctaccctaccccgtcccctcccagccccactctgcgggcgggcgctgcccttttgggcgtcgcagaccctccaaccccggcggcggccttaagattcccgggctgggatccctgctgcagagggggtaacggtgtctggcttgccaagcaatatttgttgtggtctatcatggaagaaataaagtcgggcaatatgaattttttttttctcaaatttgccggatggctgtggtgtttctgactcttagttttctcattgtgaaaaaggaatgattatcttcttcgatcctctcaagagtttccttgttttgagtagattgatagctctttaaaggatgctaagctcagctaatggaagaagagtctagtttctttgaggctttgattttggttaaactatagagctcatacctttctgtatggtgcagcttactattgtctttggattggtaacttaaaaaatacaaataacatgcctttgagaaccaataaaaactatggatattatccctataaatttacacaaatccagatataagcatgcaatgtgatatacctaagggatatgtgaaccactgagttaagaactgctttagagggagatacaatgtgagacacaggctttgggataagactttggtttgaatcctggctctgctctgttaccttagggcaaagttacttaagcatcttgaatctcagcttttttaccaaagcaggactaatactaacttacaaggtggtgaggattaagtgaaagaagatacataaggcacttagcacatagtaggtactcaataagcgatagctaacagatgtctattattattcaaggaattataattttcaaatctgaaatgcagttttaatgtcccataaggtgactaccacatacatttttctcagacttttagtaaactgagttgatttgactttatctcagtactactcttgacctttcacaactttcgtaggttcacagtctctctttttctaggaacttggctgtgttgtcctgcctcagagacaaattcatctattgtaggcctagcccctgcctttgaaaacaaggaaaggttggtagaacatcaacacagcatggaatttccagggaggtctcatttcaaaacttcataaagaacaagaaccacctggacttctgtgagggcgatgattaaactggcctgagtttgaatgaarggataatgtatgctcaacctgtgactaacaccaaggaggtcaagtggcagaaggtcttgtatgagcgacagccctttcctgataactatgtggaccggcgattcctggaagagctccggaaaaacatccatgctcggaaataccaatattgggctgtggtatttgagtccagtgtggtgatccagcagctgtgcagtgtttgtgtttttgtggttatctggtggtatatggatgagggtcttctggccccccattggcttttagggactggyctggcttcttcactgattgggtatgttttgtttgatctcattgatggaggtgaagggcggaagaagagtgggcagacccggtgggctgacctgaagagtgccctagtcttcattactttcacttatgggttttcaccagtgctgaagacccttacagagtctgtcagcactgacaccatctatgccatgtcagtcttcatgctgttaggccatctcatcttttttgactatggtgccaatgctgccattgtatccagcacactatccttgaacatggccatctttgcttctgtatgcttggcatcacgtcttccccggtccctgcatgccttcatcatggtgacatttgccattcagatttttgccctgtggcccatgttgcagaagaaactaaaggcatgtactcccyggagctatgtgggggtcacactgctttttgcattttcagccgtgggaggcctactgtccattagtgctgtgggagccgtactctttgcccttctgctgatgtctatctcatgtctgtgtycattctacctcattcgcttgcagctttttaaagaaaacattcatgggccttgggatgaagctgaaatcaaggaagacttgtccaggttcctcagttaaattaggacatccattacattattaaagcaagctgatagattagcctyctaactagtatagaacttaaagacagagttccattctggaagcagcatgtcattgtggtaagagaatagagatcaaaaccaaaaaawatgaaccaaaggcttgggtggtgagggtgcttatcctttctgttattttgtagatgaaaaaactttctggggacctcttgaattacatgctgtaacatatgaagtgatgtggtttctattaaaaaaataacacatccatcaagttgtctcatgatttttccataaacaggaggcagacagaggggcatgaagagtgaagtaagtgtgtgtgtgtgtgtgtgtgtgtgtgaaagtcacttctttctacccttttcaatgtgctaatgctcttttatttatctagggctcaaatcttagaacacagggtgctatgctcagttttgttgcccaagatcacagaattggttacttaaccttgactcagagtttctaccttgttcttagggaagcatatcacaactaattgcaaagcagagtgtgatgtgtcacaataagcagaatgctagggggaattcagaagctggagataaatttcagctggaataattaggaaataagagaggcggtgacatttaagcttagtcttggaggacaggggagacttaaataggcaagagatggttttagggcattgtggtgaaggcctttagaagccaggtcagtaatggaagcgagtgaaactggcatactttgtgtgactgatggcaactgtgaacaactatggagatgtccaatggagacacctgctattgtgctgcatctattcacagtttgtgcctagcttcagacctttagaattccagataggattctaaaagaaatcccaataactgtatatctgatttttaatatgaaatctgacttgtaaattaatccgtctaaaaacacatttgcaggcaacataagactactactgtgcccatctgtccttagcatgggcacaatgatgggacaatatttgatggccattcagggttatggggacttttgggaggggatattgggaaaaagtcagaatgggaggttgagtagcaatttgagggctatgaatttgggctccatactgtaggtaatggggagcaatccagtttgtctaaggcggaaataaattatcaaatcttgggccacaactgttctatgtctcagttttcatctgtaaagtgggaataaaagtatctacctctagaattgtggtaaatgggatacatgcaaagtgctttgaagaatccctgatacgaagcactatgtattagcatcagcactatgtaatagctagtactaatgtattagatgttgtttaagctgacatgtaagaaaacctgaagagagcagagacaaggtgccaaatgcagcaggcacctcccaagatagctggttattcctgtggtaattcatttgtggcaagtttctatactgtccttttatcactaggaattaatttcaaatcagaaattttgttaagggagtcatattccaaaatataatgtttttatttctttgaacataaatttctcaagaatgtctgggacatgactttgaactagtgtcttcagctcttgtcatgtcacattctttatcagagttttatttggacagatgaatattgtgttttgtgataaaaaaaattggtggttttctgtaaggtcaattggactgctttctatatccaaggacactggccaatgaggagaaaagggtttcagggactaacctctgaagcccaaagcatctgtccactgcctgctcctggtttgggcttgtgcctcaatagaggcatgcctcataattattctatagtccacatcaggaacagggctaggtgttggtggttgaagatagtaaagagttctatgaaattgtagtttttgtttatatgtattaatacatttgtattatttgaaggcatttgtgattgttaattttagggaactcaggtagcaaacgtgcatattggtgaccagaaagtttctcaaactttcaagaatagtttcttggtgggatgacaatatggctgcactatcattttcagcttttccctgtcacactgtatagtatttggagtcactcagtccctgatcttacacaatttggtggttgtagaaattcattgtgaaggtggtgggagacggagagttgcgggatagatgcaaggatgaagggtgaggcagtagacttaatttggacagaaaagtggtagctgtggggagaaggttattacagctagaatgaacagtatgtgccagagtgcacaggacctgatgcatcctggcagtggagaatagcacaggacaaatgggctgtagtgagggactgaaatctgagagtgctgaatactttgcattattgtatcctgtagtcagtggcaagttaaggggcttttgaagagagatgtgataaaactagatagataaatcatatataagtgtgtatatatagacatgtacacacacacaaagtgtgtataccattcacatatatgtgcaccaatatctgtctatatacaggcataccttggagatactgaggttcggttccagaccactacaataaagctaatattacaataaaacaaatcacatgaattttttggttttccagtgtgtataaaatttatgcttacattataataaagtctataaagtgtgcactctcatgtctaaaaaatatgcataccctaatttaaaaatgctttcttgctaaaaatgcgaacaatcatctgagccttctgtgaatcagaatctttttgctgatgagggtcttgccttgatgttgatggctgctgacataagggtggtaggtgctgaaggctgaggtggctgtggcaatttcatgaaataagacaataatgaagtttgctgcatctatcaactcttcctttcaagaaagatttctctgtagcacatgatgctgtttgatagcattttactcacagtagaacatctttcaaaattgggtcaaccctctcaaaccctgccactgctttataacaatttcatgtaatattctaaaaattgttatttcaacaaaaacaatgttcatggcatcttcatcagaagtagatttcattttgggaaaccacttttcttgctactcatagtaatcaatttcttatctcttcagttctatcatatgattgtagcaattcagtcacatctttacacaccacttctagttctcttgctatttccaccacatctgcagttatttgctccgctgaagtctcgaacctctcagagtaattcatgagggttggagtcaacatcttccaaactcctattaatgtcgatattttgacctcctctcacaagttacaaatgttcttaatggcaatgcctagatccatcagaggaatcactatctatggcagctatagccttacaaaatgtatttcttaattagacttcaaagttaaaattactctttgatccatggacttcagaatggatgctgtgttagcaggcatggaaacaaattttaaatgaacagtaatattttgaaaggaatcttttttttttctgagcagtaggctcaacactcggcttaaaatattcagtatatcatgctgtaaacagatgtgctgctatccatgctttattgttttactcacagagcatgagcagagtagatttcacgtaattttcaagggccctgggattttcagaatggtaaatgagcatcgatgtcaagtcaccaactacattagcccctaacaagagagtcagcctgtcctttgaagccagacattgacttctcctctttagctatgaaaatcctagatggcaccttccaatagaaggcttttttatctacattgaatatctattgttgagtgtagctacctttgtcaatatttttttttctagtagaaataaatcgttttgtttattattattattattattattattattattatactttaagttctagggtacatgtgcacaatgtgcaggtttgttacataggtatacatttgccatgttggtttgctgtacccatcaactcgtcatttacattaggtatttatcctaatgctatccctcccccctccccccaccccccggcaggccccagtgtgtgatgttccccaccctgtgtcaaagtgttctcattgttcaatcccacctatgagtgagaacatgtggtgttcggttttctgtccttgtgatagcttgctgagaatgatggtttccagctttatccgtgtccctgcaaaggacatgaactcatccttttttatggctgcatagtattctatggtgtatatgtaccacattttcataatccagtctgtcattgatggacatttgggttggttccaagtctttgctattttgaatagtgctgcaataaacatacgtgtgcatgtgtctttatagtagcatgatttataatcctttgggtatatacccagtaatgggatggctgggtcaaatggtatttctagctctaaatccttgaggaatcgccacactgtcttccacaatggttgaactaatttacactcccaccagcagtgtaaaagtgttatttctccacatcctctccagcatctgttgtttcctgactttttaatgattgccattctaactggtgtgagatggtatctcattgtgattttgatttgcatttctctgatgaccagtgatgatgagcattttttcatgtgtctgttggcagcacagatgtcttcttctgagaagtgtctgttcatatcctttgcccactttttgatggggttgtttttttcttgtaaatttgtttaagttctttgtagattctggatatttgccctctgtcagatgggtagattgcaaaaattttctcccattctgtaggttgcctgttcactctgatggtagtttcttttgccatgcagaagctctttagtttaattagatcccatttgtctattttggcttttgttgccattgcttttggtgttttagtcatgaagtccttgcccatgcctatatcctgaatggtattacctagctttcttctagggtttttatggttttagatctaacatttgagtctttaatccatcttgaattaatttttgtgtaaggtataaggaagggatccagtttcagctttctacctatggctagccagttttcccagcaccatttattaaatcaggattcctttccccattgcttgttttggtcaggtttgtcaaagatcagatggttgtagatgtgtggtgttatttctgaggcctctgttctgttccattgatctatatctctgttttggtatcagtaccatgctgttttgcttactgtagccttgtagtatagtttgaagtcaggtagggtgatgcctccaactttgttctttttacttaggattgtcttggcaatgcatgctctttttttggttccatatgaactttaaagtagttttttccaattctgtgaagaaagtcattggtagcttcatggagatggcattgaatctataaattaccttgggcggtatggccattttcatgatactgattcttcctatccatgaacatggaatgttcttccatttgtttgtgtcctcttttattttgttgagcagtgatttgtagttcttcttgaagaggtccttcacatcccttgtaagttggattcctaggtgttttattctctttgtagcaattgtgaatgggagttcactcatgatttgactctgtctgttattggtgtataggaatgcttgtgatttttgcacattgattttgtatcttgagactttgctgaagttgcttatcagcttaaggagattttgggctgagatgatggggttttctaaatatacaatcatgtcatctggaaacagggacaatttgacttcctcttttcctaattgaatatcctttatttctttctcttggctgattgccctggcgagaacttccaacactatgttgaataggagtgatgagagagggcatgcttgtcttgtgctggttttcaaagggaatgcttccagtttctgcccattcagtatgatattggttatgggtttgtcatgagtagctcttattattttgagatacgttccatcaatacctagttaattgagagtttttagcatgaagggctgttgaattttgtcaaagaccttttctgcatttattgagataattttgtggttttttttgttggttctgtttatgtgatggattacgtttattgat

SEQ ID NO: 95709 - DNA, 83862 bp, Homo sapiens
  misc_feature (1)...(83862): n = A,T,C or G
ggagaggttttttgttgtggcaggaatttttgtcttaaattatatttccccaagaacatcttatataatcctagtacaatgatgaaaaccaggaaattgacatgtgcgcaatactattaactaaagattttattcaaattacagccaattctcaatatcctcaaggattggttccacaactctcctcctccaccaaaaccccaggatgctcaagtcctttatataaaatggtatgagcatatgtcttatgcacgtcctcccatgtactttaaattttctctggattatttctaataactaatacaaatgcgaatgctatgcaaatagtcattatactgcattttaaatttgtatttttttattgtattgttgcgtggttttttttttttaagacagggtctcaactattgcccaggctgcagtacagtggtgagatcgtagctcactatggcctcgacctcccatggcttaggtgatcctcctgcctcagcccccgagtagctagaattacaggctccaccactcccagctaatttttgtatttttaatagagatgggtttttcgccatgttgcccaggctggtctcagactcctaggctcaagtgatccgcccaccttggccttccaaagtgctgggattataggtgtgagccactgcgcctggcctgtattgttatttttttattgtctcttcccacccaatattttccatctgtggttggttgaatttgccgatgtgagatctggggatacagaaagctggctacatatcatgcttacaggcagtgcatgtgtatatacaattccatgaaattttatcccatgtataggtttatgtaacatcaccacagtcagggtacagagctgttccatcaccccgaaagtcactctcatgctgtcaattatagtcattccctcctccagctctaacccttgacaaccacttatctgttctccactacaactttttttttttttttttttggtcacctaggctggagtgcacagctcatggcagccttgacctcccatgctcaagcaatcctcccatctcagcctcccaagcagctgggaccacaggtgcatgccaccacgctcagctgtttttttgaaaaaagtttctgtagagactgggttttgctatgttgcccaggttagtctccaactcctgggctcaggcgatcccccacccctgccttggcctcccagagcgctgagattacaggcatgagccaccatgctgggcccacaacttttcatttcattaaaatgggatcatacagtatgtaactgtgcaataaagggttaattcagcaggtttgggttgtacacattccaaagaaggaactgacacttgaccagttccttaacctataagcccttgaaataaatgtcctgccttttaagagtttttgtatacctggggccttcagccatgacagatagtttatgctaattttatgctgatttaaaactgtatcctttcactgtaataagccataactgaacatagcttttctgagttctgtgagtctttctagttaatcattaagcttaaaagtggtcttggataacctttagagattgtgctttacataaaatctaactttttttgtttttgtttttgttttttaagagttggggcctcgttctgttgcccaggctggagtgcagtggtgcaatcatagctcactgcagccttgacttcctaggctcaagtgatcctcccaccttggcttccgaagtagctggaactacaggtacgcgccactataccaggctaattttttaagagtggggccttgctgtgttgcccaggctggtcttgaactcctgggctgaagggcctcagcctcccaagtagctgggattgtaggtgtgagctaccatgccctacatcatttttattgcaggcagtattgtgtcatatggatttaccataatttgcttattcattcatctgttaatggacatttgggttgtttagagattttgtgtattacaaataaagctgttataaatatttttgttcaagtttttgtatgcacacgtaattttatttaccttgagtagattcttataatagtgaaaagtaaaaaagcctttatcacagcttggagtctattatcttctgtagatgcagggcagtttggccgagaatcaagccaggatttgacaagaagggagttgaagggtcaatgaaaggtacagtatgatataaggacactacacaggaaggaatggaaagctgagaaataggatggacacatttgggcagatgtggtcaagacccagactctcaaatgcccaaatccccttgagcttttctcagagtggaggcaacctaccctcatatccactccccattcctgaccagcctttccctgtgtaaaaggcacttagtcgcttcatctggggcagttgccttatgagctgatgctagttcttgtaagggactgatcctaccctgcctccttgcctctggatcttaacagaagttagttattccagtgcaaaccaaaaagtactgaacgtggcccagaaagagatagtttcttgccagtgtgtattggcaagagttagggaatatggaaatggattgttacgccaaggaaaacaaatataaggttggattgggataaatgtataaacatgagtgcatgtgctggcatgtcagtcatgttttccaaagatagtcacacaatgtctctcatcttttctgccagtggccttgacactccttccattgagtggtggggtctatgtcccctccccttgaatccaatagagtacaaccaaagtaataccatgtgatatcccaggtaaggtcattaagtttctacagaagagacttgatagcaaaggagagcctgccaggtctaactgctcatcctgacctcccagcttcttgcctggcctttaaataaccctcccttaggtgtcctggaatgtctccttgctctgattccagagcagttattttttatgtattcattcaacaaatttagcgtctgtaatatgcccagcataggccataaatgatgacactgacaagaccccaagttggagaaactaaatgagccctaacaacaagtgctgacccgagccacaatagaggcctgttgaagggagaaagaggtaatgaggtggggtcagggagggcttctggagtaggagattcctgagccaagtcctaaaggatgtgtatgggctcaccaggtggagaagatggaacggacaagtctggtcgtggaaagatgccctgggcagagggaacggtgcggataaaggaaggagagcaagtggaagatggcagccaatgggaatgagcaatgcatgggaaggaactgagggtgagatgaaaggcagcgcaccaggctgcagagatcagccctggcggttacatttttcaattaattctcttatttttattatataaaacattattttggccaggcgcggtggctcacgcctgtaatcccagcactttgggaggccgaggtgggtggatcacgaggtcaggagatcgagaccatcctggctaacacggtgaaacccggtttctactaaaaatatgaaaaattagccaggtgtggtggcgggcacctgtagtcccagctactcgggaggctgaggcaggagaatggcatgaacccgggaggcggagcttgcagtgagccaagatcgtgccactgcactccagcctgggcgacagagcgagactccctctcagaaaaataaataaataaataaataaaataaaaacattattttactttatttttattttatttttattgttttttttagagacagggtctagctcttgtcactcaggctgaagtgcttggcaagatcatggcccactgcagcctcaaactcctggactcaagtgattctctcacctcaccctccaagtagctaggactacaagcacatgccactgtgcatggctatttttatttttcagagacatgggctcactatgttgcctaggctagtttcaagttcctggcctcaataaaacattattttaaaaaatcagagatggcaaagattatgttccttgtaatctcaatagtggggtagagagacactggacactaacagatgctaggtgactgcttttggccttctgtgcatttgcacttcaccttttgcatttttctacttagctgttctgggaacattatacatttccaaagagcttcttgtaacaaaagttacaagaaataagaaacatgtatgactttttttttttttttttttttgagacagagtcttgctctgtcacccaggctggagtgcagtggtgccatgtcggctcactgcagactctgcctctcgggttccagcgattctcctgcctcagcctcccaggtagctgggattacaggcacgtgatactatgcctggctaatttttgtattcttagtagagatgaggttccaccatgttggccaggctggtctcaaacttctgacctcagataatccacctgccttggccttccaaagtgctaggatgataggcatgagccactgcacccggccaaaacaggtatgacttttaaagaaagcaaggaatcatatcctattgtgtcttttctgtcttcgggtggtgattttaagtactttgcatcattgaagaactatttagagaaaaataaagtgtggcaattaaaatatcaaaccctctcttctgataccctgatacatatgaaaagtcagtttttactggcctttttttctgttgaccatgggaggcaagcacagtgtaaatcatacctttgcagtttagctcatgctctcctccatttgcacaaagcctggccatgttcattgctcagtccactctcaacgcttctgcaaggctcagctgcaaccctttcccaattgcattctgttcctttaatgtctgtcctacacagttcagtaagaaatcatgtggccatttgtattcttttcttataagtaccttgaagtctgaacctaagtttacctccaggtgtagacgcaccctttctctaccccatyctccccctttactctgccccactaagcaaccaatggagtagaagtagtaagtgctcaataaatatgtgaatgaaaaaccttaagttcaaggcattttgtatagaaggttttaatttttatgggtatatttggagtcctttatttaagaccacagtgctgatgtccacaatctgtcactacatagtgcctggtgtggtggctcatgtctgtaatcccagcactttgggaggctgtggcgggcagatcgcttgagtccaggagttcaagaccagcatagccaacatggtgaaacccctacaaaaataaaaaattagccgggcttggtggcacaaacctgtagtctcagctactggaaaggctgaggtgggaggtcaaggattcagcgagctgtgatcgtgccactgcattgcagcctgggcgacagagtgaggccctgtctcaaaaaatgaaataaagtaaaaaataaaaataactacatagcgaaaataatcagaagaatgtttaaggtctccagtgaaaggacaacaggcttgttgtgctgttcgcaagcacgtgttagatgcgattcactcatgttgttggtgtgtcactgggggttgtgactgcaagttgtccaggttcttggcattgtgaacaaagaattggacaaaacgcccagcaaagcaaagaaagaacaaggcaacgaaagaacgaaagcagggatttaccgaaaacgaaagtgcactccacaatgtgggagcggaccgagcagagctcaagggcccggatatagaatcttcttgggtccaaatacccactagaagtttcctattggccattttatgctcacctcaaacccgattggttgcaagaagcaagcaatcagaggctagggtgaaattacaaagttatacttctatgcaaacgaagactggacccccaatcagtctgattggttgtggacagcaaccattcagaggctggagttaaggttcaaacktggcaaagcaagcctccaccagcagtaagtctgatttgtcggggacagccaatttcctatctgccctgcggaaaaggkgggggggtttgcaaagggagtagcctttggtccttttgttacttaggcatggaaagttagggttttcctttcagtttagctctaggaagtcagcgtgagacagccttaggttccctgcttccagacttattctcctgccttaggtacagtcactatcgtgatattatctatcgctgtgtcaacacwacaccaatccaagcccaaccgcagctctctcastgccgcaccgcttcgtgagggtcgatccgccggggagacctgctctcctgcgctcgggactagacgcgacctcgcggggctgaggctctgtcccttattggctgggtcagggggcgtggcgcggcttgaccaatcgcgggcggcgcgcttaggcacgtgtgtggacaggcctgagaatcagagaarccttctctggggctgcaaggacctgagctcagcttccgccccagccagggaagcggcaggggaaagcaccggctccaggccagcgtgggccgctctctcgctcggtgcccgccgccatgtgggccgtcctgaggttagccctgcggccgtgtgcccgcgcctctcccgccgggccgcgcgcctatcacggggactcggtggcctcgctgggcacccagccggacttgggctctgccctctaccaggtaggctgagcgccccggtggcctggccgccggtgccaggctaggaagcaagtggaggaggggcacgcttcaacaactgctgctctcttgtccggagccccagttgattctgtgacgcacgtgaagtttgaagaagaaaagcctaacagatacaagaaagtttagttcacttttagagctggcactgtactttgtgtctttgaaatcagtggttcttaaagcctggtttagaattgccacctggggagctagctgaatagctgcctgagccctactctggaccttgtgggtctcaggtggagtcgctgtgtttatattgttagtgaactcattaggggacttttggcagccagctttgggaaccactggcctagagcagcccaacgaggggcgctgtgcttaggaaatttgagtttaaaagttgattatgatggccgagcccagtggctcacgcctgtaatcccagcgctttgggaggccctggcgggtggattacctgagatcaggagttcgagaacagcctggccaacgtggtgaaaccccatctctactaagaatacaaaaattagccgggcatggtggcgcgcgcctgtaatcccagctacctgggaggctgaggcaggggaatcgcttgaacttgggaggcggaggttgcagtgagctgagatcgtgccattgcactccagccttggcaacaagagcgaactctgtctcaaaaaaaaaaaaaaaaaaagttggttatgttaatagaaaatatcccacagtatctttgagtggcttttcttggaattaggaggcatcataaggccaaaaaactcaaaacttgcgaaatatcagagctggaaaatttcactgtgttcccacgatttctaagcctatacagataacatctaaatagtgcaaacaacacacaattgtttgtcagtccagaatgtttaattcagaattattaagtggttattgtggtctaggcactattttagatatttggyatggatgcgtaggaatggaactaataattttgtagggaagatggacaagaaagcaggtaactgtggtacagtgtaagaagggttgtctaaagcttgagaaggtggttacagaaagctaccgataggawgtaatgggtgagatgaatcttgggtaagagctggccaagttcagggtgcaggatggaaggtaagactgtataaaccaagagagttacaagaacataggtactgagttatgaaagtgtatatctggtgtgaggacttgaattccatgtctaggacatggaattcattgaatagtgtctggtgatgsgattgattgattatggggccagatagaggaggatcttccatgcaaaagccacatttagattccatttggcaggttgtccattaaaatatttaagtagataagtggcatgatcctatggatatggtagaatcatcagtgtggtggcaatgtggaggatggattgatatagggaaaagactagacctaggtgacagtggagagttgagtcttgagatgaaggagtcaaagttagagttgtatgtaggaggggggcataaatacctgaggagcaaagattatagagttaataactgagtggaaggggaaaatggatgactttggagtttccaactgggcagaatatttagktaggtggaactgccattaatacaaagaaggctttggtgatgggttttgtatgaatcaccttttgctaggttgcgctttgtgtaacaaataatcaaaaaatctcagtaactcacaacagtaaatattagtctctcacttgattttgttttgtttcttaatctctcactcgtgttggtggcctttggttagctgctgctgtgactgttccactgcagggtaggttcaggtctgctccatgtgtcttcccattcctggactgaggctgaagagcagccctgaattaaacatgcccttctcatggccgaaggcacaggagcaagaggctgaacacaaattggatttaaaatccttgctggcatgtgatgaaattaatgtgygctcacattagacaaagcaagtccatgagggtgggggagaatgggatgaatgatccagtttagctgtgtttcctgattacaaataaaagcaactataataagtaataataatggcaggaattttayagtgtacccaccatttttctaaaggctttatgtggttttactcatgtatttatcataatgatcctgtgcagtaggtacarttgttatttctgttttatagatgggaaaactgtggtatatagggtccaagaaatttgtctgagataacacagagcctgaatttgaagccaggtggtctggctcataactcttgagtccagggtcttaactgttgctctataatgcttctcactcacccagctctacctaggtgggttctatggttgaaaagatggggtgggaaacttgtcagtggctcagctccaattcattatgactgtcaggcactaacctctgtggttgctcagcttcacaagaaaattactaggttgtagaatgttgtttcgcaggtgattaaaacacacacacacacacacacaaacacaaacacctggtgtcctgagagatcaagatttgccaaatgcagtatcagtaagtagggaaactgaaagttgaacttggttttgccactaaactacactgcctcttggttagtgagtctcatcctaaggaggctaggttggttgataaaggattgcctgggaggtgaactgtagccagwactggctcttctgtgatttaagtctgatgggctgagcttggcacagatgttgcccagtctgtagaggcaaatgtcagcttcagtgggtcagtgcttttcttctttgacccactggttgcttaaaagtacgttgtttaatttccatatatttgtgaattttccagtcatccttctgccattgatttctagtttcattccattgtgattgaaaggatacttttgggccaggcatggtggctcacgcctgtaatcctagcgctttgggaggccgaggctggtggatcacctgaggtcaggagttctagaccagcctggccaacatggtgaaaccctgtctccactaaaaataaaaaaattacctgggcatggtggcgcacgcctgtaatcccagctacttgggagtgtgaggcaggagagtcgcttgaacccgggaggcggaggttgcagtgagctgagactgtgctactgcactccagcctgggcgacacggccagactccgtctcaaaaaaaaaaaaaaaggatactttgtatgatttcagtcttttaaaatttattaagatttgttttgtggcctgacatgtagtctatcttggagaatgttgcctgtgcacttgagaaaagttacatacttttttctgctgttgtagggtgacaagttctgtatattgtgttagctccaactggttctttccctaataccatgctgcttccttgttttttattttctggattttgcagagcaagagaatgtagcagaaatcatgaccctcagagctcttggagctgtagaaaataggaaataatggagatatactgtagactgaatattcatctaagtttgaacagttaggaagttgcttagtgttctgtcaaacagaaggaactaaataactagagatgctaatcacatggggagcaaaatgtattagtgggccaagtctgaatttcaaagataattagctagttaagtattgttctaaagtaatatgctgaccaaacaaaatttaaaaatacagaagggtgaaaagttagtccctctacctcttttctacttctcactgtcaatatttccttgtgtattacttaatttgtgtatatatgccagcatagagttttgttctgttttttttttttttttttgagatggagttttgctcttgttgcccaggctggagtgcaatgatgcaatcttggctcactgcaacctccgcctcccgggttcgagggattctcctgcctcagcctcccgagtagctgggattacaggcaagcaccaccttgcctggctaattttgtattttttagtagagacgagttttctccatgttggtcaggctggtctcgaactcccgaccgtaggtgatctgcccgcctcggcctcccaaagtgctgagattacaggcgtgagccaccacggccggccgagttttgttctttttactaatttatttatttatttgaaacagtcttgctctgtcacccaggctggagtacaatggcacgatcctagttcactgcagcttcaaactcctgggctcaagagatccttccaccttagttggtcaagtcgctgggacacaccaccatgcccagataatttttaaatttttattctttttatttttattctttttgtaaagatggaagtctccctatgttactcaggctggtctcaaactcctgggcttaagcgatgctcctgcctccgccttccaaagctctgggataacagacataagccaccacactcagcctgttctttttaaaacataaaataggatccttggccaggtgcggtggctcatgcctgtaatcccagcactttgggaggccgagatgggcaaatcacttgaggtaaggagtttgagatcagcctggccaacatggcgaaacccggtctctattaaaaatacaataattagctgggcatggtggcacacacctgtagtcccagctacttaggaggctgaggcaggagaatcgcttgatctcgggaggcggaggttgcagtgagccgagattgcaccattgcactccagccggggcaacaaagggagactctgtcccaaaaaataaaaatacaaaattaaaaataaaaataggatcctttttctccctctgggatttgtttttaagtgtactttgtcagtaagcaagcattggttggaatctcagatagtgactgatgggacaggaaaaataagatggtattctaaccttcaaaaagcttatattccttaaaataggaaaacaaatagagatcagtttaagttcagaaggtgtttaaggaagaaagatgttaaattgagtaggagtggccagaagtagagttgaagatgagataaaacatgaattaggcttacagaggagtaagatatggagagatggacaagtggggtggtgaagaagagcttgaacaagacaggcaggggtgaatcttttccatacgatccagtggcccagcgtggctgccacagatggggtggcccagtgtggcggccacacagagttggcacagaccactgttttttttttttttttgacctttattttggtaaaaaggaattgctttctaatatttctctcccctgtctcctctatttctgttttaggagaactacaagcagatgaaagcactagtaaatcagctccatgaacgagtggagcatataaaactaggtaaacacagcatttattccacagcttatgcctttacttaagatgtcctaaaatagttattgcttttaggaaaaatactggaattaagcttttgatattttttttttttttttgagatggagtcttgctctcttgcccaggctggagtgcagtggcgccatctcagctcactgcaacctccgcctcctgggttcaagccattctcctgcctcagcctcccaagttgttgggattacaggtgcctgcctccatgcctgtctaatttttgtattttttaaatagagacaaggtttcaccatgttggccaggctggtcttgaactactgatgtcaagtgatccatctgccttggcctcccaaagtgctgcaattataggcgtgagccactactcctggctgagcttttgactcttaagactatgcatttgttggtatgcaggcatttaattttatttttcctattacttggccagtttttctcttcatagagtactaccacttttggggggaaaagtaaagattcaaattcataaattttatgaataaataatttatttttaatttttattaattttttttttaagagatgggttyttgctctattgccaggctggactgaacccctggctcaagcgatcctctcatcttggcctcccaaagtgctgggattacaggtatgagccaccacacctggccagtgatttcttagtaggcatttaatatttcctccctaagtgctgaatctcagatggaaagcattcttcatatttgatagactgtttcagataacttttatcaacaagtatataatacttaaaattgtatataatacttttaatgtaaaattttacatttaggttagagtagtttaaatactggatctcaggagtataaaaatagtgaagaagactggatttggaaagtatggtctagaattgcttatttactagtttatttagagacagggtctcctcactctgttgctcgggctggactcgaagtcgggagctcaagtgatcttcttgcctcagcctcccaagtagctgagactatacctgtgcccctgtacgcagctatggaattcatacttttgaagccattttagatcaaggtgttgtctccagaaaaagaattcaaactcttgctgaaatgaaagtgttttgttaggggtgataactcaattgttatgcccattttgagagtttgatttggtgaactcactgtcccccttagacattaagatggtgggttttggggccaggcacagtggctcacgcctgtaatcccagcactttgggaggccgaggtgggcggatcacatgaagtcaggagttcgagaccagactgagcaacatggtgaaaccctgtctctactaaaaatacaaaattagctgggtgtggtggcgcatgcttgtaatcccacctactcgggaggctgaggcaggagaattgtttgaacctgggaggcggaggttgcagtgagccaagatggtgccattgcactctagcctgggtaacagagcgaaattccgtctcaaaaaaaaaaaaaaaaagaggtgggtttgactcaatggaggggtgaggagtcctgtggcatcaggtgcctgctggggatggtggatgctgaggaaccgtggtgcaggctggtggccacaggagggtagaggactgagccggactccctggggaaggaggtagggagaagggggaaaggacaaacttggctgtcacagctttgccaagaattaaatgtcaggggagcttaattatgtgctctgtgagcctgcatcaaggataaccctctttctggttcttcctaataaaaccagaattcaccagctgctccaaattgtaaggccccactctagacagaattgctaaagagtgatgttgtcttaagtctctcttttttttttttttttactgagacggagtcttgctctgtcactcaggctggggtgtagtggcgcgatctcagttcactacaaccttggcccccccgggttcaagcgattctcccgcctcagcctcccgaatagctgggactacaggcatgcaccaccacacccagctaatttttcgtatttttagtagagatggggtttcaccatgttgtccaggctggtctcaaactcctggcctcaagtgatccacccacctcagcctcccaaagtgctgggattacaggcatgacccacctgtcactttgggaggtcaaggcaggagaattgcatgaagccaggtgtttgaaaccagcctgggcaacagagtgagacctcatcacaaaaatttagctggagtggtggcacatgcctgtagtcccagctgctgggaagcctgaggtgagaggatcacttgaatttaggagttcaaggctgtagtgagccatgctggcaccactgcactccagcctgggtgacagagtaagatcttgtctcaaaaaaaaaaaaaaaaaaaaggtcctacttggaagatcgtttgagattattttcttgcctaaataaacaaagaaatagctttctgaaatagctgaacatttcattagacaaagactatattaagatgaaattcttggacaccaataaaaataaactaatgttttaattattaaaggtacaatttgatacttctgttcttgctccattaccttggtttgccgagagtgggttatagatattcccaagaatactccagtgggctcttcagttataattttctttgtctgtcatgatgtgagcaatgttgagaagcactgaagacaatctctgagtcaaggaaggggacttttaaattgctaaagtgttcaactcacccagttgcaagcctaaaaagttacggatcactaatgtcatctttaggtaaatttactgcacttatcatggaagtaatttctaaaattttatttttacctggtacaaatgaagataggaattttccagatctatcatagcatgtatttaataaatgtggtggagatgaggcattatttgcaatatgtgagctgcagagaaaatactctgtaatttatgtaactactagtgaattcagaacatagactctaggatatactctaaaatcagggatagattgattttttttttaataccagtttttacatttacttcagaaaattggcaacttgtaagttgagtgaatgattattagccttttctcagaggatatgttgaacttttaaaaagtgctatattttggattawgtattatgtttttctggcattgagacctttttatcgtgtcaatctaatctaatctaatcacatttctatcataggaggtggtgagaaagcccgagcacttcacatatcaagaggaaaactattgcccagagaaagaattgacaatctcatagacccagggtgcgtacatagccaagtactgactcagagtgttctctgttccatagtactttattagacagtcttgtaaatcagttattttgaattctagttctcatcgtaagattcaggaacatgtgtttattgagagcctactatgtgtcaagcactatgtgttgacatgtttattgagagcctactattggtcaggtactagtgatatatcagtgaccaaaacagacacagatctttgctctactagagtttacatcatagcaaagggagacagaaagcaacagtaaagactgtaacttccggctgggtgtggtggctcactcctgtaatcccagcactttgggaggccgaggtgggcggatcatgaagtcaggagattgagaccatctggctaacatggtgaaaacccgtctctactaaaaatacaaaaaattagctgggcatggtggcatgtgcttgtagtcccagctactcgggaggctgaggcaggagagtcgctcgaaccccagaggcagaggttgcagtgagacgagattgtgccactgcactccagcctgggtgacagagcgagactctgtctcaaaaaaaaaaaagattgtaaattctgtagtgtgttagtaagtgacaaatgtcatgagaaaaagaaaaggtggcccagggtaaaggagaggaagatatagggcaagttgcagttttaagaggtggtgccaaggtaggccgcattgagaaggtgatgtctgagcaaagatttaaaggaggagagagagagagagagccttgtaactctctggggaaagagtgtttcaggcagagggaatggccagtgcaaaggccctgaggtgggagtgtgccaggtaatgctggtatgctcaaggggcagccaggaggctggggtggttgtggtggagggagtgaggggagaggagtaggagatgggtcagatcctgtatggccttgtgggttatcataaaggttttggttttcaccatgggagaaatggggagctattgtagggttttgaacaggagatgattatgatctgacatagcttaaaagagtgcttctggctgctgtgttgtgagtagatggagcagcaagggtggaagccctgtgaccaggtagagggcgattgcaaggatttgagggagacatgatggggactcggcatagggtagtagtggtggtggcaggagtgcagggttctggatgtattgtgaagacagagccaacccaacaggatttcctgaaggattggatatggagtgtaagggggagaagaggggtaagtgaaaactcccaaagtattttttctcctgacacgtgcacacacatccaacctggagacagcactgttaacacctagtatattatccttctaggccatttgtatgcatatatatataccagacacctacattttttaaaaatgcaaatgaaatcgtactaaatttgctgttttgtagccagctctcttttttccctcctaatgtatcttgaccatgtaagtaagtgagaggcggactagtggttaagagcctggcccctggggcaagattgcttatgaagctcccggctctgccccttacttactgtgtaaccttagacaagtgacttgatctctgtgtgtttcagtttcctcatcagtaaatgagggtcacaataagatccmcctcagaaggtggttytaaggaggacatgagtgagtgtttcttttttttttttttttttttgagacggagtctcactctgtcaccaggctggagtgcagtggcgcgatctccgttcacttaacctccgcctcctgggttcaagcgattctcctgcctcagcctcccgagtagctggattacaggtgtgcaccaccatgcccagctaatttttgtatttttagtagagacggggtttcaccatgttgcccaggatggtctcaatctcttgacctcgtgatctgcccaccttggcctcccaaagtgccgggattacaggcatgagccaccacaccagccgataagtgagtgtttytaaagcctttagaagagagcctggtatttggaaaggatttttattttaattaattaattaattawttattttttgagatggagttttgccctgttgcccaggctggggtgcagtggcatgatctcagctcactgaaacctctgccttccggattcaggtgattctcctgcctcagcctcccgagtagctgggattacaggcacgtgcctccacgcctggctaatttttttttttttttttttttgtatttttagtagagatggggtttcaccatgttatccaggctggtctcaaactcctgacctcacgtgatctacctgtctcagcctcccaaagtgctgagattacaggcatgagccaccgtgcctggccattagttgttttttgagacagggtctcattccattgcccaggctggagtgcagtggcacagtcacagttctctgcagccttggcctcctgggctcaagtgattcttccacctcagcctcccaagtagctgggaccacaggcatgtgccatcatgcccagctgtgttgaaaatttttttttttttgtaaagatggggtttccccgtgttgctcaggctggcctcaaactcctgggctcaagcagtccacccacttgagccccacaaagtgctagcgactacaggcatgagccaccccacctacctccaaaagtttttaacgagatggggtcttggctgggcgtggtggctcatgcctgtaatcccagcactttgtgaggctgaggtgggcagataaccttcaggtaaggagtttgagaccagcctggccaacatggtgaaaccccgtctctactaaaaatacaaaaaattagctggttgtggtggcgcatgcctgtaatcccagttactcgggaggctgaggcaggagaatcgcttgaactcaggaggtggaggttgcagtgagctgagatcgcgccactgcactccagcctgggtgacagggcaagactccatctcaaaaaacaacaacaacaacaaaaaagagatggggtctcactatgttgtcctggctggcctccaactcttgggctcaaacagtcctcttgtctcagcctcctgaataactgggattacagacttgagccaccacacccattttagatttttaaaaatagattttatatacaacatgtgtatttgaaatattgtcccattgaggaaaaatcttttccttttccatgtgtaactrtttaaatgtgtagtttttaatgacattaattcaaacaacatcctttcttcrctttaggtctccatttctgsaattatcccagtttgcaggttaccagttatatgacaatgaggaggtgccaggaggtggcattattacaggcattggaagagtatcagggtgagtattctacttgtgcttcataatgtgggttgagaagaagactttgatgaggcacaggcatccagcactcactttgcatattagcatgcgatttgtatgctatttatattatgtaggactggctgggtgtggtggctcacgcctgtaatcccagcactttgggaggctgaggtgggtggatcacctgaggtcaggagtttgagatcaggctggccaatgtggtgaaaccctgtctctactaaaaataaaaaaataagccggcatggtggcacacgcctgtagtcccagctacttgggaggctgaggcaggagaatcgcttgaacctgggaggcagaagttgcagtgagctgagatggagccactgcactccatcctggtgacagagcaagactccgtctcaaaaaaaaaacaaaaagatgtctttccatggagacaagggcaaggaaggagaccagtctttatcttttaactagagatgctctagtactggatattatggctgaaaaaaattcagtcatttaataggtataaagtagcacttaattataaattctttcttttttccttttttgttttttttagagatggtgtctcgctctgttgcctaggctaatctcgaacttctgggctcaaacgatgttgaatataggctagcacatcattataattttttttttttgagttggggtcttactctgttgcccaggctggagtgcagtgacatgatcatagcttactgtagcctcaaactcctggcatcaaatgatcttcctgccttggcctcccaaagtgctgggattacaagcatgagccattgctctggcctttattataattcaaattgacctttcttacataaaaattgttgaatggtttatatcatcactactctttctctgacaaatgacagatgagctgaatttgctcaaattaagcaaaaaagaggatatattgattctcttatctggtgagtctgggcatggctgtatctgggagctcaaatggtcttaggtattactaggtcccaggctgttttctactcctggccctgacttgctgtgtgtcagctttgtttctaggcagcctctctaaatccagaggcagtgatggtcataggcagttcctggtttatattctataagtttagcagctgcagtggaaggcaagatctgcttaggcttagagcctgtcccattgccgagcctcagtgggaactctgggtagaaagacctggtccctgtgcccccctttaaggcaggctctggggtcagtcctacttgagccacctggattaaagataagaggcagtttctgaaagaaggtttagttttgttgccaaaataatagatgctgggtaggcaaaaccaatagaaatgcaatctagtatttttgtgggccaatttgatttctcattctgtaacaagtctgtgacctttaatagacaagcagatatggctatgtcccttgtccatggtcacataactaacaagttggcagagccagaatttcagtctaactttgtctgacttcacagcctggcctctttccagtaccagagcttcttaaactttctagcgtagcacccccagtggtaggaagtatgagcacacactctggagtgtgaggttatggcccagcaacctatgagaagcctacatttcctttgaagtctagttcgtttaatgttaaatcattaaaagtttgcattctactctataaaatgttcattgcagtgcagaaaaaggttttatatgacctagggaataaaattgatgctcaaagaagagtcctgtttgtcttgtggcgagccctgctggccacatatcctagtatgagaagctcaacactaccctgtgctgkgtgttcagttgccgttctctattttcagcagggatttaatgactcactctttagagttgtaggcagcataaagtgaggtaacacaaacatcagaaacataaagaaaattgaattttgtaaagagcacactgttgtcatctcagatttcaagggtacctctgaccttaaggtttcctgccagtgctgtacagtttccccaaccagctgtggttgttggccgccctgctctttgtgactcatacccaataaactggttttggtgagaaagggcactgttgatgactcaggatacctttcatgtgtttttagtatattaaagtttgcattcattctgacttcagttaagatgaacgttatattttagactacatttagttttgtagaaaaccatggggctgtaatgttgaagaacaagaatacaaaaaataaatcttagtactaaaggtcagttttcatttttgcaaaataccctcctaaaaggagactttgaaggtttattatgagggaattcttttcccttgagacttggattttttttttcattattattttcatcttattaggaccttttcattcaaagaaccattatgacacaaggcttaggttgttagttttttattactaatctaggactgatgacttttcaaaaaccaagtgtgagtttataaacttgttagaagtaattgttttgtattatataaattaatatgtgaactgtgattaaagtttgcatttatatcctaagactgctgtctgctaatggatgttaatagtgatacgtactagaagttgaaggttgtaytggggtatcttgtaatgagtgtaattagttttgaagaaatctcttaaattctctctccaatgaaatttctgcctttcagagtagaatgcatgattattgccaatgatgccaccgtcaaaggaggtgcctactacccagtgactgtgaaaaaacaattacrggcccaagaaattgccatgcaaaacaggctccccygcatctacttaggcaagtcaccagagtggtaaaataaactattattagctggtaaaatgcaagatagtttggaaggctgtatgtattacatttgggatgggtattttataaacctgttgatttctcctgtaattataaaggaaacacaggttctttgctgaaaactctgggggaaagtaaacaagaactgttcatagtactagtgcataatactcatacattttgacgcatgccagtttttttctctatgtgttgtgtggttttttttttttgttctctagatcctgtttttcttttaactttatggatcatactatgaaaaaaatagtagcaagtatttatagatctcttgagtgccaggtactgagttaaatgtgcaagtattatataatttgagcagatgtaatttaaagtaaatttaatttccagtgaaagtaaacttatatttgaaattaaaacacatttaaatcaaagaacctgaaagcaaagcagtttaaaatgggcctttcctccgggcgcggtggctcacgcctgtaatcccagcactttgggaggccgaggcaggcggatcatgaggtcaggagatggagaccatcctggctaacacactgaaacctcgtctctactaaaaaaaaatacaaaaaattagccgagcgtggtggcaggcagctgtagtcccagctacttgggaggctgaggcaggagaatggtgtgaacctgggaggcggagcttgcagtgagctgaaatcgtgccactgtactccagcctgggcgacagagagagagactgtctcaaaaaaaaaaaaaaaaaaaaaaatgggcctttcctgatactgggttagtctggtaaaattccaacatacgttgttcatgtatgcaggtatttgaacgggtactgatgtagaggtattttttgttttgtgtttttctgtgaagttgaatttacctgattaactcacaatacgaactgctctgcacgtagagaaaacagcaaatgaggcccagctgcttgtaggtgctgtgctggtctttataggggatacagtgaggaggattttgttgtctctgtcttcagcgagctcataatgaattggacacagcatataatgtgcaaccaacaaaagacttaatggttgcagattctgaactaagtgctttctatacatttttcaagtcatcctaatatatgatatggctcctttttttatcttcatttcgtgggtaaggaaaccggggcataggatggctaggaaacacacctataatcacacagctgtgaagtcatgagctctgctttgaacgcaactgacctgtgtacccaccactccaatctgcaatgaaaacagtatcagaaggcaatatgtataaattattatatgaattctgtggatggcttttgtattggtttagaagaaggaaagatacttttccaccttaactctttaagaatttatgatgtttctggggctttagctggtcctcaaaggagagaaggttctaaccatttcgagaagaattttgcacagaggtgggaaagcctgawgggtttggggcaatgaatccttttggctgcattgggggtttggagaacgaggctctataacagtttagaaagacagrgcaagttttttgtgaatgtgattaagaactgatgctgtcattgatacaagtttccctctgcgtagcacatttagttcatagagatgcttatgtttctcatttcttgtcttcagttgattygggaggagcatacttacctcgacaagcagatgtgtttccagatcgagaccactttggcygtacattctataatcaggcaattatgtcttctaaaaatattgcacaggtaatttttcatgaataaagtgtacagtggtgctttttactcttaagtatctttacgaattaggtactctgggatggcttgaaagtaaaacagaatttaacacaaaatctaatcttttttttttttttatactttaggttttagggtacatgtgcacattgtgcaggttagttacatacgtacacatgtgccatgctggtgcgctgcacccactaaatcgtcatctagcattaggtatatctcccaatgctatccctccccgctccccccaccccaccacagtccccagagtgtgatattccccttcctgtgtccatgtgatctcattgttcaattcccacctatgagtgagaatatgcggtgtttggttttttgttcttgcgatagtttactgagaatgatgatttccaatttcatccatgtccctacaaaggacatgaactcatcattttttatggctgcatagtattccatggtgtatatgtgccacattttcttaatccagtctatcatttttggacatttgggttggttccaagtctttgctattgtgaataatgccgcaataaacatacgtgtgcatggtctttatagcagcatgatttatagtcctttgggtatatacccagtaatgggatggctgggtcaaatggtatttctagttctagatccctgaggaatcgccacactgacttccacaatggttgaactagtttacagtcccaccaacagtgtaaaagtgttcctatttctccatatcctctccagcccctgttgtttcctgactttttaatgattgccattctaactggtgtgagatggtatctcattgtggttttgatttgcatttctctgatggccagtgatgacgagcattttttcatgtgttttttggctgcataaatgtcttcttctgagaagtgtctgttcatgtccttcacccactttttgatggggttgtttgtttttttcttgtaaatttgagttcattgtagattctggatattagccctttgtcagatgagtaggttgtgaaaattttctcccattttgtaggttgcctgttcactctgatggtagtttcttttgctgtgcagaagctctttagtttaattagatcccatttgtcaattttggcttttgttgccattgcttttggtgttttggacatgaagtccttgccyatgcctatgtcctgaatggtaatgcctaggttttcttctagggtttttatggtttttggtctaatgtttaagtctttaatccatcttgaattgatttttgtataaggtgtaaggaagggatccagtttcagctttctacatatggctagccagttttcccaacaccatttattaaatagggaatcctttccccattgcttgtttttctcaggtttgtcaaagataagatgtaggtatgcggcgttatttctgagggctctgttctgttccattgatctatatctctgttttggtaccaataccatgctgttttggttactgtagccttgtagtacagtttgaagtcaggtagtgtgatgcctccagctttgttcttttggcttaggattgccttggcgatgtgggctcttttttggttccatgtgaactttaaagtagttttttccaattctgtgaagaaagtctttggtagctttatggggatggcattgaatctgtaaattaccttgggcagtatggccattttcacgatattgattcttcctacccatgagcatggaatgttcttccatttgtttgtatcctcttttatttccttgagcagtggtttgtagttctccttgaagaggtccttcacatcccttgtaagttggattcctaggtattttattctctttgaagcaattgtgaatgagagttcactcatgatttggctctctgtttgtctgttgttggtatttaagaatgcttgtgatttttgtacattgattttgtatcctgagactttgctgaagttgcttatcagcttgaggagattttgggctgagacaatggggttttctagatatacaatcatgtcgtctgcaaacagggacaatttgacttcctcttttcctaattgaataccctttatttccttctcctgcctaattgccctggccagaacttccaacactatgttgaataggagtggtgagagagggcatccctgtcttgtgccagttttcaaagggaatgcttccagtttttgcccattcagtatgatattggctgtgggtttgtcatagatagctcttattattttgaaatacgtcccatcaatacctaatttattgagagtttttagcatgaagggttgttgaattttgtcaaaggctttttctgcatctattgagataatcatgtggtttttgtctttggctctgtttatatgctggattacatttactgatttgcatatattgaaccagccttgcatcccagggatgaagcccacttgatcatggtggataagctttttgatgtgctgctggatgcgttttgccagtattttattgaggatttttgcatcaatgttcatcaaggatattggtctaaaattctcttttttggttgtgtctctgcccggctttggtatcagaatgatgctggcctcataaaatgagttagggaggattccctctttttctactgattggaatagtttcagaaggaatggtaccagttccttcttgtacctctggtagaattcggctgtgaatccatctggtcctggactctttttggttggtaaactattgattattgccacaatttcagctcctgttattggtctattcagagattcaacttcttcctggtttagtcttgggagagtttgtgtgtcgaggaatttatccatttcttctagattttctagtttatttgcgtagaggtgtttgtagtattctctgatggtagtttgtatttctgtgggatcggtggtgatatcccctttatcattttttattgcgtctatttgattcttctctctttttttctttattagtcttgctagcggtctatcaattttgttgatcctttcaaaaaaccagctcctggattcattaattttttgaagggttttttgtgtctctatttccttcagttctgctctgattttagttatttcttgccttctgctagcttttgaacgtgtttgctcttgcttttctagttcttttaattgtgatgttagggtgtcaattttggatctttcctgctttctcttgtgggcatttagtgctataaatttccctytacacactgtttgaatgygtcccagagattctggtatgttgtgtctttgttcttgttggtttcaaagaacatctttatttctgccttcatttcgttatgtacccagtggtcattcaggagcaggttgttcagtttccatgtagttgagtggttttgagtgagattcttaatcctgagttctagtttgattgcactgtggtctgagagatagtttattataatctctgttcttttacatttgctgaggagagctttacttccaagtatgtggtcaattttggaataggtgtggtgtggtgctgaaaaaaatgtatattctgttgatttggggtggagagttctgtagatgtctattaggtccgcttggtgcagagctgagttcaattcctgggtatccttgttgactttctgtctcgttgatctgtctaatgttgacagtggggtgttaaagtctcccattattaatgtgtgggagtctaagtctctttgtaggtcactcaggacttgctttatgactctgggtgctcctgtattgggtgcatatatatttaggatagttagctcttcttgttgaattgatccctttaccattatgtaatggccttctttgtctcttttgatctttgttggtttaaagtctgttttatcagagactaggattgcaacccctgcctttttttgttttccatttgcttggtagatcttcctccatccttttattttgagcctatgtgtgtctctgcacgtgagatgggtttcctgaatacagcacactgatgggtcttgactctttatccagtttgccagtctgtgtcttttaattggagcatttagtccatttacatttaaagttaatattgttatgtgtgaatttgatcctgtcattatgatgttagctggtgattttgcttgctagttgatgcagtttcttcctagtcttgaaggtctttacattttggcttgatttttgcagtggctggtaccggttgttcctttccatgtttagcgcttccttttttagggcaggcctggtggtgacagaatctctcagcatttgcttgtctgtaaaggattttatttctccttcacttatgaagcttagtttggctggatatgaaattctgggttgcaaattcttttctttaagaatgttgaatattggcccctagtctcttctggcttgtaggtttctgccgagagatccgctgttagtctgatgggcttccctttgagggtaacccgacctttctctctggctgcccttaacattttttccttcatttcaactttggtgaatctgacaattatgtgtcttggagttgctcttctcgaggagtatctttgtggtgttctgtgtatttcctgaatctgaacgttggcctgccttgctagattgtggaagttctcctggataatatcctgcagagtgttttccaacttggttccattctccccatcactttcaggtacaccaatcagacgtagatttggtcttttcacatagtcccatatttcttggaggctttgctcatttctttttattcttttttctctaaacttcccttctcacttcatttcattcatttcatcttccattgctgataccctttcttacagttgatcgcttcagctcctgaggcttctgcattcttcacatagttctcgagccttggttttcagctccatcagctcctttaagcacttctctgtattggttattctagttatacattcttctaaatttttttcaaagttttcaacttctttgcctttagtttgaatgtcctcccgtagctcagagtaatttgatcgtctgaagccttcttctctcagctcatcaaagtcattctccatccagctttgttccgttgctggtgaggaactgcgttcctttggaggaggagaggtgctctgcgttttagagtttccagtttttctgttctgttttttccccatctttgtggttttatctacttttggtctttgatgatagtgatgtacagatgggtttttggtgtggatgtcctttctgtttgttagttttccttctaacagacaggaccctcagctgcaggtctgttggaataccctgccgtgtgagatgtcagtgtgcccctgctggggggtgcctcccagttaggctgctcgggggtcaggggtcagggacccacttgaggaggcagtctgcccgttctcagatctccagctgtgtgctgggagaaccactgctctcttcaaagctgtcagacagggacatttaagtctgcagaggttactgctgtctttttgtttgtctgtgccctgcccccagaggggagcctacagaggcaggcaggcctccttgagctgtggtgggctccacccagttcgagcttcctggctgctttgtttaccttaagcaagcctgggcaatggcgagcgcccctcccccagcctcgctgccgccttgcagtttgatctcagactgctgtgctagcaatcagcgagactccgtgggcgtaggaccctccgagccakgtgcgggatataatctcctggtgcgccgttttttaagctggtccgaaaagcgcaatattcgggtgggagtgacccgattttccaggtgcgtccgtcacccctttctttgactcggaaagggaactccctgaccccttgcgcttcccaagtgaggcaatgcctcgccctgcttcggctcgcacacggtgcgcgcacccactgacctgcgcccactgtctggcactccttagtgagatgaacccagtacctcagatggaaatgcagaaatcacccgtcttctgcgtcgctcacgctgagagctgtagaccggagctgttcctattcggccatcttggctcctccccaaaatctaatctttttccacagagagtatctaaaggttgtctccaattagagctttttattaactataggaatactcctatactgtaataagattattaaaacaggttttaggccaggcgcggtggctcacgcctggaatcccagcactttgggaggccgaggtggggggatcacgaggtcaggagatcgagactatcctggctaacgcggtgaaaccccgtctctattaaaaatacaaaaaattagctgggcgtggtggcacatgcctgtagtcccagcaacttgggagactgaggcaggagaaatgcttgaacctgggaggcagaggttgcagtgagctgagatcatgccactgcactccagcctggcgacgaagtgagactccgtctcaaacaaacaaagaacaggtttttaaaaggaaaacagggtttaaaaagaaagggctccagtaattccttttttagggctataccctagggaaactctgatatatgtatgaagagatacttagaagaataattcatggccaggcactgtgacttgtgcctgaaatcccagcactttgggaggctgaagtgagaggatcacttgagtccaggagtgagagaccagcctgggcaacatagggagaccctgtctctacaaaaaaataaaaaattagccgagtgtggtgtggcacatgcctatggttccagctttcaggaggctgaggtaggaggatcacttgagccttggagtttgaggctacagcgagctgtggttgcaccactgcactccagcctgagaaacagaatgagaccctgtctcamaaaagaaaaagaaaagaaaagttcattatagcattgtttgttagagcaaaagttagagaataacctaactgttcattcatgggagattaataatacagtttttgtctgttaaaaggaatgaactaaaattgcatctgtcaatataagtctcaaaaagtagattgagtaaaaaacatagtagaatcaatatatggctatttactatgtatgtaaaggttaaatacatcgaatcctactgtatattatttgtgtataaacatgcacgtgggagcgatacactcagctttagaacagtggttgcctctgargtgggaaggaagagacagggatgaggtaggaggtagataggcgcttcaactatatctcaaatactttattcctttttttttctttttttttttttgagatggagtcttgctctgttgcccaggctggagtgcagtggtgctacctcggctcactgcaaactttgcctcccgggttcacgctattctcctgcctcagcctcctgagtagctgggactacaggcgcccaccaccatgcccggctaattttttgtatttttagtagagacagggtttcaccacattagccaggatggtctcgatctcctgacctcgtgatctgccgacctcgtgatccgcccgcctcggcctcccaaagtgctgggataacaggcatgagccaccgcgcctggtcaaatactttattccttaaaaaaatgatctgaagtaaattttgcttaatgtcaaggtttattaagattaggtattaggctaatggatgtttgttattctgtaattttttttgcatggttggaatatttataatacagatgctgctattgtgttttcatttctttattggatttaagtttgtcatatttttattaatattctgattaatctatacttgcaattattatatatctttttgatttttctatcaacatagttggttgtaattgtttatggtatattttactgttacacagtgaccatgcctacctatatgctttatttatctaaatagaaacttcggctttgcttacttttgcacagatggccgttgcattatctatatgaaattcgtattgtggtctccatttaatctggtattatatttttttcttttagagaaacaggatcttgctatgttggccaggctggtctcaaattcttggcctcaaggatccttctgccttagcctcccaatgtgctgggattacaggcctgagccaacatgctgggcctggtgttamaatttttatagcttaccttttattagtttcctagggctgttgtaacaaattatcacaaattgagtggcttaaagcaacagcaatttatgtatttatttagagatgaatgtcttggtatgttgctccagctggtcttgaactcctggcctcagatcatcctcctacctttgccttgtgggtagctgggattataggtgtgagccacaatgcttggctaacagaaatttattctgtgaagttctggaagccataactctgcagtcaaggcagcagcggggctgtgcttccaggggacattctgttcctttcctagcctcttccagctcctggtggctccaggtattcccctggcttatggctacctccctcccatgtctgcctccatcttcacgtgaccttctctgggtatctgggtcttctccttctctatcttataagaacacttgtcactggatttagggaccacccaggtaatccacaagattcttaattatatctgcaaagattcctttttcaaatgagaccatctttacagattctggtgattaggatatggctatatctttttatcttttgttgggggaggctactatttaagcactatagccctctatcatctaacatgttctttgctgtgtctttctgctgccaggtggagtctctattcctgtggaactttgaagtttaaagtgctttaaaatcagatcttttaaaaatcaaaagtgtacttacttcttggaataagcaatacctgcttatgataaaaaactcaaaatgtctgaagggcatttgactgaatgactgtcttccttttacttattttatttttgttttttaaaaaatattagggctgggcgtggtggctcatgcctgtaatcccagtactttgagaggccaaggcaggaggattgcctgagcccaggtgagaccagcctgggcacacacctgtggtcctagctgtttgggaggctgaagcagaaggattacttgagcccaggaggttgaagcttcagtgagccatgattgtaccactgcacttcagcctgagtgacagaatgagacactgtctcaagaaaatatacatatatttataatatataatatatcagagaaggaaggtggagtaagtactagtgttttcagtatgaagaaaagtgctcacacatagccggacatcttcagtgcagatttcaggtttagggctcatatattcaggaaggggtcagaaaagatactatggagactcaatatatgataacagaaatttctttttaaattccaagaggttcatattatatatctaattcatattatatagttcatattatatatatatggttcatattatgtataacgtatataatacacacacacacacacacacacacacacacacatatatcagtatttctttgagctacttctcttagcctttatttttttctatttcccttaaataggaaaggaggtttagggttaaggtttgccttctcatattttaatgaaccgtatttttaagtttccatagtatctgttctgagcctttcctgaatatatgagcctaaacctgatatctgcactgaagatgtcaggctatgtttctcctcttctcaaaacctaaacccgtcatttatgattttaatactaacctctcctttttgcttcatcatttattccctttctcttactctaattaattttcttgggcaaggcacggtggtccacacctctaatcctagcactttgggaggctaaggtgggagattgcttgaggccaggagtttaagacctaacgtggccagcatagtgagaccccatctctctctctctcttttttttttttttttgagatggagtcctgctcttgtccccaggctggagtgcagtggcgtgcaatattggcttactgcaacctccgccttccaggctcaagggattcttctgcctcagcctcccgagtagctgggactataggcacatgccatcatgcccagctaatttttgtatttttagtagagacggggttttactatgttgcccaggctggtctcgaactcctgaggtcaagtgatctgcccgcattggtctcccaaagtgctgggattacaggtatgagccactgtgcccagcccagaccccatcttttaaaaatgaaaaaattttttatctgcttatttttcttctcacaccccaaaatcacgttgataccttttctttaaaggaaacaaaaaaagaacactaaaatgatgccaaaagataaagaccttttctagcttctgctgtttttgaagcttttctccctacctgggtggctacatttttttccccctttgagatggagtctcactgtgtcatccaggttggagtgcagtggcacgatctcggctcactgcaacctccacctcctgggttcaagcaattctcctgcctcagcctccctagtagcagggactacaggcatgcaccaccatgcctgactaacttttttgtatttttaatagagatgaggtttccatatgttggccaggctggccttgaactcctgacctaaggtgacccacccacctcgacctcccagagtgctaggattataggcgtgagccaccgcgcccagccarcattyttaaggattggcacattgtcttcattctaactgctcactccttcaaacctccatgccctacgagagtttcaccagcctagagaccagattcccactctgcacagcctcttggtatcatcatttttttccttttcgtgaaattctccttatgcttcatgccactggggtgcccttatttatttatttattttaacgatttagccagatctcattacctgtcatctccctgatctttatctagtcttgaccacctctacatctctacttttgaacctcgggggttctgctttctcagtcaatttcctgctggtaccttagtatgaaataataagaaatatacacattgatctctgtccccagttccaggaacagagctcctaaaatcctcataagtttytgagcagtaggggcactaggaggctcttttgttccaatatttggtgtctgccccagttcctccgacagagttcctaatacccttgtagataggggtactagaagaatcttttgttctatgatttggtctttgacccccattcttgtcacagagctccaaaatcccttggaatttcctgggtgataggagcatcttttattctgatgaggcgactcttagtgggctcctggatggtgctggtcaccagaaagaccaagccatgaccataaacttggagctttcagtcccagccctatccttcagggagggagaggggctggggattgagttaataattgaccatgcctctgtgatgaagcctccataaaaatccctaaatggtgttcagagagcatctgtgctggcaaactcatccaagtgctaggaaggtggtgcattcccactccgyggggacagaagctccagccctcaggacctttgcagactcgccttatgtatcttttcatctggctgttcatctgtatcctttatgatatccttcctaaccagtaaatgtaagtaaagtgtttccctgagttctgtgggccactcttgtaaattagtcaaacccaaggatgggtagtggcagccctgatttacagtcaatcagaaatataggtgacaacctgctccttgtggattggcatctgaagtgagggccatcttgtaggactgagcccttagtctgtgggatctgatgctgtctctaggtagactgtaagaactgaattggattagaggacagctggtgtctgctggagaactgcttggtgtgtggagaaatacccccacatatctggtgtcagaggtattgagtgactgtgtcagacagtaggaaaaacactttttcctctgtcttttcagacttaggttcaaactagacattgaacacattaacttcccctactcatttgttccctcacctgagttcccatctactgctagcactaccttgctctttccctaggacttgatgtcatccttggctcttttctctgcattttcccttacttaatccttttaggtcaaaaatatacatctttgacatttttgtatccctggcagttgctctgatgccgggcacaaagtgaacacatcctaagcctttgcctaatatattgatgagtcctgttggtttcaccyttgggcagttcctctccactctgttcctactatcacccccagaggcagctcaggcctttgttaccactagactgtggctctagcctcacctgcctggtgtccctgtctgcctagtctatcctttcccatacagtggacacatgctgcaaggttattctttatgtggccctcctgttactatttgctacaaaacaaagctcatacttcttagcccgatacttaagcccccgtgtgatcggatttcaacctaactttctagccttattgctcctggaccctaaactgcagtcaacctgatgcagtcactggtctccatatataccatagccttttttgaccatctgctcaggcccatgctggtcctctttccccwcatcctcctgggtcggagtctccaacccatcttccaagacacatctcaaatgccacccttttaaggaaatcccggaatcctttactggaagtaatattttcttcctcctagctcccatagttcttgtactgtgccttactaatagcatttatccctttaatctagatatatctggactaatttcctctactagtctgttagctacttgagaatagggacaatttagatgaatttttatatcctcacacatttccctgagatggtacttacttaatatttattaaaagataaatctccttataactattaaagttgtaatatgatagatattgagtggttctgtttcctaagtttaatgtttgttttgttgtttatttaagactttggtttagacagactgataaaacaattccttatgtttattatataagttaatcacttctaacttcaattatgttatgtatttatttcgatagtaagcaccagcttccttactcaaatttagttgtttttctctccaaggttggtttttatttaatgttactagccttgcccattgtaaattcatttacctagttatttcaaagagtatgtctattggcaatcatacccgtatcgttttctgtrtctttgctgctataaaaatgtggacagattactatagaccttccaggtttcaacattttcttttgctctcaaggagaaaagatagttaaactaggtacttacttttatgttctcttctgtttcatctttccttcatggcagattttaagaccccttaatcgtttctggagtttaaagagttgatgtgtgggtgtctggtggtctttctttgagtctcatgtcatgasaatgccttctctgggccttctccatatctgaggcctgatgacatgatgatctttgcaatgttcttcttttattttcccagtggtgcagtttaaatgtgtcccccaaaagtttatgtgttggaaatgtgattgccattgtggtgatgttaaatggyggcacctttgggaggtaattaggtcatgagagctctgccctcatggatggattaatgctatcattgtgggagtttggccttcgtttgctctctgtctcacacacacttgccctctcttgccctcccaccttctgctgttccaccatgggatgactgtcagatgccagtgccatgctcttggatttcccagcttccagaacygtgaaaagtaaatttcttttttaaattctttctttctttccttctttccttcttccttccttccttccttccttcctttctttctttctttctctttctttttgtagaggtgaagtcttgctgctcaggctggtcttgaactcctggcttaagtgatcctcccacctcagcttcccaaagcattgggattataagcatgagccactatgccaggccaaatttcttttctttataaattactcagtcttgggtattctgttatagcagcagcaaacagtctaagacaccaattatggtttccatgtctggctttttaagtgtgagacttagaatcctcctcagaagtgggatcttcatgtgtgttttctttaggtctcacattacttttgatttttataattgagtgatagtctagtttgctgtagattgatctttgctctggtgcattggttctctttcttgttttagtataagcaacaaggtttttgtttgaatgaacagtttgtttcttctgaaataggcatcattcatctagccatgcttagttgcagttcctcaggcctttctcttttcctttgtgttgtattctgcctattttcacttctttttggagacatatttaaaattattctcaggtttccctttctcccccctaccttacctccctcctcctccccgcttgccttagcttattatttttgaaatgtatcttgttggttttcactgttttgaccttggtaattgttttgaggagcttagttaggataggtactgcatcctttttctttttttcttttttttaaagacagggtctcactctgttgcccaggcttgagtgcagtggcacaatcacagctcactgcagccttgacctctcaggttcaagtgatccacctgcctcagcctcccaagtggttgggacttcaggtgcacaccaccttgcctggctaatttttatttttatttttgtagagatggaatctcactatgttgcccaggctggtctcatacttctgggctcagggaatctttctgccttggcctcccaaagtgctgggattacaggcatgagccaatgtggcctctcgttgttttatttgtttatttatttttcgggacaggtctctttatgttgcccaggctggtcttgaactcctgggttcaagcaatcctcttgcctcagcctcctgagtagctgggattacaggcgtgtgctaccctgcttggcttgttttaaaaatgcatttcwaagcaggcacggtggctcacacctgtaatctcagaggctgaggtgggcagatcacgaggtcaggagatcgagaccatcctggctaacatggtgaaatcccgtctctactaaaaatacaaaaaattagccgggcatggtggtgggtgcctgtagtcccagctactcgggaggctgaggcagtagaatcgcttggacccgggaggtggaggtcgcagtgagccaagatcacgccactgcactccagcctgggcgacagagtgagactctgtctcaaaaaaaaaaaaatgaatttcaacctgtgatggagatggatagggcctaggagaaacaaaatcactgtttgatttctttgaggctctctgacaaaaagattgaggaggaaacagaacatactggataagactgactttttggattctttgtgcatttcaatctatccagttggcataggtaagcatgactactatcaaatcagtggtattgatcagtcagtatagttgataacgttcttaaattcttgacagctattgaattgagatgtatattttgtggcttttattttttaatggtggctcttcaggtaggggcaggaaaaatgggatgtgggcagtaatatctgctttctactttgaattgaaaaagaagtaaggtgacagatttaaaaaattattatatttttaatggcttttctatcaagcagttggaccttttttctccctccaagttatattacatttatcacagcatttctatgaattggatagtattctacaattttgcagggaggaactgaggtctagagttcacctagcttttcagaattagataaaaaatctcttagctctstgtcagagaccctttccatggggcaggctgttgacctacaatatgtaatttgcttttggtgcaaggagacccagtctctatttgtttaggcaagacctagagggtaatgaaattcaatctaaagcttttctggatgattacctctgttttgtagcatctcatttgcttttgcttggaaatgttgcctgtgccttctgtggaggggatgacaagtattgttactgtcaggtatgtctcatcctcatccttcttgcacgttcttactcttgattcaagtcttagaatcacctcaccttgcaagagtgatctctgtttgttcctgtcacagagcaggcccatctcactggtgactgggtggacggtagtctctcagtggagttctttggagttcacctctgtcctgatgcagatgcaggtccctgtgatgtctgtcctggtacaatgcctatgttgtgccacatcacaagccaaatctctgcctctgagtctggtcagaaaagtttctggtcatgcatcttatgtcttttcagtgtccttaggtaacgtctttgtggtaccaccagtgaatgctttgggacatggcaagttgttaatgctgtttggccctgggatccctgtgctttgtgagagaaagaagcagatacaggaagaagcagatacagctgggcacggtggctcatgcctgtactctcagcttcttaggatgctgagaggtaggaggattgcttgagccaggagtgctacctgggcaatattgggaggcctcatctaaaaaaaataaaaataaaaaagaaagcagacmcagtggcagaactcttgttccattcactttgtcmccttttgggagtaagtgaatgactcagaactaaatgacaaggattattagttgggcgtggtggtgcacctgtagtcgcagctactcagaaggctgaggtgggaggatctcttgagcccgggaagtcaaggctgcagtgagctgtgtttgtgccactgcactctagcctgggcaacagagtctcaaaacaaaaagagagaagagattgtatgacattgagtgacagtgactaatcattaattagtgagctcttttatctctgttttttaatttaatttttatttctgtcatcagaatttgcttttagcaatattaagattttgcctgttgattaccagaggctgggaatgggagtagaggttgggggaatgtgaggatggttaatggatacaaaaaaaaaaagaaagaatgagtaagacctattatctgatagcacaactggatgactgtagtcaataataataacaactgcacatttaaagtaacttaaagtatgtaattggattgtttacaactcaatggataaatgcttgaggggatagatacccattcttcatgatgtgcttatctcacattgcatgcctgtatcaaaacatctctcgctgggtgtggtgcctcatgcctgtaatcccagcactttgggaggtcaaggtgggaggatcgcttgarcacaggagttcaggacctgcctgggccaagtttctggtcattcatcttayatcctttcagtgtcctcttagtggagaatgccatagaattttctttctagggtttcagatcacttgtccagtgagctttgtccagtgtaggctcatgtaacgtctttgttgtaccacagatgaatgcaacatggcaaaacgccatctctactaaaaaaaaaacaaaacaaaactcaggtaccccataaatatatagacctactatgtacccccaaaaattaaaaataaaaacaagattttgcctgttagatacttgtttgagaattttgactcctttgtacttatttttttgactcattaaaaaaatttttttacascttcgttgagatataattcaaatatcatataacttacccatttgatgtgtacaattcaatggcttttaggatattcacagagttgaatgaatcaattttagaatattttcattcccccaatagcagtcactccccatttctacccagtcccctgcagccctaggccaccactaagctactttctgtctatagatttgcttgttctggacatttcatgtaaagggaatcatatgataagtagtcttttgtgactggcttctttcacttaacataatggtttcctggtcttgaactcctggcttcaagcagtcttcctgccttagcctcctgagtagctgggattacaggcatgtgctaccctgcttggcttgttttaaaaatgcatttcaaggcagacgcggtggctcacgcctgtaatcccagcactttgggaggcggaggcgggcggatcatgaggtcaggagatcsagaccatcctggctaacatggtttccatgtcttgctcctggttttccttcgctctctgggatggcacagaaagttgtacatatttctgcagtacgtttcataaactgttcatgaaaaaagaaaaaaaaagttctacatattgtctgccatctctggaatagttgaacaggttrgataggttctttgaagaacaacaatagaaaagtacttccaaacaaagtctgtctcaagtcttcagatgcacttcaattgtagtcacttaagacagatgttttttgatctctgtattaattgtcctattgtagcagaacaaattgtcccaaaacttgtgcagtgtaaaacaagacacattgattatctcgcagtttctgtgcgttgggagtctgggcgcagtgtagctctgggtctctcacgtggctgcagtcatctcggagcttgactaggaaggacccayttcctggctcactcccatggctgttggcagggtccagcgctttggaggcctgtttcttacgagctgctggccagcggccttcctcagttgcttgccatacagcctcttcctagagcagctcacaccatgtcacgtgacttcatcaaagtgagagagtgagaagacaagaaaagaaagagggccagcaagagcaagagggccagcaggatggtagacagtttctcatggcctgaccacagaggtgacaatccatcacttgccatattctctttattacaagtgagtcactggacccaccacatattcaagaggaaggaactgcacagaatgtgaataccaagtcacgggtttggggggaccattttaaaagcctggttaccagaatctcctgtccttttctgagcttgtgtagctagtgtcagagaggtggattgctggtttccttggttgttgaggaactgtggagaaatgtgtcggaagtgcccttagccatatggtaaaattcccggaagtagatatgctaataatttgtcagctattcccttgtgagacttttctagatctctcttccatccttcttcccctactcaaatggtgtcttagtcatttccagctgctataccaaattatcatagactactgggtgtcttaaaaaacagacatttatttctcataactctggaggctggaagtccccagagataagggtacgagcatggcctggttcttgatcagggccctgttcttgactatgttctcacatggtgaccaaagagatctcctgtctcttccttataagggcactaatcccatggggagggggggccctacctcatgacttcatcccaccaaattactccccaaaggcctctgcctccgcataccatcactctggggagcagggcttcagcagatgagttcggaggagacacaaacattcagtctgtagtagatggtatgatggcatttagtttcatttctctcacctttgtcttactacatttctttcttcctttctttttctttttctttttttttgagacggagttttgctcttgttgcccaggtggagtgcaatggtgtgatctcggcttaccgcaacctgtgcctcccgggttcaagccattctcctgcctcagcctcccgagtagctgcgattacaggcatgcaccaccgtgcctggctaatcttgtatttttagtagagacggggtttctccatgttggtcaggctggtctcaaactcccaacctcaggtgatccgcccacctcagcctcccaaagtgctgggattacaggcgtgagcyaccacacccaccccctgctttctttctttcttttttttttttttttttgagatggagtcttgctttgtcgcccaggctggagtgcagtggcgtgatctcggctcagggcaacctccgcctcccaggttaagtgattctcctgcttcagcctcctgagtagctgggtttacaggcatgcascaccacacccaattaatttttgtttttttagtaaatactgggtttcaccatgttggctaggctggtcttgaactcctggcctcaagtgatacacccacccccacctcccaaagtgctgggattacaggcatgagccactgtgcccagcctgtctaactacatttcaacacaataattcctcttcctctgtttcctccctgacctgcctccctcatcttggtctttgaattcttgctgacagttgctttctcctccttttgctctctggttgttttcatgggactctgccatgcctgcttagttctttaggtattatttttgaaaactgttcctttttagatttgacatcactgtgactcttctgtaagttccttgactgtatttctttttggatactgaaatagtttgagctgaactcagtgttctggtacagagaacaggatgctaaggtaaaattgtgtcctttgcttcccacagaaatttgaaaaagaaagcccataaaatgtttcaaacatgcagaaagtatacagaataatagaactgaatgctggtgtgctcactccctgggtgtattaagtgttaacatgacattttgttatctttgccacagatttgaaaagaatgtactcatttaaaagtttatttatgtgttcaaaatatattgatggacatgttggttatttacatatttttgctattgtaacaatgctatgtgagtgtttccctgtgctcataggcaagtttttgtagccatagataatctgtaacacaaacttctgggtgattgataagcaaaactgtaagtgataatcacttctgtaatatgttgacaaataaatgttgaagccactttcaataacatacatgaaagctttagttgaggaagaatgctttttgtgttggccatttagatggaaaaatgctaactcatgttacctttcatcttttgattataccagtatggcatgctgtttttcagaacatgctgtttgcatgcctataaggaaaactgatggaatattggaattagtagcaaaaattgctttcatatgataatttaaaaaatattcattatatactttatttttccttggtgrtatcgttcaatcctatttaggagtcatcagccaaacctatatttattattctttgtaccatcctaatttctgagcaagatttttttaaagctttttattatggaaaattttaaacacacaaaactagagaagatagtactgtgaaccctatgtacacatcacccaacttcaatacaatcgacttttcttttgaggaaggctttaaactgcaatcttaacattagttttatatttagaaagtattacatccagcgtaacacaaaatattaataacatccatttgaagagttattttagtattcctgtgaggtaactggcaaatgtttagaggacttattattattattagacataaaagtyatccttttaatacagttttgcaaaattataggtatattgtggatttcttctctccattagtttttcaggccagtagtctatcaggccagtcttctctctgacagggagattgtccataagttttgtaaaagtgagacataagcccttcaaaatgttttgatacaagaagtcagaaaactatttcaaacatttagaggactttgtttttaaaatgatgttcagggaccaaccagtaatatcccctggtcactgcagtgtttgtgggattctggatcaaacactatagaagtcactgcatgagctgcatctcatgtgtttgtcgtgtgcttggattccagatcgcagtggtcatggsctcctgcaccgcaggaggagcctatgtgcctgccatggctgatgaaaacatcattgtacgcaagcagggtaccattttcttggcaggaccccccttggtaagaacataagaacgttggtcgatggaaattaaatatgcagaacataaaatacaccatttaaactattttttgatgttttaaaaaatattgtgataaaatatgcataacataaaacttactgttgtaaccgtttttcagtacagcttggtgacgtttagtatgttcatattgttgtgcaaccatcactaccatctatctcgagaacattttcatcctccccaactgaaattctccctatttccgtcacctctgccacctcggcaccaccattctactttctgtccttatgaatttgactattctaggtatctcacatgtcagtggaatcatataatatctgtccttttgtgatagacgtatttcacttagcaaaacgtcttcatgkttcttctatattgtagcagatgtcagagtgcccttcaytgttaaggctaaataatgttccattgtatgtatacactgtattttgtttattcattcatccatcaatcgatatttgggtygcttccactctcaggctattatgaataatgctgctatgaacatgggtgtacaaatttctattcaagttcctgctttyatttttttgggtatatacctggaagtgaaattgttggatcatatggaattctatgtttactttttgaggaatcacttcattcctttttatggctgaataatattccattgtatggttatgctgtgttctagctatccattcatcagttgatgggcatttaggttgcttctgcttttgggtattatgaataacggygctttgaatgtataggtttttgcatggaaatgtttttatttctgttggatatgtacctatgagtagaattgctggatcatgtggtagctgtgtttarcattttgaaaaacttctaatctatccaatacatgttttacatttctaccagcagcatgtgagggttctgattgttccacattcttgtcaacacttgtaattgtatgtttgtctgatgacagccatctttgggggtgtgaggtagtacctcattttggttttgatttgcatttccctagtgactagtgatgttgaggctttttttttttaactttttaatttttattttttattgaggcagagtctcacactgttgcccaggctggagtgcagtggtgtgatcttggctcactgcaacctccacctcccaggttcaagtgattctcctgcctcagcctcccaagtagctgggattacaggtgcacgccaccactcccggctaatttttgtatttttagtagagacagggtttcaccatgttggccaggctggttttgaactcctgacctcaggtggtatgcctgcctcagcctcccaaagtgctgggattacaggcatgagccactgcacctkgccaaggcatcttttcatgtgcctgttggccatttgtatgtcttctttggagacatgtctattcagattctttctcatttttaaattgggctatttgtctttttatttagttgtaagaattctatatgtgttctgaatacaagtcccttattagatttgcaaatatttttgctcattctgtaggttgtcttttttactttcttagtgatgtcttcctttgaagcacaaaagttttaaattttgatcacatccagtttatgcattttttcctttggtttcttgtgcttttggtgtcttatccaagaagcctttgcctaacccaaggtcatgaagatttactcctctgttttcttctgagagtcttataattttagctcttgcatttgggtctgtgatccattttgagttagtttttgggtgtgggataaggaagggctccagcattsctctatatgtggatatgcagttgttccagcatcattagttgaaaggactctcctttccccattgaatggtcttggcagaaaaaaacttttacttattttttcttttacctcagctatacaattgtttgactcaaggtcaataacaagttaataagctgttaagagaaagcagcaagattcctacagtgtattaacttttgtgtaaaatggagagaaatatacatttgtatacttctatatgcataaagaagttctagaaaagatacgaaaatactgcttaaaatgtagaggagaggaaacagggtagaagaaagacctttgatttttttgaccctgagactgggtacagtggctaatgcctgtaatcccagcgctttgggaggccaaggtgggtggatcacttgagatcaggaactcgagaccagcctggccaacatagtgaaaccccatgtctcctgaaaatacagaaattagccaggcatggtggtgtgcacctgtaatcccagctactctggaggctgaggcaggggaattgctttactgggaggcggaggttgcagtgggttgagattgcgctactgcactccagcctgggcaacagagcgagactccatctcaaaaaaaaaaaaagaargaaagaaacagaaaaggacaaataaatgattttacttctatgaaatattgagaataggcaaattcatggaggcagaaagtagattagttgttgccagggactaggaggagggtggaatgggagtgaccgctaatgaggatggggtttcttctgggagtgatgaaattttctggaattgggtagtggtgatggttgcacactttgtgcactttgtgaatgtactaaaagccactgaattgtatgctttaaaatagtgaattttatggtatgtgaattctattccaaaaagtttgttgcttcaaaaatttgtccaagaatcatcttkggttatggaatactaatacaaattcattagaaagaatatgttaaatagagcttatgttttgatgtaaaataagtatatttcccaaaagagggtgttaatttttaataacttttactgaagatcaggtaggcctgaagggctgccatttcaaatgtaaaagtcttaaggcattattttaaaagcctgcagccattattattattattattattactattattattttaatttatctcttgtatgtgatagctgtcatttgttaatgagaggaaaatgcactcaaaatttacctttgtatagtaaaaggtacaaactttcatgggccattcttgtttattttttgactagaaaatgagtaaagatatgactacaatttgaaaacatctttttggaaatacaggcagatcataatagtggaataatgcgaagggttttagagagaagattttgtctaagggtcagtagttacaatgtccattcagttaacttgtaccttataaagaagccacttggcagccagggaagcctgaagttctgttggagaactggaccccatccagcaatccacctttgaaagaccatgttcacagggagaaaaaggcagtagcagcagcctcatcctttagagaattctaaattctgacgcacgcttgaccgaatgttgagaaagggctttgaagggtttgcacgtagtgtggggtgtagtgctgtagcttttagtagcttagagtagttgaaaaaaacagatagtaagacaagtttttgaaggcgctttttgttctcctgtcttttgtttatcttttgaacttgtcatttagtcaaatgagctgttttaattttctctttgacttctatcatctttgcacctatcacactatcaaacgttgtgggtgttcaataaatattaactgatgacaaattcttatttttttttttggttgatattagtcagatccctgaaaataaatataatttatctgttgtttattcctttttgcractttaaatatccagacacctcttataatttgttattgtctggactgaatgttattttacactaaatgttttggaaggaaaagaaccaagaatttagttctgggggtggaataattggaggtgaaaattttaactaactctctctgcagaaggatatttaagacaaagcttttgatgtagagrgtaataagttgtttctatgctgtattttcttttcttttttctttttgtttcagggctcccctcaagaaagactttttctttaccttcaacctctctgtgctatattttagattaatgttcattattctaataaaagcttttcttatttgagttgattaatttgtttctttttcttcaaagaaataggaatcaataaataattcctaaggggttggattggcatttagccttaaattatttttctttctttttcctggtagaatttctctggctataattaagttattcttaatttattactggagtttgtttctttttggccacattctgctagatcttaggtttaggtaatcttggagatttttttcctacctctctttcctatgcagagtttgtgatagtaaatggaatttttcagcatgttattgagtattcaaagatgaataaatcacagttcctgccaccaaggaattcacagcatagaggagatgacagacataacatgcacattactgaactacattctgacacatgccgtgttggaggtgtaagtgcaatgcccttggaccgtggataggcaggcagtcctctattaataccatggagaaggcctgggcgggtcaggaaagctgtgtagaggaggcaacttgaggtgggacttgaagggtaagtgggaattcgtcaggtaggtgagaagaagagatcccaggcagtgggaggaacacacacacagacacaaagtcttgaccacatgtgtcagggcagcatgacatagggaaagaggatggcctttcaggtctttcttctttttttttttttttttgagacggagtctcgctctgtcgcccaggccggactgcagtggcgcaatctcggctcactgcaagctccgcttcccgggttcacgccattctcctgcctcagcctcccgagtagctggkactacaggcgcccgccaccgcgcccagctaattttttgtatttttagtagagacggggtttcaccttgttagccaggatggtctcgatctcctgacctcatgatccacccgcctcggcctcccaaagtgctgggattacaggcgtgagccaccgcgcccggccaggtctttcaagctggaaaygtgtgggctcaaatgagactccattgcttgctatggactgtaagcaagttctttgtgactctgggcttagatttttcacctgtaagagtaaagataatagtctccaggtttcctaggtgcatgaatgagaaagcacagtgttctttagttctatggaagaaaaagtacargtatagtcaggtgaggagttgtgcatgttggggaagcatttttatatgtctgatggaccgatttcactgatgatttttatccttgttgtaggttaaagcggcaacyggggaagaagtatctgctgaggatcttggaggtgctgatcttcattgcaggtgaaacagaaatggttgtttctttccgggattgagtgtcattttgtttgtttgtttaaaagaagttttangtatttgtttccagtgctaaacttgccagaccacaccacagtttatttgttcttgatctgctggtttaatgttcaattctttgaactgtagagttgcatttccaagctagagcatcagccaagaaggactggagagacaggtttcttatttatttgacaaacattcaytgggcacctgttatgtagcaggcactgttctgggtgcctgaggtaagaggtagatactatctttgacttcgaggaccttatattctagtcagggaggtgggcaattgcaagtaattgcacaaaattatgtaaatgtggctgatacgcgataaggcttacaaaggagaagagggaagagcatagaggaggtgggtctaccctggggtgtacagttaaatgtttagtaactggttctctggggaggaaaaaatgccccgatctgtggcatttgccaatttctgtggtatgagtgatcccaccatggctgatttcargctgccaacatgatgcctctatgtggaatcagacacagatgcacgtagttggctcttgtgagttagctgtgagctggcttcgtcacattgttggcctgaccatgttaggttagagtgcaggggtaagaagaccctctacctcctagaatgttgtcagaagtcaatgagatacaatacatgtggattgctttagaatgaaactatacctgcttttgataagttagctataaatgttggttgccattatgattattttcttgtttgtcatcatagttgctcaataaaggttttagactttttttttttaggagtaattgggaaacaattgaggaggagggtttttttttcagttttatatatatatatatatatatatatatatatttttattttttgtagaaacaggtgtctcactgtattgctcaggttggtttaaaactccttgcctcaagcagtcctcctgccttgcccttccgaagtgctgggattacaggagtgagccactgcacctggactaaatttttaagcagtttgactatttaaaaaaagtaaagctgtaggcaatatattatgttaasggtgtagattctggaatttaacttccgtttgcctcccctattccccttgggacttagacaaactgcttaccctatctgagtctcatttcctcatagataaagtgaaaattgtgaatagtgcctgcctcataacacagcatctactacatataacagtaataactctattactgttattcataataacctgtttaaaattgtgaggaaatgattgggggtgatgaatttttttttttggaaagtaccatgaaatttattagtcacaagtggctctgtgttctctcaaatgcatctttatacctctcttaagtcatccttaagagctaatttgacacaaagacttatatatacagtgtctcattgaaggttttcctttcctgctgttttggtaaatactagacagttttcataaaaaagcattttattttaaatatttactgatttaraagctgttccttctgcttctatttgacttctgacagtgtagttataagtcagcatttataactggtattatgtatgaagcatttaaaatatatggtcagtcataacatgataaaatgttgtattaaattaaagaaactgaaaaagatctaccatttgcgaggcatctgtgggctatgaaaaagagtaaacgtggtctctgcttttactcaggaactcccagtcctaaagtagagtgtcatgaaatcactgagagcctagctctaagatatgtctcccaaggagtttggtgttttcccaggcaagccataaaaatttagattgcagcagcttagtccttactcataaaatgaacaaattatttttttcaggtatgtatttttgactgactttacagagttttaaatactttattagaaagtcatagtttatctacatttatctactattgaaataacaggccatctaattgggacaggactaataaccagagcaagcccgtacttcattcactgcacttgaaattgaacaggaacttccatggcccctgccacagaaccgttttactagttccgatttttacccataatccaagggccaatgtattcaagccttttcatttgttgcctgtgatggcttactgtcagtgtaactttgtagggagggggctcagagttctctcagaaatgagaggccagaattggcatctccattaggagctcagttacgtacacagtttatgccgtaaccaactacatcatgaaagtgtgccgtctgtggttggccttcatcacacgcaattctgcttacggtacaggggatgagtacttaatagaagcctttgtcagcaaggccccttggtctagcagaggaaggttaaggttagaaaatagaaggcgggggttcttatgyagctacttgtggtcttaggtgaaggtacttaacttatgcgtacttcagcttttcctgtttgtaaaacaaagggaatacagttttgccagagttcttaaaaggactacttaagatgacatttattaaagatgacaaattttttaagtgttttagaagtaaaagtgctgtcatctttagatgagagaagatacttgggacctgagatatttaattattttccttttccctgttctgacaagtttagtttgcttattctgtagaaagtctggagtaagtgaccactgggctttggatgatcatcatgcccttcacttaactaggaaggttgtgaggaatctaaattatcagaagaaattggatgtgagtacgatatgttcttatatcttttattttcctgaaatgcattttgactcactgcaccttgaaatcatgtctttaaacakgttaacatgatctntatttctgcaggtcaccattgaaccttctgaagagcctttatttcctgctgatgaattgtatggaatagttggtgctaaccttaagaggagctttgatgtccgagaggtatgtgaaagtggaactgtgagctttatgaccagctgtgagtctctttgtatgtgtatctatttgcaaagctaaagtttgttaagatatgttcaygcctagaartagatgtggatctcagtaaggagtgacatatgtggcaatgatacctttccatactrtggatatcattggcacagagtaaatactraaagaggggagtgggggacctcaatgattggaaagttttcattgcgcaaaaagtgtgatttggtcataagtaagactccatgtcctgtgcacattatgaatgatgtaaggcaacttaacaattgtcagctatttcttttcattgttcttattttgggaaatgggtgaaatgtcagtaagttgttggaagaaaaaacatacccttttagatcaatatgacatttgcaatgattagacctgattacagttgaaaatgttgctatggttacacattgtcgacatagtgttctgtaatttagatggacaacttttagggtttagagcatatagtcttttattttgttcagtatccatagttggcagagtagtttttaaattaggaaattatcttaatatcaaattctgtactggaagttttaatatttcaaattatattttccccttgactataaaatattatatattagttgtgaaaaatatagaaaatacagaaaagaaaaaaattaaattgcatataattccaccctctagagaaggtggctaatatttggatgttttaggttaatgtgtatatacgcacatttttatgtagttgagatagtctatacgtatatttttttrttttactttttctagtttaaattataaacattttcccatgtctttagaaattcttcatgaaatattttctacggctagatcttaattcctataatagtacttggcaacatggtaagtaatcagtaactattttctgaatgcattgatggatataatgttctgttgtatggatttatttaggcaataccccagcattgctagtgggtcttaaatcctggattttattgagcttcaagtgatacttcactttagcaaacgtgacttagttaattgtaaatttttaaattaggtttttagtttaacttttaattaattataagcacaggaaaaaatggtacttaaactctgacatacttgaaaaatgtgttgggccaggcgcagtggttcatgcctgtaatcccagcactttgggaagtggaggcaggcagatcccttgagtctaggagatcagctggctaacatggtgaaaccccatctctactaaacatacaaaaattagccgggcgtggtagcacatgcctgtaatcccagctactcgggaggccgaaacaagagaatcgcttgaacctgggagcagaggttgcagtgaaccgagattgcactactgcactccagcctgggtgacagagtgagactctgtctcaaataaataaataaataaataaagataaaaataaacaaataaataaaagagaaaaatgagttgttccaggtagccaagttctctggttggctgagaattcaccctttttcgtgtaaccactgcaaccactgcttcccaggttcaagcgattctcctgcctcagcctcccgagtagctgggattacaggcacccgccaccatacctggctaatttttgtatttttagtagaggcggggtttcaccatgttggtctggcttttctcgaactcctgaccttaggtgatccgcccacctcagccttccgaagtgctgggattacagatgtgagccaccacacctggccaattaatacattcttttaaaaaaaatgtattaaagttatagcttttaagttcagcttaaagatacattattctatgtataagtctaggaaattttaacatttccccccttcttcctaagaaattttcaaatatgctgagatgttcaaagaataatacaatgatcacctgtatatgaacctcatagagtcaacaattgttagaacttgtgtcatttgtgtgtgaaatacattttaaagcacaggcacacctcagatacattgtgggttcagttccagatcactgcaataaagttaatatcacaataaagtgagtcacatgaactttttggttttccagagcatataaaagttatatttatactatattgtagtctgttcagtgtgcaggagcaccttgcctttaaaaagtacatacattaatttaaaaataccttattgcttttaaaaatgctaacaatcatctgaaccttcagtgaatcatcttttgctggtggagggtcttgccttgatgctaatgacagccaactaatcagggtagaggttgctgaaggttggggtggctgtggcaatttcttaaaagaagacaacaatgaagtctgccacactgactgactcttgcttttatgaaatattctctgtagtatgcmatactgtttgctagcatttgatccagggtagaactttgttttttttcagactgagtctcactctgtcacccaggctggagtgcagtggcgcgatctcagctcactgcaagctcagcctcctgggttcatgccattctcctgcctcctgagtagcagggactacaggtgcccgccactgcgcctggctaattttttgtatttttagtagagacggggtttcaccgtattagccaggatagtcttgatctccggacttcatgatctgcccgcctcrgcctcccaaagtgctgggattacaggcatcacccaccgcgcctggcccagggtagaactttcaaaatgagtcagtcctctcaaacctgactactgctttattaactaaatttatgtaatactctatatccgtaattgtcatttcacagtgtttgtagcatcttcaccaggagtacattctatctcaagaaacttctttttttgctcattcataagaagcagctcctcatctgttcaagtttgaacatgaaattgcagcagttcagttacatcttcagactccacttctaactctagttatctccaccacatctgaagtgacttcatccattgaaatcttgaacccctcaaagttacccatgagggttggaatcaacttcttccagtatctttaatttaattaaatatccttaatgttgatattttgacctcctcgcatgaatcgtgaatattctcaatggcatctagaatggtgaatcctttccaaaaggttttcgatttactttgcccagatctgtcagaggaatcactatctatggcagctatagcctgaggaaatgtatttctttttttttgagacggagtctcgctctgtcgcccaggctggaatgcagtggcgcaatcttggctcactgcaacctctatcttccaggttcaagcaattctcctgcctcagcctcccaagtagctgggattacaggtgcatgccaccattcccagctaatttttgtatttttagtagagacagggttttaccatattggtcaggctggtcttgaactcctgacctcaggtgatccacccgtcttggcctcccaaagtgctgagaatacaggtgtgagccaccacgcccggcccaggaaatgtatttcttaaataataagacttaaaagtaaaaatgactccttgctccatgggctacagagtggatgttataacagcaggcatgaaaagaacactcatctctttgtgcatctctatcagagtcttgagtgaccaggtatattgttagtgagcagtaatattttgaaagaaatctttttttctgagtagtaggtctcaacagtggccttaaaaattcattaaaccatgccacaaatacgtatgctgtcakccagggtttgctgttacatttatagagcacaggcagagtagatttaggataattctgcaacttaaagtcaccagctgcattagcctttaacgagagagtaagcctgtcctcagacgacgtgcactaacctctccccagctatgaaagtcctaggtggcatcttcttccaccagaaggctgtttcatctacactgaaaatctgttgtttaatgtagccaccttcatcaatgatcttagctagatcttctggataacttgctgtagcttctataatacatcagcacttgctgcctcaccttatacttttgtggtacaaatggcttttttttttttaaacctcatgaaccaatctctgctagcttcaaatttttcttctgcgacttcacctatccaagccttcagggaactgaagagagttaagaccttgctctggattaaagggaatgttgtgcctggcttgattttctatccagactactcaaaccttctccatatcagcaacaaggctgtttttgctttctcgacattatggattttttgtgaagataagtgaatgtattttatgtggcctggtggtgttaattgtaatgcaaatacaacatagtttttcactaaatggtcctaaattgctgtgccctttgagcagccgtatctctgtgtggaagaatgatagttgttacgtgttgattgcttgttaaaggtacaatttttacaggtatatagcacccaaaacagataactgttacattcccattgtattattggattttttaggaaaagaagtaaaaaataattcagagtaaacttttacttgatggtgagaaagatgttgggaagcattcactcagttttcagcctttgcatcatacaaaacaagattttgattgatgtggcagacagaaaaagcgaagtgcaaactatgtagaaaaatagtatgtatcatctaaaatagtttctgaaattgaaaatatgcttcctgtttagaactccttacagtagtcctgatatataatgataagccccagggataaactatttagtaatttccactcctttatacatatgtggatgatccttcaagtataccagattcagaatcaatgagtctttattaagtgcttaataatagtgatagctacactttaatgagagcctgacagtatgctttagttagcactttatttttattttttacttttttatttttcttttttctaccctgttaactgatagtgctgtttatccttttatttttttttctaatttattatttcttgctgaaaggaatagttagcactttttacattttttttttttttttttttaacagatgaggaaactgaagcttaaagaattttctagtttctcagtcggagagctgggagtcagagctggcttttcatgtcagcatgatttttgtaggttcctacttccttacaagtagatcatatcttcacagctcttctgttccatcattccagaagtgagaactgagactcagaggrgtgaagtgacttactccagggcataccagtcatacttgataccttagattggagcctgtgtcttttgactctgagccctgtctctacccagctttctcattgcatccctgaacctctgccggtacattcgaacagtccttgaagctctaagtctagcaaccagcccttggagcctttcctgcttttcttgcatgcagcatggtgctgttgcttgtatagtgaagtataaaatsagaacccagaatgacttcagggcattaaccaggcatgtcaaatgaaattctagtgagattttctgtgtagtgtgaaattttgtgaaagtgacaacttcactgtgaattgttttcctataagtaactttaatacaaaaattcttttgcaatataatttctcaaggccattgttgtttttcctcttaggtcattgctagaatcgtggatggaagcagattcactgagttcaaagccttttatggagacacattagttacaggtataaaggtgaagaattgaaaatacgaacattttctgctgctttgaaaatcaggaakctcttgtttcaagactttgatacacttgacatgggctttgttgttgagagcactacaaatgtgtgagccacttttaaaaggaactgctttataaacataatttgtagcttaatggcttcatggatccaaatagtttaaaatgttaatagctagatgctgtggtgtggstccctatctgtgactttgtgacattagttgtataaaaaggttcttatagtaaaattagtagaaaatacttgtagttctttttgtttttctggataacaataattattttgaaagtttcagcactgtttcctttgttctttactgtccaattcaacgaggaagttttatattgtgtttagcttcccagaaggatatagagtgagttaaaccttctcacagcctctgtgtaggtcttaagctgattcatgcagacactagattgagaattcagtatatcacgtcaggaaaaacaaaataaggatgtttataaaagttaattttttaaatctaaactgtttagtttataggcctttgaagaagagtttttgagatagatgctagacccataataatctatttgggacaaatggaagaacaaattttgtgaattttacttgttcataaaaaacttgaaaatatagtagttagtcaaaggtaataccagagtaggaaaaaaactagctgcagaaatccaaattgcaaatatacattgaggcttaaggataaatcacagtactttgtcctagtttgatttgtgaacaaaagaagggttcacactgggagtagaatttatgtttttgtacttaggtgtttaagtgattaaaagctttttgtttgatatatagacaggatttgtcaccaaattgttcagaatgtaacagtcattgtgtagcagtttaaaacaagtcaaagccatttctgctttctgtaaagatggatgggctgtctttgtcatctgcttttatggatttgcctcctacttgctaaaagccctgtggcactcttatcccctagagtacacaacctggtttcttccatctcttgactgtactggagttcaaatacatttagggacagagaaggggagtgagaaggagaagaagggaatgagaggctggtggtgggagttgggggtgggggtggtggataagaaggatgggaggaatgagaaggtgggaggcataaagggtgaggaggtgagagggaaggacagatttttctggttctcaaatgtctctggaagttcctcagggtttcctcctgcctcagcacttaccatgtgtagcctctagtcgtttcttggacactgtgctttcccgtttgtaactcaggtttgatcaggcagttggtgaagaccgtccctctatgggtgtccctagtagtgtggggacatgttccctactcagcgcatcctgtctgtgcctggagatccctaagtggggcctagtgtgggttgaatctaagtagttaacagggttgcgcatttgcaggggcagcatctttccagtgagtgatgtgttaaattcccatgtctttgtgcagtgaagcaggactaagaatggatttctggactttttggaagtttacccctttctgaattgcttctgtaagtggcagtgccatttaggatgtactgcataagtttttggctgggattttaggactgaaatacatgtaggtggccatcaaatcagggtttcattgtatcacattaaataaacatgataagttagccaggtgtagtgactactggggcctatagtcccagctgcttgggaggccaaggtgggaggatcacttgagcccgggaggttgaggctgcagtgagccatsatctcgccattgcattccagcctgggcgacagaaaaagaccctgtctcataaatagataaataagaacatgatgatttttaaaaagtcataaacccagacaaagccagagtaaagaagaaaaaaaaaacaaatctttaaagattcaggctgggcgtggtggctcatgcctataatcccagtactttgggaggccaaggtgggaggatcacttgagcccaggagttccagaccagcctggcaacatagcgaaaccccatctctacaaaaaatacaaaaactagctgggtgtgggggtgagtgtctgtagtctcagctactcaggaggctgaggtaagagggaggatcacctgaagcctgagaatttgaggctgcagtgagccatgactgtgctactgtgttccagcctaggcaacagagtgagaccttgtctcaaaaaaaaattcagttttctggcttatcagtatgttgatactctctcttatctgttaatttttcttcaataattattttgatattaaaaatgatatttttatagtatccctagtgtctggtacatactagacactcagatatattaaatgaataaatggataatacactaagccaattatttaatcaaatcaatcaagacaaatggataactctacatgtatcrtgaccctttctagaagcaaaagaaaccagagtctaggaccttaggaacaagaagattgtgacatgagctgttttataccatagacaaaatctctttgcattttaaacttggatctgatattaaagaatgtgtaaatatgcctctttcttgtgaattgaagcccttggaaaagcacaagacataaatcttctttgaactttcttttgaggatttgctcgaatatttgggtacccagtaggtatcgttggaaacaacggagttctcttttctgaatctgcaaaaaaggcaagtactgttaaaaatatttcaagattttctgttttaatttaacataacgttgaaggtcaaataatgagttaaaatttattgcataaaaatgcttaactagatgcctcagcaaccagaacactgtgtgcgcgggcrtgtgtgtgtgtgtgtgtgtgtgtgtgtgtgtgtgtgtgtgtgtgtgcgtgtgtatatatgtgcatgtatgttagtatttgaaacagtttttatggtggtttacattaacatgctgtgacgaaccatctggagcactattaaaaatgtactcattttargaaaattctcctaagatacttgagttataattgctatagaggacatgtacatattctcagttgatagagaatacttgtcctgaaagtgcttcatgtcctggagggactcagaggtctcatggttcaaagattcaggtggttctgagacatgatctgtttattctcttctatcccattatcgctttaactttattgtatttttactttttggaaatgagaatagtgggtctttgttactggacccgtgactttaaaaaaggaagttctttttatttattattattattatttaattcaatcctccaagacatcagaaaaaagagggagttcttgaatatcttttggcttagttattatttgatttcatatatcatctcagatttacctaaacttggataaatgtaattcatatacttatttgataaaaatgtcttttaaaaaaattttaattcaccaaactacttcaggaaataaaatgtttccttaagaaaaaatatgtttagtattgctttttctcttgaaataacagggtaaaagttctctttattgatgcaggtaataggcagttaagctctttcataccctaattgaggaagaatttgtctttggtgaaattttttatcaataaaattggtttctgtattctgctacttattattactccttcaacttgattataaaatgagaacaagaaattaaaagtaacaaaaataaaaaatcacttataattataccagaaatagcttttagtaacattttattattttttcttaatagtttcctttttttaaaaaattgatatgctatatatagagaggttttgcatgttttcatttaatagtatatagacagtatttctcaaaatattagatattcctgaaataatgacttttaatgaatatataatatacttatttcaatagaggaaatgtcagagtgagtccaaacaaactctgcctggctttatttgtcagcttggtacaaataaaccccagaggagttatgtttggcctcagcctgacgtttcatttgttgaaataagccccaaaggtctatgtgattttctcattcttgtaaacgtagtcatattgaagtcgagcaattactttgcaattttgtacctgacaaggcatttccagcagaagtaaagagaaattcagatagactaaaacataaaggaaatggtttataagagtttcctaactcatacaatctttagggaagaaatagttgtatttttgtatcattaaataatttcctaaactcaaggttagaagatttctatcactcatctaatctaaaatcccatttatctggggaatgttggcaaggatgatatatttactataatcctgatgcattaaagaatttcagatgatcatcaaaatggaaatgtcatcttcatatcccaggagggtttatattctggcttttctaaagtggagagctagagaattatcatatagcagagttcagcaattctcattcgcatcagttctttcttttctgttacttaagtttcacttgctgtttacagtgttagtgattgacctcatccttgacgcaacaatagtcttagagccatgtgccagtgattatacaggtgattgtgcaaaactagtgtagtacaaacctacagttacatatcctattgataatggagtagcactgtactattactgttactctttctataaggtaagactagccaaacaaagggtattcttagccaggagtggtagcacacacctgtagttccagctactcaggaggctgagacaggaggattgcttgagcccaggagtttgaggctgcagtgagctataattgtgccactgtactccagcctgggcaacagagtgagaccatgtttctttaaaaaaaaaaaaattaataagaagagaaaaaattttaaaggggagtattctttcttgtctttggctgaagtkgtggtgtttgtagaatgcatgatgataatagagttaattcccttttaaaaagatttttatgttatttgcttatagggtactcactttgtccagttatgctgccaaagaaatattcctctgctgttccttcaaaacattactggtaagaaaatagcttaatcagtttggttgtattgattccagagctgtaccatcagtgtggctcatgtattggacagcacacatgtagaccacttcatcagagcaggaagttctactggacatgctctttctggaggccctttaagagttagcacttttcttcatgcatgttaaatattctgaggagattatccatattttctttcccccaagtagctgggcctacaggcatgtgccaccatgcctggttaatttttgtatttttgtaagacgtagtttcacccagaccatgttgcccagactggcctcaaactcctgagctcaagcaatctgcccgccttgttctcccaaagtgctgatactacagacatgagccacgagccaccacaccttgctgattatccatattttctaagtgaagctatttctgagttatgtacctgatcagcattcacatkgccaccctttactcctgtgtgtgcacagccacacacccagaaagcagcaggagcatgatctgatcactgcagagagcatcatgcttttcctaggacccttttcctcctcaagatttcaggcacgtgctacggtcttcccttttattgtacagttaattcaacttaagtaacatcattttaaaatgtatgtgtataccctgaaccaaagtctggggatttgagttttggccccaaagaatggtatgaccaaagtgagatatgtcacctctctggactttactccagagatgaccttaacatggtggataaattgatttttaaggtctgttacggttgaagagtgaattctctgattctctggtatccttcattatatgttgcagagtgtctgagatatacagggcactcagatatgttggttagcagaaaacagcctcccccatcccaggctacctcagcttcaaaggaaggagaggctcttagtacttgttgggatcatgcaagcctctttgagaaggaagagtcaggctcttggcagtcaacagggcttgaaatagtactggtgctaaagcatcttcatcctgtgagctacttaggttcatgatatttggttagatgaatgttgagagaagttatatccaaatggcagcctaagagggtcctgcatggtaacttatgtaaaagggcagatagaaaggattctgaagcctaactataccagagttcttgtttttaataatgattcctggattgttaaccaccaggcagttaaaactctgtggtttgaagatatctacatttttgttttgttttgttttggccctgttgggttgagtttagtttttcagcattgcatttgaggttcctgtgggatattcacctggaggcatatagtgggcaggtgaataagtctcagcacaggagaggtgttttaggtagagatgcaaatgtagacatcatcagaatatggaggtaattttaaagctgtgggaatagataagaacccccctgagagaagagaagaaggttcagtgacagtcttcgagtacctctgattttttcctttttcttcaagagtaaaggaagatggggagcatgattatgcagttttcttaagattggaagaagaaggatttgagaaagcgaagtgagatgcctcactcttctttttgaaggcaggatcccctccagagaatagagggatggtgggtcgggttgggtggggtgagaacttgaagacagctgatatttgaagtaggtatggtgggaatgttacaatggagtcaaggctggggagattgaggagtttctgagcttttctgagggtccagctgagtaggatagctgcaggaagcagatggtgccaagtaaagggctgtgctgccattcctgtggtgactgcagaaggcacacgtgctctggaggaactggttgggttgaattggatgaccagatactggagtttggcaaaccagggatagtggcagtcaatgaggcaggtgagtctgcaggcccacagatggaagaaatgcctttgctggagacttgcggggtaaggagacaagcgaagcccaactcagtgttataaggcagagaaagaggaacccaagttctggaaggcagtgaagttgcagagcagcctccacagagctaggggcttgaagaaatagaaggatcctctattgaaatggaaaaatagtttttttttaaccttgctattgagtcactggcagggactgttagcatctctatgaaacattcatctttatgtcttcaaagtttcaaagcatcactttagaaagaacagtctgttttaaaaccaggtcagtgaaagctaaagccctcatagttaggctcatcacagcactttgtccttaactagccatgtcacattcttttcagcatcaagctgcttctttgacatcatctcctttttaaaatttttatttatttatttttaaatagaggtagggtctcgctttgttgcccaggctggtctcaaacacctggcctcaactgatcctcccgcttaggcttcccaaattgttggtattatgggggtgagtcactgcacccagccaagatcatctcttgaagatagattgcatcctcatattgtttgaaggtttctgtgtgcatccagatgaactgctttaagaaaatttagaaagtgattagagaaaattttattttatccttttaaagcaaactttttaacggtatgtttcacatataaacattttcttaaggcgagaggcatttagtaagatgagtttagtaaaacaagatgtccttttggtggaattgcgttccgcatattaatcccatcacccagaggctctctttctgatctttstctcaggatttatggttggtagagagtatgaagctgaaggaattgccaaggatggtgccaagatggtggccgctgtggcctgtgcccaagtgcctaagataaccctcatcattgggggctcctatggagccggaaactatgggatgtgtggcagagcrtataggtaggtgtcatgattttctctgaaacraagaaacatgcttcaagtataaaatacatggtcagtttatttcaggtgtatttgaaatatagaatgccattcccagatctcaatcaattataccgtaatttgtatcatttggaggggtgaaatgaaatttaatgccaaaggtgttatttggaagaaatctacaatgggagtcaagaaatacttgaaatggctgataatgaaaatgccacacattaagatttgtgcagtgcagctaaagtctggctctgagaaaggtatgtagccttaaaggcatatacgggaaaagaagcaagactgcaagtcagtgagctaagccttcatctgtgggaagttcaaagaacagcacgttaaacccgtgacaaatagaaaggacataatgaagagcagacatcagatagaagaatcagtatagcccaaagttgtttggtttgaaagttcaacaaacttgataatcttatgcttaaactaaaaaataaagagagacagcacatataaccactatcaggaatggaaaaaaggacatgactgtagatcatgagaggatattatgaacgcttttatacccagaattacatggagaacttagaagtcccatctgtgctcaggaccctcctctggagtctagtctggggtgtgttccaggcatttgtatatttgtgaaagctctacagatgattgtaatgtgcagccagaatcaggaaccactaatttaaaaggcaaacatgggcctctgaaaatctatgttgtatattgacttaatttgtttattcttccttttcttcccccagcccaagatttctctacatttggccaaatgctcgtatctcagtgatgggaggagagcaggsagccaatgtgttggccacgataacaaaggaccaaagagcccgggaaggaaagcaggtcggtgtcgttttctcttgtttctctctggttttgcctctcaccataaacaccctggagccaaggagcagcgtgcctggaagcccttggtgttcatggctgsggacctggcrcacactgcctggccatatttagactgtgctgccctggaagttgttccagcaaatcacatgatttctgtcctttatctttttaaagccatttcatttggggtactttctttgtggccatttaaaattgtttcagaatttccaagaaaacacttttttattttatttttatttatttttaaaatttttgagacagagtcttgctctgtcacccaggctggagtggagtgccgcaatctcggttcactgcagcctccacctcctgggttcaagcaattctcatgcctcagcttcctgagaagctgggattacaggtgtgtgccaccacgccaggctaatttttgtatttttatttatttatttatttatttttgagacagagtctcgctttgtcgcccaggctggtgtgcagtggcacgatctcggctcactgcaagctccgcctcccaggttcacgccattcttctgcctcagcctcccgagtagctgggactacaggtgcccattaccatgcccggctaatttttttgtatttttagtagagatggggtttcactgtgttagccaggatggtctcgatctcctgcccttgtgatccactcgccttggcctcccaaagtgctgggattataggcttgagccaccgcgcccggcctaatttttgtatttttagtagagacagggtttcactatgttggccaggctgctctcaaactcctgacctcaagtgatctgcccacctcccaaagtgccgggattacaggtgtgtgccaccatgcccagccaagaaaacactttagaaactgacagtaagtatctgaggcataaagatgtttgattcttagtcatttgtacttagtgagatttaaataagtctgatgtactactttgattttatgaccaaaagcagcagaattttgttctttctattttacttttagattgttgttaaggataccctgagtgggagggctccgtcatctattgagaattgaataacattatcctgtgtataaatgaagaaaaatggaaagggcagtggaaacttgatgaaaggcagatcagcaagcggctgcttttaaaatgaattcttttgtttgtgtctctgttggagattgtttgaaattttgcattaatttttattagttacaacttttaactcctgygtaagcaccaagtaygaagatgatggttgtgtgttcctgaagttgcttaggtacactgttgtctcattatgggaagggatggaatggagggagccctgtctgctctgtgcaggaatcatcaggtcttccacctagattgtggagtgaggtactgcctccctgaatgcatccatccatgcctcacatccctagttgtcttttccaagcactcggaactctggagacttacattgaggtttcagattcactttagtacctactagtatcaaaggaaacagatagctttgcttttgtgcgagtggttggggtgtgggtgtgtgggtgggggaggtgagatatgaaattctacctgatacttcaaagacatgtctgaaactctatgaagcctagcatggtgatctcttattaagtagttgttctttgattacttcaatatacagatacttgaattcattcatttttatacaggaaaggaaagcacagtgtgttaatggttctccctcagaattcgtgacctagaaaatgatattaaggtattagcatatttacgtaaaagaaggtagagtttatttgaaataagtctttgtttctgctgtcgagttgctttttgagttgaaagtatttttcagggtttcaaattaagttctgaagatttttacatctgaattaattatcacttgatccttgtaatactgatgggaaggctgtgaaattcttaattaggggaaaatatctctcagttctctgggaacttgactgaaaaggttattcaagatttggttggtattttacccctttaagcttaaacatttaagcttaagttttaaattttggctattttaaatgagaatctcatacttttccacattcttaactggaggttgctaagtgtaatgcagcccttttgttgggttgtataattcacatctattattgtaccttgctgtgatacacagtaccctgggctttcaccttatgtgaaatagcctcaggatattgtctctgttaggagagatgggatggggcactaacttgatactcatgtcttagcgtgtatgttaatgatcacttgtaatttatacatcactatgcacatgtkagatgtaacattattattcatgacatctgttgtttcttttgaattgagatgatctaaacagggccagttgttcactgaagctgacttactcatggcctcttttcctttagttctccagtgctgatgaagcggctttaaaagagcccatcattaagaagtttgaagaggaaggaaacccttactattccagcgcaaggtgggggccagaacatcactaactctctgatgggtgsagatggcagtcagaggaacagctttacagagctctrtgtagttgagatggtccagcattcataggaactggaaaataacatttggacacacttaattttgtactgttgtttctttacaatctgaatggctactgctgaaatgccacccctcctcccagcatccctgcactgtggactcaccaccagtggtctgattctcrcttcccttgtcttccccctagttgaggtgtctggggcctggaggggtcctgcagcccaaggtgggccatgttaggagccgagaataagttataagcttggctgtgttacttcagaagttctaatttttgcttaaaaacccctctccttgatcattttgtttttaccccattttaaacatgagattggttgaacacttactggcatttgttgacaagtatgcttgtaygtttgaaaggtgattagtcactgccagggtctgtgtgtcggcgccaaataattacctcacagaccattgccgctgttggctcggtttttttcttacaccacttaatgaggtaataaattatcatgcctgtcccagctgaagacctgctggtgcctgctttcacatctttcttcaacaactttagtgttctgcattccgaagactaatctaagcttcatgtcttcctttcatcccttgggcagatggaaaaaagaaagtaactctttctgcatcttgtaaaattagcttatgttgtaatttatgctggcgaaggcaaactggagaggagaggggagagaaaagaaaatcaggccaggcacagtggctcacacttataatcccagcattttgagaggccagggcgggcagattgcttgagcccaggagttcgaaactagcggggcaacatggtgagacccagtctctacaaaaaatatacaaaaattagccaggcgtgatggtgtgcacctgtagtcccagctactcagaaggctgaggcaagcagatcagttgaacctgggaggtcaaggctgcagtgagccgagatcatgccactgtgctccaacctgggtgacagaacaaggccctatctcaaaaaaaaaaaaaaaagcaaaagttagagtccattacaatcatttgaatggttccttggtggatacaaagacaaaacatactgattttcaagaacataattagtttgaggagataaataataccatttgggtgtgtgtatgtgtttttgtttttgttttctttaaagacagagtctcactctgttgcccagtttggagtgcagtgacgtgatctcagctcactgcaatctctgcctcccggactcaagcaatcctcttgcgtcggcctccaaagctgggactacagacatgtgccaccacacctggctaatttttttgtattttttgtagagatggggtttcaccatgttggccaggctggtcttgaatgcctgagctcaagtgatcctgcctcggcctcccaaagtgcttggattacaggcgtgagccacctgtaatygtggctggccaatatttgggaatttttaaaggttttttgctgaatatatatttttacaaacaaatttacaggtatattttattgtggtggtttgattcatttaattaagaacaaaatattttatagtctttgagagctaaacatgttcctgattttatcatcgtgtaaacagacatatagtagccagtaaatggaaagaagcaatagaaagccgtataagaggtttgagatgaaatataaaatatatattgttaagcttttctatagttttttttttccacataagattttgactgaaatacacagggacagctgaaatattaaagtttgaaaaattgtgtattttgtgtgagctgttagcttgtttttcagccctggctaagataaatcatctcttgagaaagattgcatcttttattattttcatactaacattattattattttttaatggattacattcaaggcagaagagtaaatggcccagagagacttatctttggaaataaatgttaacagacagtaaagttttctgtggatctgtagattttttttttttttttttgagacagagtttcttgttgcccaggctggagtgcaatggcatgatctcggctcaccgcaacttccgcctcctgggttcaagggattctcctgcctcagcctcccgagtagctgggattacaggcgtgtgccaccacgcctggctaattttgtatttttaatagagatggggtttctccatgttggtcaggcttgtctcgaactcccaacctcaggtgatccacccgcctcggcttcccaaagtactgggattacaggcatgagccactgcacctggccagatctgtagatgtttaacccttctgttgaaacagctggtggcatggagacagcagctttctttcaaagctgaaaggatttccaagccagtttatggtaccttccttgggtttagtaaatctcagcttcacagtaaaattccctggcctgcttaggtttgaacatggctagatctgtcttttcagagacagagcttgttattatcagttactgaaacctacaatgttttccttaatcctaataggttacatatgtagcgtgccaatttgcttstgctcagttgtttttataatcaaacttttatccggcatttcattagtgcctcttacctggggcagtctttttaatgaacattattaagcagccccttcatcaccatgcttgctgtgctgcaggcttcagagggagtgtaatcaattcacctggttgcagatgacaagagtggctttctttttattgggtgttgatactttagggtccctattatgaatgttttatgagcaaaggtttgattcatgtctgtcaatgtaagaatggtttaatagttgatgccaggttcagataccgaagggagtttatataaaaaaagcaaactgccacctactaataacctttaaaaagtaatatttctcagtcatttttcgttatacatttgaggttgtcaatgagaaggaaactaaaatttctacttaaaagtttcttctgcaagcagtttaaagttattgtttttcctattgtagcaaaaaataaagacctacatttgaaggtatctattttattaataaaatgtactgaagctggccgggtgtggtggctcacgcctgtaatcgcagcactttgggaggctgaggtgggcggatcacctgaggtcaggagttcaaaactggcctggccaacatggcgaaaccccgtctcttctacaaatacaaaaattagccaagtgtggtagcgcactcctgtaataccagcttctagggaggctgaggcaggagaattgcttgaacccagagggcggagattgcagtgaactgagatcgtgccactgcactgcactccagcctgggtgacagagcgagactccatctcaaaaataataataataataaataagataaaatgtactgaagcctattcaataattttcatagtttcttaagagtttggatgggggttggggaatatacattttccagtaaagtttgaggttattacctgggtatatgtggttctgcatattaatgacagaatacaccaacttggcttatatatttgtgtgggaagaaaaggaataggaaaatttttcctgaaataagtaaacgtattgtcaaattaggggttactttgagatctcttataaaagtagttccttaagccttaagcctgacatgacattctgtggtggcctgggatgaaggtcatatcatttttttccacgttttccccctctgtcttgaacgtagtttctgttgtgagattatggtacatggatgctaatcagtagatccatatattacctgaaggaaaacttccttggcatttctgcacrtggagagtgtataaatggtagtttggtggtaaattcataactctttttttgttcttttgtcagggtatgggatgatgggatcattgatccagcagacaccagactggtcttgggtctcagttttagtgcagccctcaacgcaccaatagagaagactgacttcggtatcttcaggatgtaactggaataaaggatgttttctgttggacatgtactgaaaattaacacatgtagtagccttaaaattttagacttctcgaacatgaggctgttacagtaatttttttaacactgtgcattgtacttttctaccttaaaaaaatcagtgaggatatttatttaatgaacatcaattccttttaaattttcttagagaaatttctctgtggctcagttttaccacccataaagcggagacagtaatttayggttatcctttctgacccacaaagtatgaaaagttctgtaatctgtaaactcagttctgtaatctgtattattgagatgattaatataaagttgtattttcactgaaatgattgttttgctggttatgcttggtgatattttagcgggcttatttttgaaaggcatctgttacttcagtggcataaagtgccctcacactgctgtgcagccatcaccaccattcatctccagaatttgttctcagtcccaaactgaaactataccattcaaacaacagcgctccccatttccccctcccccgagcccatgacatctccttattattattttttttttgagacagggtgtttctctgttgcccaggctggagtgcggtggtgtgatctcggctcactgcagcttccacctcccgggttcaagcgattcttgtgcctcagcctcccaagcagctgggactataggcacgcaccaccacacccagctaagttctgtatttttagcagagacgggatttcactaggttgcccaggctggtctcaaactactgacctcaagtgatccacccgcctcggcctcccaaagtgctgggattacaggtgtgagccaccgcgcctgaccacatctccttattcttaaatgtatgtgtttctcatggtttgatttattcttgctgggccatttcagcccctgtcatggcttcactcgccatctaaatgcagatgattactgccttgacggttcttaacccagctctcccctgagctgcaggcctgcatatccagtaggtctactggacatctgtactggttgttgtggaggaacctctggcttgctcattaagtcctactgattttcactatcccctgaatttccccacttatttttgtctttcactatcgcaggccttagaagaggtctacctgcctccagtcttacctagtccagtctaycccctggagttagaatggccatcctgaagtgaaaagtaatgtcacattactcccttcagtgatttcttgtagaagtgccaatccctgaatgccaccaagatcttaatcttcacatctttaatcttatctctttgactcctctttacaccggagaacggctccagctgttctagctctctttcagttctttgaaccttcccaccttagggtctataaggttccctctgcccaaattgttctactctcccttcttcttcaacacatccttcagtttaagcacttgcttctctcagtttaaactccacttccttagggatgtctctgtgacctccctgtgctggattagcttccctactctatgctcttgtaaaacactatctacttcctttgtcataaactcatcattttcctataaacattaatattgtcctcctgctagaatgtaagctccgtgagagcaaggatcctcctgtttaccctgtacctccaatgtctggcacttgtaggtgctcaaatattcgttgaatgaatgaaaaatccatattgtaattgatgtcctctggccacatagttttaaaattaggtgattgattatatgaccgaatagaactatcaaatgttttcctaataaagtcaatatttcaaacatttgtgtgtgatatttagtattttaaacatttgtgtgtgatgttcaatgtgtaccaggaagtcaatttagtttttgtggggagaatatagatagatgatcaaattcagtggtaggttacattttcagaagcaatacattaagtatattaaaatagtaatattaaaattttaatgaaaatgcacatctatgtcaaaatgattttctatataaagactaggtaatattcctttggtaggaaccattaacaagtcaaggattcatggatattttaggactgcttttgcttttctgggaagaaactgtccatcaataaaaccacatttaagtgaattggattttttaaaacttatttttctagaggcagggtcttgctatgttgcccaggctggactcgaactcctaggctcaagcaatcctcctgcttcagcctcccaagtagctgggactacaagcttgcaccactacgccttgctctattttgtatattttacccaacaataaacatttataattgtcttaccaaaataggtaatactttttaaacattttgactatcataaatatgaattccagcaaggataatatgagctacttggaatttgaagaaatatacaagttagtctctaaatttgcccctgttggtacttaaagaatgaaaaagacaagattacttctatttttcagtttataagaaaagtattttcaaatcgaatttgttaaaaaaaaaaaaacacttctgcaccagcagaaggcactattgagtgtttgagtgacaccatcatttgccaacatgcttatgtgtatgtctctccagagagaggccatatgtttccttcacagggataaatcaaagcaggttttggaatgatacattaataagattatttttgagaggccacattagttctaaaatgcattgagtttggttttatggaagattaaatctccactaagagtcttggcgattttttttttcttagtgatcttctaatgattggttctgaagtttcatatatggaaaaatggcaagaagatgaactaggttatcatagcctagtgtcattcataacatttcccttaaaatgttacaattaagtacaattaatatttaatgatgacatagattttaatcattttcgacaaaacgttttgtgcctttccactaaacgcttaaaaatagtttgtttcagcggggcaccctggcttaacacctgtaatcccagcactttaggagggtgaggcaggaggattgcttgagcccagtggttggagaacagcctgggcaacatagcaagaccctgtctctacttaataaataaataaataggtaaataaataaatagtgcttttattttatgtgcttcaaattctcttgtatctggaatcaggatcctgaggactaagtttttcttagggatgaatgaaatttctatgccccttttacctttctaggcaaatgtacattccatcaagttgactgtgtaacttaccatccacattggggcttttgagagtgagaaaaagggggtcttaataataactacactgggaaacaggtctgaactgggaccgactcagtttgaactgggatgtgtgctcgctgcctgtaacatcatcatgactgaatactttgtttgcatatcagcttttgaaaattcttagaagccttcgctcaagatacctgcttcatgactttcaatatagatttcagtatgataccagtcacataatatgtgtgcattagcattctagggagtcatttaattgaccctagaggagagtttaccatagggcagggatgattttgtttcccagctgttagttttctgagatcagtggttcaatatgtctggcagctttgtctttcacaaaccaagtcacatgtttgtgctactttttagggtaagcaagagaagtatttttcagggagaataaggtcttagaaggtgatgatttcacagagaagttatcgcaaggaaaatatacccagaaccagatgttagaagtaagctggagtagaaaaaaaaattttttttttttgagtcagggtctcgctccagtgcccaggctggagtgcagtggcgtgatcttggctcactacagcctctaccccttgggctcaagtgatcctctcacctcagcctcctgagtagctgggactcgggcacatgccatcacgtccggctaatttttgtattttgtaatttttgtgttagcagagatgtgttttcgccgtgttgcccaggctggcttcaaactcctggactcaagtgacccgtctgccttggcctccaaaagtgctggaattataggcatgaaccattgtgctcaaccaagaaaaacaatttttttaagtgtaattcagtaagtgttgattgtaagaagtgaactcagaagaaaaacaggtagaattttagaatactcagactaattttaaacgttcctgtagaaaatgtattcaacatttttcagccacagcactgttaatgacattcctttatctaccggataattagaaataatttttgtcttaaagttatttgtaatctaaaaatctaacaatgttacttgcggaaaatttaggaagacaaagtgaagaaaataaagtgaaaaaaaagcttcataatctcactacctagagataactgctattaatatttttcgtgtactagtctttttctatctttacgaatttttttttttttgcaaaaatgctgtgtgctacatgttattctgtaatctgcatttcacttaatgtattgtaaatataatgacctgtttacatgaaatttaatattctgcaaatttttttcttttttgagatggaatctcactctgttacccaggctggagtgcagtggcatgatctcggctcactgcaacctccgcctccggggttcaagtgattctcctgcctcagcttcctgagtagctaggactacaggcgcgcgtcacgacacccagctaatttttgtatttttagtagagacggggtttcaccatgttggccaggctggtctcgaactcctgacctcaggtgatccacccactttggcctcccaaagtgctggaattacaggtgtgagtcaccgcacccagcctaatattctgcaataactctgatgttgcacgataatgcagtgcatgaatcctccctttgatttaactactcccctattgttgtacctgtaggttttttctggtttcccacattacagataatgctgcagtgaacatctgtttagtttctttacatatctgtgattattaggatacatttttagcaatagtgttgttggataaaagtgtacaggttaaagtatacacagacctttaagacttgttggtaagttttgctctataagtgtatattatggtatttattgctggatgtaatggttaccgtggtgtttttagatacagaaatagcttcccatagaattaaattgtttagcagaaaccaatgttttctttcattgttaaaagttgtgtctaggctggggcatggtggttcatgcctgtaatcccagcacattgggaggccaaggcaggcagatcgcgcgagcccaggagtttgagaccaacctgggcaacatggtgaaaccctgtctctacaaaaaaataaaaataaaaaattagctaggcatgctagtgtgtgcctgtagtcccagctactcagaaggctgaggtgggaggatcacttgagcccgggaggccaaggctgcagtgaactgtgatcgtgccactgcaccccagcctgggcaacagagcgagaccctgtctcaaaaaaaaaaaaaagctgtgtctaagtgaccatgtcacattagcaacgagttgtgaagactgagcattaatgcatgggaggtcacggtcgtggagagaacactgggcggggtgtggaccggtttcgctctagttcagctactaacgcgctgtatgaacctgaggaggatgggaggggattaaaatcagcctttctggcccagtgattgttttccttccctccttctacatgcctaagtcttttctccacctctccagattccctctttctctgctagtggatggctagggaaggtgggccgaggggtgaggactggagggaagggtagatagggtatgctgagagccttttttattccacaggaaagcatgtacctcagggctcggtgggactcatggtggcaatcatttaccaggaagacccattctccagttggtcacagcttgttttgttcaaatgagcatacatttaccgagggctcactatgtgtcgggcttcgggatggtacacaaagataagaagacgtggctcctggcctggtgcagtatctggtcagtgacttgagggttatcttcagcctcttggtacccctctgtcttcttttggtaactgtactttcattctctttgggaactacccctctcctgttctgcacagtcttggccagtgtggcaagcaaagagccctggacaccaagggctggacacatgttgaggcttggccaggtggactctctcaagtgctttgactcattagcagagagacaaagatggaagacgaatgacactgagttcaagtagacctgaagaagctgttcgttcactcacctctgctccagggtccctggcacaaccctgattactgagaatctgtgagtcagaggcatctgtatccttccaacaatcttatttattgatttatttaggagagtcatgtttcaatgcttgtagcaaccaaccctacctggcaacatgttcttctgcaagccagaggttacagtaagtcactctatgttttcaaacttggtgaaagaacgatggtatagacagaagagtaaactgagaattttggtcctcaaatacacagaacattcaaaggaggagggttgtggcttctcaccaccatccccagtgaggatggattgaatgtttattttttaaatgtaaattagttaatgattgattgagacaggggcttgctctgtcatccaggctggaatgcagtgacatgatcatagctcactgcagccttaaactcctgggctccagggatcctgccatccagcctcctgagtagcttacaggcatgcgccgccatgtggggcttctggatcaagggtttaaatcgtcacaagggcaactcaatttattgcaatgttttgatcactgaaatatgtcactgagcaagatgttaggttacttttaattggaaatctggctaaaaatctgaaagtctaccactggggatagtttaaagacaatcataccaggagacagaaggtagtgacttcttgggtagtcttaagtggcttttgtatagccttaaggccacagtgatggtcttatgaatgataaacgaattgttgcccaggctggtcttgaactcctgaggtcaagtgatccgccaacctcagcctcccacagtgctagaagcgactgcgtccagcccagaatgtgcattgctaacaagttttcacctgacactgatgctgctggtctggggatcatgctctgagaaccaccactctcaatgatctctaaatcccttcctagctccaaaatgttaggatcctaagataaatttctgctttggtgatattatcattcttgcatatttgctaggtaattgtacrtttctctcccccattttcagggaagggtgagtttgtattaacttctcggtaagtaggtgttcttttagatcagtgattcacagcccagactgcacattagaatcacttgagaaactttgagtaagaaaaatcctgaccaggtgcagtgactcacgcctataatcccagcactttgggaggccggattggggggcgcggatcatgaggtcaggagattgagaccatcctggccaacatggtgaaaccccgtttctactaaaaatatgaaaatcagctgggtgtggtggcgcatgcctgtaatcccagctacttgggaggctgaggcatgagaatcgcttgaacccaggaggcggaggttgcagtg

SEQ ID NO: 95710 - DNA, 17377 bp, Homo sapiens
tttttatttccttattgtgggaaaaaatacatgaacaaacaaaatcacaaaacttctggggagagagtttttgaggatatgaattttctctgctgggtacattcagccctgagctcactgccttacgacagcacaggccatgtagcgaagcgggaatgattaggttgaagtctgggcagggtgatcggtgtgttagggacctgcctgcaccctgagtgggctttggataccatcctcccactacttgttcccacatcttcaaaataaaagactgaacgatataatcttttttaaaaattgagatgaaattcacacaacaaaaaattaaccattttcaggtgcaaatttagtggcatttactacattgacaatgttgtgtaatgcccctctgtctagatccaaaacatttctcccagaggagatcccccaacccattgagctggagtgacgtcatcttttaaggacctttttaattatatgattctatggcgtcagaataggcacttgactcattcagctctgtaaagacaccctccagactgcaaagacattgagataatcccacaaacatgaaacttctaaatatttgtccctaacaaacacaattgaggtggggtggatgacctgaatcgccctggtggatgactttgtggctgatcgttacagggctgactggtgttttcctgctgtcagaagcttcatgatggggccagtcgggtgcccagtgagtagtatccctggcaacagagacccaggcagatttgcgtaaatacctttcgtcccaggacatgggatttacactgtgtgtttctcgtcaccttcaggaaaaccactgtccctttttttctttgccagataagagtcaggctttcctacaaattcagattcctgaaccaaggggcatttttgtggtcatcccttcggtgttcccgtcactgccgttggtggctggggtgaagtgaggaggttgtggctgtgtgtgtgagagccttagcttgggaaaatggtgtctttgccgtctctggttctcaactcttcagcacaacttggttgtgctgtgtggattttcaacatgttccagctgtgaaattccttataccacaaacatccaatatggaagccggaaatgtacaacaggtcaaatcagagatgccatgggtgaggagggcttagagcccgtctcctacagcctttctctctcctctgtgaggggtgagtggaatccccctaaatcccttagagcccagttgggaaaacacggaccttgactttacatgacctccaagcactgctgttgagagtgtgtgtttgttttttttttttgagatggagtctcactctgtcacccaggctggaatgcagtggtgagatctcggctcaccacaacctctgcctcccgggttccagtgattctcctgcctcagcctcctgagtagctgggattacaggcatgcgccaccatgccaggctaattgtttgtatttttagtagagatggggtttctccgtgttggtcaggctggtctcaaactcctgacctcaggtgatccgcctgcctcagcctcccaaagtcctgggattacagacgtgagcctccgcaccyggcccagaatttctgttcttttattggcctccaggtaaccaagaaacaccaacatgtgttgcaatcagactgtcctctgaatcctccactgtgagaccccgccaaagtcatggctttgttttctgttgttcatctggaatgcagccattccccacacccacctccccggtcacacctgctgcatcttggctgtccctgcgcgtgttttctgctgtctttgtcactgctccatcctgcatggcattctacaggctcgtcaaagtccagttcacccactcttccagaacccttcatggtaggctgctgggagaaattgggctacagtccatcacaggtgcaaaatgacacctgagaggtggccctgtcactgaccacttcttccccaacacatgctcagtagactaagtgtggtggacaggcgcaccctggcctgggggacccagaggacttgtgtttggaactccccttgcttccttgggtctgccatgactgtctggccccctcctgcaggggccttgtatgagcagttcgaggaacgttctcactaactgcaaagcactgtaccaatgtcttgattacattttagatagcagacagtggccctggctctcccactggaactgtctatgtggcacttggccatgtacaacttctttaattggaccatcatgtaggtctgatgataaaccaaatactctaacatcagggtgggggtctccccaactccatcttaagtctttgaggaaattgtttcttaggcaagatagctccataacttgtgggaccacgtgcaaaatacacagggccccttgttcaaaaaggacaaaaaaaaaaaacctgtgttcctttctcccatggtctctctatctgttgtggcatgttttgcatttgctgtttgatgttgcgctcccttgggcaggggatgctcatgggaacgagtgcagaccctcatgggcgcacaactctgacctgacttccctgcccttgtgctcagaccctagtcggggtggagggcagcagtggtcacctagcaggaagagacaggggagcgggcagctgaggctccatccttagaagcagaaaggctgagggaggcagaactgtacaagagccacgccgcgtgccccatcatcccttcaaatgtagaagtgacacaaacttagaagatcactatgaatttcaagacagtgaccccagagcatgaaactccaagagaagagcccccttccaagagtgaggcatgctcttgagactatgaagtggaccctaggatcagtatgaagtaggtgctcagcaagtgcttgatgactatgtgctgggagtatagacaggaaaaggactctcagtttgaggacacatctagagaactggcaatagtagctgctcattcactgttgaaggaatgaatatgattcctttctcgaccctcgtctatacccagctgggttgagaccctcagtttcctcatctataaaatgggaaagataacaaaggtacctacatcggagaaaatcatggaatgcatcccatttctggcatgcagagaaagcccagtattatgaagattattatgcccggtgctagagacatagcaagcatttaataaacgtttgagctgaggcttcctagagaatatgagattgcagcaaattggatgcaaaacttctctttacctttttaaatccgtctaattatctcgtatcaggatatagctggtgtggtcacaaagcagggaaaaagcaatcgatatccctgagtaactgcaaaacatggagtggccccaggaaggtgcagggaggaagtcccttttagtttgaaactattttagtgtccgatctttctttctccttctttccccaattttgtatctgggctcaactttttatacatttttcaaaagaagagcagccttggacctaagaaaatctgagcctaaggagctccccaaaagctaggaggtctctatggcatccgtcccagaaacaactaackcaactcacaggcagcgtgagccacctccatgccccacccactgagcacacactgcaaagtccactcggcgggttaactgggggtcctcagggatcccaccagcagggtggctgtttggctgcttcttcgggtccctgttgaaaccaacagacagtagttagttttgaggcttacttacaaataagctgacagtcagatgaggaagacccatgcttccggccagccccttgaaattgttgtcaatgagtccccactggggcagggagtctctaaggacaggaaaaatgggggcccgagggcatcatctgccaagacctaaggcaactgtacccatacttttgcctgtgtgtcctcaaaacccctctactttatcatgattcttcttccagagaactctgtcctttgaggcaagtctgtaaaccaatgtttgctttttaacattttgacaagggacagttgcgggggaatcattaccgtccttccacgctgtaaatgcaggtaatgaaaggatcggatgaaggtcgttggtgactcactgctctgacgttttacttgaactagctgtttctctcccagaagactcagaacataagcacctggaatggatgggtcgcatttaggactccaaatgagttctgctttccctttttgttttcaatctatgtgctctttcaggtactcaaacctgttaccgttttatcagcaaaatgggactttctaccaatttggtgggatgagtctcgccgggagtgatgtgtgtgtcacggaattgtggtcatgcatcgggatggctaattcactgatgtcagatgctaacgaagtggcctcggctactgagcatcacgtcactgttgggtttagacacaacacgatcttatgtatggatgacagcaccactaataacaaatgccagtgacctaaacggggaataacttcaaatgaaacaaaaagcacctcatatcatatttatcctgaaagacacaactggctgaataaaatctgaatacaggaaacatagcaatgggttgataattttggtggaacttgatgatgtgtgacccacgcccaacacagtgtgacccaagcccccaggagggttctctaagtgagtttggtcggaggctgccattcacagtgacttgtatttgccacagcagctctttctaagcccagtcctgggattatctcagggatcatcccacaccccagcggggagatgggccaagtccccacctgacctcatcttaggtagagaggcttccatggaagtgtgggctggctgtggggggttgagacctagccccgttcttttgacatttcaccctgtgttctccaaactccagcaagcagcttccatagctcattaaatttgactgaaggtctgatggcttgcaaagcaaattctttacaactgttataaaggtttcattgcttaagcatataatctagcaaaactgccaagccccctccactycctaaactctaagacttgccagggaagagaacagtggccagtggactgcaggagtaactgcactcagcccagaactccctggaggacacagggaaggttctggaaaggtggcggtacctcacagggagagacgtggtgctccagggcccaacttgctcatgttcagatcctcactctgcaacccaccagccggctgtgagtggctacacaatctctgcctcagtttccctatctgtacatgggttgttcatagcctccacctcagagggtagtaatgatgccaagctcttagaacagtgctcagcatgtgtgcatcctgtgcctactctatgccaagcactacagagagaaaaatgaacaaaatagggagaaatccctgccctcatggagtttacatcggggcagggggcgggggcggcacagagcagacaatcaatacagtgattagcccccagttaggttaggcatttccaatctttgccaataagccacatatttgcccaagttagggtgcatccttcccatgaactttgactgtgacctttgactatggggtgacatcttatagctgtggtgttttgccaaccagcagctcttggtacacaaaatgtgctgctagcaggtgccccggccaaccttgtccttgacccacctgcctgttaagaaaagggtgttgtgttttgcaacagcagtaaaatgggtcaaggtttagtcagttggaagttgtgtcaaaastcactatggttggttgagggctcgaagtctcccagcattcattaacaactatctgttcaatgattatctccctggggcgtgttgcagtgagttggcccaaagcataactgaccctggccgtgatccagagacctgccccctgacgtcagtggcgagcctccctgggtgcagctgaggggcagggctattcttttccacagtatttaaagctgggaggttctgccaccaagcacggccttcccactgggaacacaaacttgctggcgggaagagcccggaaagaaacctgtggatctcccttcgagatcatccaaagagaagaaaggtaagtagagctttgcatttacattttgaaaaattacaaagatgaactcatttttttcctgagagcaataactatttggcaatgcacagccctggcaaaaggccgtcgaatgtgtttgaaggtgtctgttgttgtttttgttcaggacrcttgcgttttctatttcaggtgacctcacattcgtgccccttagcagcactctgcagaaatgcctcctcarctgcaaaacggcctgaacctctcggccaaagttgtccagggaagcctggacagcctrccccaggcagtgagggagtttctcgagaataacgctgagctgtgtcagcctgatcacatccacatctgtgacggctctgaggaggagaatgggcggcttctgggccagatggaggaagagggcatcctcaggcggctgaagaagtatgacaactggtaagctcggcccccgctgcctgtcccagcaccctgcaggcagggctcccctgcgtctcctgggagttggtggagaaaggtgaatgaaggccttcgggtagtttcagactcttgagaagatgaatgcaatggtcagaaccatacagacttgaattttgtgacattagtgggccagcccaagctttaaatgaggtgtgtgcacaaaagctctgccaactagattcctgattaaaaaaaaggcagcccctctcctacagaccagstcctagtggagtaaatgtccacctggccatgtcttagayggtctgtgtgttcacactgatggactgttgttagcgtgctcagcactctgctaggcatggaaagccayggtactgaaggagatggttcgctgcccgtggtgcttggctgaaaggaagcctgtgatttttgcagctggttggctctcactgaccccagggatgtggccaggatcgaaagcaagacggttatygtcacccaagagcaaagagacacagtgcccatccccaaaacaggcctcagccagctcggtcgctggatgtcagaggaggattttgagaaagcgttcaatgccaggttcccagggtgcatgaaaggtgagcggaacattgatttgattgggtaaaacagcagagagccttttcttatttacatctatcctaatggtaattcaaacaataatggaagctcccaccacctcagatgtctttcagttccatacatgaagttggcaatgtattgaaaatgcacatccctcttctgcttttacagactgtcttatacaaacgtgaaaactagttccatgcatatgggtttyaaatagcttggtgggacccaattgcacatttatgaaaactctttaatttcagcaggctgttcactttccagtggcctcttctaacccagggggctggtgaccagcagggtgtggtggtgttagtggaacaccgtgaaaatgggtctacctgggaaaamaatgctggtcgtgttcgaagtccaaggtcatttctcaccagtgcccacccatcgcaccctgtaggtcgcaccatgtacgtcatcccattcagcatggggccgctgggctcrcctctgtcraagatcggcatcgagctgacggattcrccctacgtggtggccagcatgcggatcatgacgcggatgggcacgcccgtcctggaagcastgggcgatggggagtttgtcaaatgcctccattctgtggggtgccctctgcctttacaaagtaagtgtattatttcagaatcaaaagtcaaaataaaaaagaaagctgaacgcaaaccccagtgagtgcctcggggacccccaascagggccctggcgcactgacttgggaggggtccttgttcacagagcctttggtcaacaactggccctgcaacccggagctgacgctcatcgcccacctgcctgaccgcagagagatcatctcctttggcagtgggtayggcgggaactcgctgctcgggaagaagtgctttgctctcaggatggccagccggctggccaaggaggaagggtggctggcagagcacatgctggtgagcctgcaggaagccctgatgtgcagatgagaggcctggggggtggcagaaacaaacagcattacagttcccacccgtcagcacacctctctgagcgtgcaggttcccggacagatcgggaaaccccaccagtaatgattagtttacacatatacatcgcttttgaaggcccccaaacaccaggggaccatagagatcctttggacttcatgattctgggagtgtttgtttgcactgatacctgaagaaatagatcttgagggcctacattccaacctctgggctgaagtaccaacctcggggagaaggaaacaaagatcacaataaagaatcttgtccccaacagrttctgggtataaccaaccctgagggtragaagaagtacctggcrgccgcatttcccagcgcctgcgggaagacyaacctggccatgatgaaccccagcctccccgggtggaaggttgagtgcgtcggggatgacattgcctggatgaagtttgacgcacaaggtgactcttttagacccaactcttggtaacgattggactcaagcgaatcgttggccttcgaaacatgtcacattctcctcagtccagtgtttggatttttaaactctgttagtccagagttggccaagccttagaaatatggatcctgtaagaattcttcaacttaatattcaatctggattgaaactgggccatatgttgctgtttgtttacatacatacatttgtttaaatggtattggtggaaaattgtggaggaagcaagagtcgtaaacgtatcaaagttgcatatgatgcttggatgaaaagagataaatgcatattctagggagggaaaaaagatttgagaagttggcatagaaattagtccggcaatatataagagtatatgttctgctttgcctggcactcactactgcttctctggtttaaaactctccaggtcatttaagggccatcaacccagaaaatggctttttcggtgtcgctcctgggacttcagtgaagaccaaccccaatgccatcaagaccatccagaagaacacaatctttaccaatgtggccgagaccagcgacgggggcrtttactgggaaggcattgatgagccgctagcttcaggygtcaccatcacgtcctggaagaataaggagtggagctcagaggatggtgtgtccctgccagaggccttggtgtgccgggctgcagggactgcctgtttgagccaggcactcacgagcctttctctgtcttataggggaaccttgtgcccaccccaactcgaggttctgcacccctgccagccagtgccccatcattgatgctgcctgggagtctccggaaggtgttcccattgaaggcattatctttggaggccgtagacctgctggtgaggctctccttcatttaggctgggaacatgggtgtgctgggtaccgaagggcatctgtgaaatctctccttttccatgaccttgtcagagggtgcccaggggcttcctttcttgagcttccttcccaaagatccagaataattggcaagttcaaatgtagaaccaacccttctggtcacctggaacctttctgaatccytgatctattgtagcttgatcaaattttactttttactttgtggcctcagtcatgtaactttgagttagcagttttctgcaatttagcttggtgaaygcaaaactagctcgattacaaagttattgtcttgccgtgtctttccgtgttgtgaataacaccactggttgtggagtctgaatttcaaagcctctgatgaacatttctctttttttttcctgctaaaggtgtccctctagtctatgaagctctcagctggcaacatggagtctttgtgggggcggccatgagatcagaggccacagcggctgcagaacataaaggtaaatcaaagtcctgatctgaaaccacagagaagtgggattagagcactcttcgtcactcttatgtctctctccttttctgtgtctgtgtgtggggagagagagagagagaaagagagagaggagaacaaagcatgctaatgtcaacaatcaatggcgtcagtcttgcctaggagagcctcatttactaatgaactccctctctgtttaacaggcaaaatcatcatgcatgacccctttgccatgcggcccttctttggctacaacttcggcaaatacctggcccactggcttagcatggcccagcacccagcagccaaactgcccaagatcttccatgtcaactggttccggaaggacaaggaaggcaaattcctctggccaggctttggagagaactccagggtgctggagtggatgttcaaccggatcgatggaaaagccagcaccaagctcacgcccataggctacatccccaaggaggatgccctgaacctgaaaggcctggggcacatcaacatgatggagcttttcmgcatctccaaggaattctgggasaaggaggtggaagacatcgagaagtatctggwggatcaagtcaatgccgacctcccctgtgaaatcgagagagagatccttgccttgaagcaaagaataagccagatgtaatcagggcctgagtgctttacctttaaaatcattccctttcccatccataaggtgcagtaggagcaagagagggcaagtgttcccaaattgacgccaccataataatcatcaccacaccgkgagcagatctgaaaggcacactttgatttttttaaggataagaaccacagaacactgggtagtagctaatgaaattgagaagggaaatcttagcatgcctccaaaaattcacatccaatgcatastttgttcaaatttaaggttactcaggcattgatcttttcagtgttttttcactttagctatgtggattagctagaatgcacaccaaaaaaatacttgagctgtatatatatwgtgtgtgtgtgtgtgtgtgtgtgtgtgtgtgtgcatgtatgtgcacatgtgtctgtgtggtatatttgtgtatgtgtatttgtatgtactgttattgaaaatatatttaatacctttggaaaaatcttgggcaagatgacctactagttttccttgaaaaaaagttgctttgttattaatattgtgcttaaattatttttatacaccattgttccttacctttacataattgcaatatttcccccttactacttcttggaaaaaaattacaaaatgaagttttatagaaaagatggatttgctttgcttggtttttcttatttgagctaccaagaggagagaactctgattaaatatcttgtgatttaaatcctgccccctccccaagaaggtggggacgttcagaatcacacttgaagagggggtgcattgcctggtcccagggagaaggagggagcagatggggaggaatgaggcagggaaccatggttggggttttctgaatttgctgaagccactagttggcatcctttaacaattctacaaacctttagatggtgaggcttatgtggcaggactgggagggtttaatgcatgctttttgacagtttggatctggaggggtctcaggcttccacaaaaattacattgtggacagtttcataggattttgccttttaactcttcaaagcaacagttttctcaactgtcatccccgcgggggagcagaggaagacaagtgagaaggaaaaggggacaggatctgggttgagcaagcattaattgagcgccttctgtatcccggacatcatgccaacaccatgggctgcccgagaagagaggtgggtggtttggtccccagctctgccttgaaccctcacctgctctcctctactcccagtgtttattggatattccagaacagtccaaacgaaccataaactttatatcacagattcaatctgtgtaaatactattatcttcaagttgtagtttctttcttgggcccaggctgtgaaattggcttcacccctaccacaccccagcgggcaggcttgttcttatgtcacactccacccctccagtctcctcaactggaaaacttgcctcttttcctcacttcctctgctccttacaatggcttcatatggaaggtgaagctgagatcaccccaattttacaggtgaggaaactgaggtcaagctaggagcgtccagcggggctgagaaattgccaggatttccttccccattaaggagctgagagtcttagctccagacacgttggcttgttagaatatcaaaaccaccgaaggggaaaaaccacttactggaattaaatgctatctgctgtattagtttaaatcagtggcgttcaaacttgtttctccttttcactgcggaacacgttcttgacatgtacttgactcagagtcccatgtctaaaggagacagagcccaaggcagcccacctgaagctggggagggagtccaaagtgcaagccacctggtctccatttccccgccccttgggggcctttgggcagctccttggacccctgaaagaggccaccaggataaactttgttaaaatgcatgccttgtgccccactgtcctattacgggctttcagtagtctccactccctcggcaggcaaagacactggccatctccaaattccctcccctcctgcacagcatcagccacctggcaagcagtctcacataggaccatttgccagcaggccctgcaagcctgggggacagcctagaggaggtgacttacatacacagcataagagttttcaggagaccaaaaagattcaatatatgtcattaactcctgactcagtttccccaaaccatgcctcctgagtgctccctctgtctccaaatcctgatttttgtgcgcggacccctgtctacaataaacaggatcctatgacttcwttcttcaatgttctcttgtcgtgccttcagatgatgcaaagtatgtaagctaagcccacttgcaggaagctcacagaaggcaagaggctcatcacttgaaaatacggttggagtgagatggaaagcccagagtctcctgattcctggtctaccactggaccacatgactccaaaaccaacactgtgactgacgtcctctactggagtccagtgtaagagctgtcccctgacctccaggaagctgtgttgcagtctgggttaaagaccagaaaacaatagttacacagcaaatgttgaaccaggacaacaaacctgcccttattcccagtcgagtcacttagggggcactgacaggtaggcaggcggggtggctaggtggggccggggcacacttgggagtcaggagttacagggctctttctcttctctccctctccctggggacccaccctaacctggacacccccgggctgctcactcggccctctggatgccaacagcatgcaccttccagagtgcacggttttggctgtaagaccgcaggtcatgggccctgttgagctcccttgacctgcagccctgccagagggcaccgagccaggggagcagcttttgctttgtcctcacctttagcaattgcagcgatgaattcatctatgggaaagagctggccacctgcttcctccctcctgccctttttccttccctgggggcagtaaacactgacaaccttgaacacagcagagctctgccgctggccagtggggtcttcttctgtctcctctgtgccactggggtcatattacctctggtggagttcgataaggatgaaataaactagcccagcgcagtgccgaatctgcagtcaggagggtctgcgtgtgagccgaggccctacatctccctggaagtatgcccttaggtgattgcacgaaatgctgagcctcaggttcctcaactgtaaaatgggagtgatgattactttcttcagggggttgttgaaaagctccaatgagatgatgccagccagggacttggcacacagctgggcctggtgggggcggttgttctcatttttatttcactccacctctccggggtatgggaggtcgctccccaccaagccggctgtcccactgatgaccggctgtggctctggagtcgaaatctgtcctctgtgcagcctccacaactcctactttcactgtgcatttcaggaaaaggagctgaagagcgaagtcaatcaggaatatcagaagcatttttttctcttcgtatggcgagcccatccctgtagggagccaccttcacccttctcaaacattttagcagaagactcagagtttgggtccaggaattctatatttaagaaatgtgtcctaagggaaaaatcatgaaagtctgcacagatttagttgcaaggatgctcattatggagttgtttatcatggccaaaaattaggaaccaacctaaatgcccaacaataggagattacttaaaagaaattgtagtccttttgagaacagacaactaggcagccatttaaaatgactctgcaaaagataagttattgacatgcaatatttgccaccggcttcacctgtgaaggtagataatgaaagggtatcgagtatttgtacatttatgcttagaaaaaaaaactttaaaaataccatacaatggtaacagtagcagctgggtcctgggttgtttgattgggagaactgagttgcctcattcatattttcaccacatcattcaggctacagaactttgctgcaaaaaggggagcttggcagaggcagggggtgcccccaaattgagaaaaccctgaatgaactgactttaccccagtgatctaaggtaaagtttcttccacgggatgaaatgggggcttgagacagagatgaatttcagatgggttctcaagcagataaacttgtttctgctttcctgaagttttgtctggagattttctgctcctcctcacacaggaagctcagcatagcgtggacctttgagaggggttcaaaacacaggcacttgtgaaggccccgctcccgggaccactgggcagattccaggaagagtggccggcaccggatcgatgcgggactgattgttacagaactgtttccacgcaccatattctctctacaatctgggccctctcttagctccacaatagagctcagaggtttctctgatgctgcagagccgggatttagggatgccacagaggagcggcggacgtcatttggtccacagtagcaccgtagtgggaccaggaacacatttgccttgttgacacctgcttgcgtctttgcactggacacttattcctgggggtgctgggcctacacagcctgggccgcctcagagctgtttcgtctgtgagccccttggtaaagggatatgtaaatgtgaatgttcaccagtctgaatggcaaaactcctctccaggcgaggcaatttgcagcaaaatatgctgtaaatatttgttcagcctgggaaaattactctaattgcataattaaactcgttgttgatgctacttccggacagaatgcctgcagaggagggcccagcctgcagctgcccttcagagctttttcaatagagagactgtttgcagagacttttctctggcccctgtctcttcacagggagaacgaagaaaggaacttggggagaggttgtctgtgggagagaggagggtgtkgaaaggtcccagaatcagaggaccactggtgtggggcctcgcggatcctccctgaggattagggctatcttccaaatgcccaacacacattccacgctccacggacagctggtaacttgagccaacgattcattcactgaagtggaaaaatattagtagattgaaagagatttgcttaaaaagacatcagatcccaactgaatccaaaaccagcgttccttgctaaggtaaccacagaaacacaatgcgaagtgaaagaaactggccacacaagacccctgtattgcatgagtccgttgatatgaagcgtctggaatagggaagcctgtagagacagaaagtagtttaggagttgccgggggtcaggggaggaagcagtggggagggactgctgacccctgacccccgacagctgcagggtgttttgtggggggtaatgaaaatattccaaagttagattgtagtagagtttccagaatcctgtgagtatatgaaaaagcattaaattatgcatttgaaatggctagggttttgtttgtttgtttgtttgtttgtttgttttgttgttgggacggattctcactctgtcgcccaggctggagtgcagtggcgcgatctcggctcactgcaagctccgcctcccgggttcacgccattctcctgcctcagcctcccgagtagctgggactacaggcgcccgccaccacacccggctaattttttgtatttttagtagagacggggtttcaccatgttagccaggatggtctcaatctcctgacctcgtgatctgcccgtctcagcctcccaaagtgctgggattacaggcgtaagccaccgtgcccggccagaaatgggtgggttttatgatatgtaagttacagctccataaagttgtaagtaaaagaataatataaccaagacaaaatataccaaagattctgagttagaggcctgcattcaccatgttgaaaagagagctgaggaaggaagaggtgtgtgcaccccactgagactctgtcctttgaatctggaggagtaaaaaaaaaatggaaaaaggatggactttctccttatggattcaacgtcatttaatgccaggccaatgatcctcctaaaactaccacaagtaccataaaattatgtcatgtcaccagcaactggatgtgaaactgaggccacagggggcaaagacctgcaaaagttacttggctagcaggtgggagagtgggagccaccaggagcctcaacttctaggctgaccccactggcattgagtcaggagaccaagaaccccaccccagcctctcagcccatcaggaaacccacacaaactgcttagacagctgcagggagggtttggctcgtgtcactgcataggggagggtctagacacagggcaggggccctggacccagaggctccaatatggcaggaggggtcctatttccttctcccctctccctagcagcagaaatctctggaatggaagtattcactacaacgctaagcttctggtgtggcctgaagacagtcccttcatctctgagcctgtttccccagctgtacaatgagcactctgccttggtccctggaagccttccctgccatgaggttgg

SEQ ID NO: 95711 - DNA, 80355 bp, Homo sapiens
  misc_feature (1)...(80355): n = A,T,C or G
nnnnnnnnnnnnnnnnnnnnnnnnnnnnnnnnnnnnnnnnnnnnnnnnnnnnnnnnnnnnnnnnnnnnnnnnnnnnnnnnnnnnnnnnnnnnnnnnnnnnnnnnnnnnnnnnnnnnnnnnnnnnnnnnnnnnnnnnnnnnnnnnnnnnnnnnnnnnnnnnnnnnnnnnnnnnnnnnnnnnnnnnnnnnnnnnnnnnnnnnnnnnnnnnnnnnnnnnnnnnnnnnnnnnnnnnnnnnnnnnnnnnnnnnnnnnnnnnnnnnnnnnnnnnnnnnnnnnnnnnnnnnnnnnnnnnnnnnnnnnnnnnnnnnnnnnnnnnnnnnnnnnnnnnnnnnnnnnnnnnnnnnnnnnnnnnnnnnnnnnnnnnnnnnnnnnnnnnnnnnnnnnnnnnnnnnnnnnnnnnnnnnnnnnnnnnnnnnnnnnnnnnnnnnnaaaaaaaaaaaaaaaaaaaaaaaaaaaatatatatatatatatatatatatatatacatatatatatatatatatatatatatatatatatacacacacacaaaaattagctgagtatggtggtgggcacctgtagtcccagctactcaggaggctgagacaggagaatcgcttgtacccgggaggtggaggttgcagcaagctgagattgcagcaagctgagattgtgcaactgcactccagcctgggtgatggagcgagattccatctcagaaaaaaaaaaaaaaaaaaagaaaaaaagaaaaaaaaagaaaaagcgcttaatataatgcctggcacacgctctgaaaaatgtttcatatatacggtaatattaccattgggggaactgatgtgaaagggacataggacatcctggcacatcatttgaaacttcatgtaaatctgtaattgtttctaaataaaaagttagaaaatgtattagctatctagtctgggaattatattgtgtcattgtgctaatatttttcccaccaaaggaaggaaccaaggaccagagacacaagcaatttgttacaaacagttacagagaagtgaaatgagaatggaagtaatttcttctgaatcatattaccatagagcagccttagtgtgaaggaagcttagagtcagggcagttaaccactgaacttatctgggtttgaatatgtggtttgctatggtttatttcctggttcaacttgactcatccattcagattcagaataataaacatttaaacatttaaaataataagcatctaaaatgataagcatttcctccacacgtactctgtgccaggcattgtggaagcctctcccatattgctttgaatgggattgcaactaaagctttctaaattctaagagaaaggcacaaaggaaatttactactgccactctaatccatttagtgctcactgtttaaacatctttgttttctcttaatgaaattaaaatgtgtggaacaaattgtgtaggatgtagtacctcatcagtggggaattcttttgcctctactaacctggagcactgggaaaagcacgggagtagggaacatagtggataagaaaaagagggtttattttcctttatactcagtttacagtagtgattccagcaggatgcactattttgttcagaaaaagctgatgctaagaaacttggagctgtggctgacgaccctgggacagagctgaagttctgttgcattctcggggcagtgttcagctcctgtaaatgtagaaagaaccgcctgaatcagggtaactctgtatagagctcagttctgtaggtatttttcttctcttttttcttttcttttcttctcttttcttttcttttcctttctttccctccctccttccctccctccctccccttctttctwtctctcttctttcttaagcacagtgtgagaaaatgtctctttagctgatgtgagtaaagagatcaaatatctttgaaaaactatgaaagctctaggaaaggctaaggcttcacattcagaatgtcaccttgacagggagctttaaagggagatagaagaagcatagagaggaggacaagtaaaatttcacaaatatacaatttttttttttttttgagacagtctcgctctgtcacccaggctggagtgcagtggcgcgatcttggctcactgcaagctctgcctcctgggttcacgccattctcctgtcgctcagcctcccgagtagctgggactacaggtgcccgccaccatgcctggctaattttttggtatttttagtagagactgggtttcactgttagccaggatagtctcgatcccctgaccttgtgatctgcccgcctcagcctcccaaagtggtgggattacaggcgtgagccactgcgtctgtccttacctttatacaatgtatagaaatgtataggaggctttaggtaagagactggcaattagtttttttaaattgttacttttttttttgagacagactctcactctgtgtcccggactggagtgcagtggcatgatcttggctcactgcaacctctgcctccccggttcaagtgattctcctgcctcagcctccctagtagctgggattacaggcatgtgccaccatgcccagctaattttttgtatttttagtagagacagggtttcgtcatgttagccaggctggtctcgaactcccaacgccaggtgatctgcccacctcagccacccaaagtgctgggattacaggcgtgagccaccacacatggcctaaaaattgttcttcttatttgaaaatgagtttatgagggacattttgtcaatctggcttcaaaaaagatgaatgaaatcaatggtaaaaatttgtttaacgtgctcgtttcagcagcacatacactaaaattagactgatacagagaagattagcatggcccctgcgcaaagatgacacgcaaatttcattttaaaaaagcaaataaatatttgtttaaaaatcatttttaatcatgtaagtatttctccatttttcagactgtttctcttttcatcatttaaaacaataaataatagggctgtccttatatactttcagtttcaggaatgataattctgaagaaaaaagtgaatggttcaatcaccgatacaaaaattaacaaacatgatagtggcaagcaacatcaggtgggttttgtttattagcgatgttttcgccattttttttttatgtttgtttgtggttgaaaagccagacacattaatttccaaggctcattggctgctaagaaaaattgtcactgtggccaggcacagtggctcatgcctataaccccagcactttgggaggccaaggcgggcagatcacctgagcccaggagtttgagatcagcctgggcaacatggcaaaaccccgtctctacgaaaaaataccaaaattagctgggtgtggtggcgcccacctgtagtcccaactactcagggggctaaggtgggaggactgccagagcctaggaggtggaggttgcagtgagctgagactgcaccactgcactccagcctgggtgacacagcaagagcctgtctcaaaaacaaacaaacaaaaaccctttcattatcatttggaagaggacttattcttaaaaatgcaggccttagtacttacatagttggatgatgcttttaggaaaatgacttgggacactccccctatattttacacatttcagtggcagaacaggataacaattcagacttcctgtgtgtctgaccacggacaacacacagctctgccatccacgagctgcattgtaagtgaagctgggttaaaggtatgtagaataatgattgctattatttgtttaaatattatttcttagaagaaggggacagagtgcagtttgtaaacactggtttaaaaactcctttcttttagaaaggagagaaagtgaaatgtaaaaaacacatatttgtgctgaaccatgaatgataccgtcactgaaatatctaaaaaccatattgcttaaaggcacttcttgcaatgtgtaattcagctaagatgataatcaaatgcatagctcttgaatacagaaaaatgatacagatcctcctcctttgctgcccttcccacagaatactgagataaaacttactgaggcctagctaccaaaggcagaattagttgttccatatcctaggctagcatttggtacatagtccctattttatcatgattactgagaactgttaagtctaactcaactgtgtagatcaagacagttttgtcttagtgcatccagcggctgaagcacagttggcacgctgtagattttgtgttgttgcggtgagaccaccagttagaataaagagctgatttgggccgggtttggtggctcacacctgtaatcctggtgctttgggagaccaaggccagaggattgcttgaggccaggagttcaagacccacctgggcaacacagtagaaccacgtccctaaaaaattttaaaaataaattggccaggtggagtggcctgtgcctttagttccagttacttgggaggctgagatgggaggatctcttgaggccaggagttcgaggttacagtgagtcatgattgtgccactgcactccagcctgggctacgtaaggcaagactggctctaaaaaaaatttgctttttaatgaaaaaaaaaaaaagagctgatttggctctttcttcccccatttacccagaattgctaaagtggtagatactgacaaggtatcttagcagggcagaagtctcatggtttgagtcagttgggaccaattgctgttgatgtgaatttctaactcctttgtcattctgagtgtgtcagctgaattcacataagggcattcaccaagggaggaagagaaaggcctttagttttaattattttatagttgagaaaattagacacatactcggggttacggggtctattctgatttttattactcctagaaatttcatacagattataatctgtctatcttgttagtaatatctgactgaattttttggaatagctatgtgtagaacccattttattacacagatttaggaatctcagaggatctgattccttagtctcttaaatcttcagtggcattaaatgccaacacattgtccttggtcaagactacaacgtagaaaggaacaagctaattaactacttagaattccctctcctaagagaccacatcgccaaagtggcaccatgacacagcttggtgttttgttggtcactttaggagaacaccattttggaggccttgggtggagctggagatagagccatggaggtagaatcgtgtcggaaaacctgggtttagccccattttgtacttgggcgtttgagctaatcgcttaagtcacgtaaaacaacaagactaataaagtctgggatacagactttaacacctcaagtgctgccaaaagtatttagaagacaaagcgaatcataggcacccttcaccgagcacctcctagacatcaagaaccatgctaggttccctacattcttcatttaatgccaataaccccacgaggcagttatcaccttcattctacaaatgggccccactcctaccaattaactggctgaatcaggatctgaccccgggcctgccaacgctcccgctggtggattgcccgccttgtcagctcgagttggcaggacgtgggagtaaaaacccggcgccccagccttcaccgtgctgcacgaggaagctggctaggcaggcatgactttgtcagtcaaccatcccgcagccgggccctgggctttgttagcagccacttggcgagggccccgggcgggtggggaggcggcgcttcctccaagaggaggtgggaccccggccccgacgacctcggagccgcccccggccccggatcgccgacgacgtacgtgcaggcctggggatggggcgctggctgcgagcggcgcgcccgccgagatggctgcggctggcagggcggtgggcgaggccggtgacccaataaagcggccgggccgcgggaggccccgcccggccgggttccggcactcgccgcagggtcccggccggcggcaggttgcgcgcccccgtccgcagcgctcggcgtgagggcggctcgggaggagggtgtgagcgcgcgtcgccgggccgggacccggcaagcagcgggaaaggcgggaggcgggagcgccggtcgcccgggagccgcgcggaggggcaggcggggcggggcggggcgcggctgggggcccgggcggccgggagccgcgccgcccgcggcaggcccgggccctcggcccgccccgcgcgcgcgcccccgccagcccggccctcctcctccccgccgcccctcccgcgcgcgtccaccggctccccggctcgcgccgctccatgtagccccggctccccgggcggccgcggaggagggggcgaccacaagatggcgggtacgtggccccctgttctccgggcggcggcggctcctcgagcccacccgccctccgccgcagccctgagtggctgccgggccggggccggcgtggggtcccggcgcgggaaggcgcccccggggcgggggggaggcgggcggggggggggcgtcgcgccgggccccggggcgctgaccgggcctttcttctctcccctcggcgcagacctctcgctgcttcaggaggacctgcaggaggacgcagacggatgtgagtggcccggcctcgcggtggcctggcagtccgcggggagcggccggggagggcgggcggcggcgaggcctgggccgggccctggctggctgaggggacggtgggcgagggcggccccaggcgggctggggtggcgatcgggggggaaaatctcgcgtccgtgaggaaacggcgcgcccaggttccgctgggggagggagacgcccggagtaacgcccaagttcgctttccgcccttcgctctcttctcccggcgcccccgaatcgcctgcgggctcagcagtggcgcggctgttttggaaggagaagcggtggggcaggatttgaagtggggtttgggtgtgtttctgcccctggtgtccccttcccccgtcactctaggaaggaagaggctcgcgcgggaggtgtgtttccttagagtcgctcttccaggagcgcccgggggtcagcctgggccccggctagccgtctgggctccccgacccggttttggattgtttgaggatgacatacctgtcattttactttggctggtagcagttttcagatgctcccgatttgattagtggattacgagaaggttagaaggtgtggcctccgcaggaattactaggtttggagagcatatttctttaatgcggatgttcagaaatcacccagccctccttcagtgttaacagtgcagctttcctttgaggtactgaagtttttaaagagttgacgcttttatttttaaaaagacaaagtttctgacatttcctgatggcgacggaattgatatttagaaaggaatttttcgtcttatatgtacttttctaagcctcagaaaataatttgggtcacgatagaaaagacaaaagagttaagcaggtttgtattgaaagaagtgacaaattgcagttaacttaaaatagtttctattcttgctaatcttccaaaatagcgacccatcaaaaaatcaataggttttgagatgcattttaaaaatgcagagtgtgcaaaatatataagcgaagatcatgggatacataagggaccaagaaattgttctgagttgagatgataaccatagtaggattgtggtctgtttagtggaaagcctaccggatgctgagattgactgtctagtacctgtataagtaatttcagagatggctgcagtttgaaattactcttttaaatactctgtagttaatccttagcattgtctaatgtggttcccttactcagagtaaacttaatttttagattcctggttgttttgagtaaagtaagggggatttactatttagatggattatctgaaacgagtaatttatctttaaagtaaatgaaccacatccaaacttttgctaagtctgtgtttttagtgaggtggctcaaaacagctctcttaaagggagcagtactcatgtagtgaagggcagctttaacattttatttaatgtttaccttaagccacttatctgcctaatagtaagtttgagatattatttaaggcatctgttgatttcagatctcttgccaggttaggattggagaaatggccctgattatgttacctcgaggagggctttttatatttatgttcgacttcgtaaatagaagattcatttattcagcaagtatttatgactggagcaaaaacttctcactcctgaaggatgaaatgcagtctcagtttcttccttagcccccaagaagcacagtgtagaggggaaggcatacctgtgaaaaattcaaccatgagtttcaacactctgccaggtactggggatggagctttgagaaagatgggcacaacccatgccctctagtggtttacaagcagttttgaatctaggtgtacagtacagtattacagttaccactggagccaggctgctctgtttgtcttagcagtgtctttttgggcagacttgggcaactcacttaacctccctatgcctcagttttgtcatttgtaagtaggcataagaaatattacctacttcatagagttgttcaaggctgtacatgagttagtgcctctgaagcacttggaacaattcctggtaaacagcgatgattatgattatgtttgctgttatgagaaaagagcaagggaagcttaaaagaagagcagagaaggaaacactgatgttgaaccttacagaatgaaggtacttaaagatgctgccaatgctcgcaactaaattttttttttttttgagatggagtttcactcttgttgcccaggctggagtgcaaaatggcgcgatctcggctcaccgcaacctctgcctcccgggttcaagtgattctcctgcctcagcctcccaagtaactgggattacaggcgtgtgccaccacgcctggctaattttgtacttttagtagagacggggtttctccatgttgatcaggctggtctcgaactcccgacctcaggtgatccacctgccttggcctcccaaagtgctgggattacaggcgtgagccactgcgcccggctgcaactaactttttaaagattctgtttcctgtgcattttaatttaggataaaacagacattgaaggcacaatagttatttgcatattcataatttggttgaaggctttgttagagtaattgcttatttttctcagttactaaagtttttacaggtgatacctttacccagaatattcaggaacaaaggacttttggacatatggccagttgaaggaccacttcccatctcytgtgaagggagaaagaatgagggggaacactgggccatggtgcctccttagagagcaagatggttggtaaaggactgagacagctgtcacatcctggagaagctggagaaggtagaggacccaaaggtagaggaacggagcttgggctgcccttataacacggttgttatctcgtgagcctgagtttctctgtctatggtaaaactccagagtatggagcccaacctccagagtagttgtaaacaagtcctactacttcagccaagctaggtgtaagttggcccttgggatgggaagaaattgttttctggtcaagctctagaatcttggttgaccttcctaaatgcagaacctggactatgagggaagagacagtaagttctgttgtgcagatgatctaggaaaggacctagctggagtctaggacttgaaagaggggcattgccagacattgctaagagtctcaggtctttcgatttgatttgttttaatcccgtctctgtacagaggcacagagtcggggaaaaggttggtcaaagactgacttgactgataacctttggaggaaaaaaaatcctaatgagggaaaaatggatggtatttgtgtgtgtgtgtgtgtgtgtgtgtgtgtacacataatttcattgaaggagtttcattagaacttaaacttttatcaagtaacttataaaggtaagtaaatgaaatcattatcaggtactcttaaatttaggagaataggctgggtgcagtggctcatgcctgtaatcccagcactttgggaggccgaggtgggcggatcacgaggtcaggagatcgagaccatcctggccaacatggtgaaatgtctactgaartacaaaaaaaaattaactgggcgtggtggcgtgcacctgtagtcgcagctgctcaggaggctgaggcaggggagttgcttgaacccaggaggtagaggttgcagtgagccaagattgtgctactgcactccagcctggcgacagagcaagactccgtctcaaaaaaaaaargtttaggagaataatgcaataaaaaccatatgtatttaagtttaaaagtgaaactttcagtactgtatcatgaaatactttgaatttcaaattgaaagcaaaccagtgactccatttgaacataggttatctcagcagatttcagagttgggtaaaccctttttaactttttatatttaattatgttccttaaataatgggagacaatacaaaattgtagatgtttagaaaaaattatttcagatttctgttttagtttccaaagatgcaattttgattcacatttaagttggtagattcctaaaatgaaatgagactaagatacggttaagatttgatgagccaatgcttgtaaaaataatttcattgaaggagtttcattagaacttaagcttttatcaaagtaatatgttgaagaatgttatttttaaagaatggctatgtaacgcttagtttacagtgcctttcatacacaggttattcttcacagcagtcctgtgatgtgtaggctrtggtattctaatactaataagtaagttgactaatgcccaaagggactaaagaaacaaaactcctaagtttagacggaattttaagctaggccttctgattctaaatatcatattttgaatattttcttaaatggcccagtttaaaatattgatcaacccaaacttgtacaggcaatttctttgaactcgttcttaaagtacccttgaaaattaatctgggatgctgcatgtggtttagtttacacctggagaatgatagagaggatggagcttgggtataagacagcttatttagtcgttaacttttatctcagctgtaactaagtatgacgttgaaaagtttttgaagctatgttattgagtatgccatacaacagacttttttcatatttaagttttggaatccttttacattatgctgtttttcgggtttaagggcggtgttgaagtagagtgaaggatgggtccagaactaactgagggtaaccgcctagaccgcactctgtgcagaatcttcaggccttcctaccatgtttcaaaaccagttctgataagcttagagtccttgcttccggtgggaggtgaggagcaaaatattggggctgtatctggtagtggccagggaatcattcagaaacctttggaaggtgcccttgaacrtgaatcatatttaggagtattgttaaatagggatttgggagggtgagtcgtgagacctggtagcctgttttgactgctgccaacaagcctggatggagagatctttatttagagataatatcattgatatcttagaaaagagtgcttttaaaatggtttcagtggtacccacatgtgtgttggatcaattaatgatacctctgctaacaacttcccacataaaattgaaagagagagagagagagacagagagaaaaacccctttgtaaatatgcttgggcctgtagctacacgatccactgccctcccccctccaaaaaataaaaaaccaagacacctaaatgcatactttttgtttgttcctgcctgtgaaagataaatagacctcaggaggtaaagttcagaagtctgctgccacatttgtttgatctctggtttattatttctggtccttttctctcagtctcctcaaaacaatgaatgtatgtttattaaactattgttaccttgctcctatgtttgtattacatcttttttttatattttggagtaaaagaatttgaaagttcctaaatttgaattagagttgtgttgttgtttttaaattggagctgagaataaacctaacttagtgttttgggcagaagtctggatggcacacctatggaattttggctgaggaggtattccctctaatttctataagagggtctggaacttgctctgcttttagcacagatctttgagctggtgacatcatcaatgctgcttcctccacattcatttcttaactctcctaacttttaagtcatcttagcttcttatctccctagactaaggagcaaacttaacttactttctggccttattgatatgaatgtggttggtatttgagcatctatcatgcagtcattctggaagatacctcagtatagttttgtgtaggggaaagaacactgggcttggtaagcctttagacctgagttaatattctggccctgccatttattctctttataatctgagcaagttaactttttctcagctttctacctttaaaatgttgatggatttttggatcatctgcagtttttttgctgttacaaataaagctgctatgaacattcacacacaagtctgtgtgaatatatatgttctttctcttgggtatacatctagaagtagaatggctgtttaactttttaagaaactgccagcccggtgcggtggcttatgcctgtaatcccagcactttgggagaacgaggcgggtggatcacccgagatcaggagttcaagaccagcctggccaacatggtgaaaccccgtctctattaaaaatacaaagaattagctgggcgtggtggtgcatgcctgtaatcctagctactcgggaggctgaggcaggagaatcacttgaacctgggaggcagaggttgcagtgagccgagattgcatcattgcactccagcctgggcaacgagcgaaactccatccaaaaaaaaaaaaaaaaaaagaaagaaagaaaaactgccaaactgttttccaaagtggttatatcattttccattcccaccaaaagtgtatgagagttccaggtcctcatcatcattgtcaacacttagtgtgagcagtcttaattttagccactcttattaaatgtataatagtattaatttgtggcttgaatttgcattaatggctaattatgttactctttttatgtgctcatttgccatctaacttatctcctttggtgaagtgccttttcacatcttttgctcatcttttcattgggacattttcttattaaattttgagagttcgttatatattacagatacttaagacatatacaaaggcagatggaccatcatgtctctactactcggttttgactttcatttatccatgtttctgtttttgtttttttttttttgagacagggtctggctctgttgcccaggctggagtgtaatggcactatcttggctcactgcaacgtctgcttcccggactcaagtaatcctcccacctcagcttaccaagtagctgggaccacaggcctgcaccaccacgcctggctaatttttttgtatttttggtagagatggggttttgccatgttgtctaggctggccttgagctcctgagctcaagcaatccacctgtcttggcctcccaaagtgctggaattacaggtgtgagccactgcacccagcctgatgtagatcacttttatatttaaatctatgaaattcatttttgatagaaataactcatttattcaatacttcatttatttaagattggtggcaatttggacctgagttagttcaaattttgtatttggattacctgtgggaaaaaaggttactaccaaagtaattgcgttaagagtgcaaagaaaatttttactcactgaagggaacaaatatctataatatttgggagatccacaagtgtatgtcagagcaagtgctttgttatactacctttctgttaaatactgtttgtatacataatcttggtaactaacttgaaactagataaacatgccactactgtattatataaatagaaatacattatacatatggtgtatatatataaatataaatacatatatgaatatacatatagtatacttcagcaaattattcttgccttaaattcagttgtgctataggacaattttgcatttctaaggatttagtaagcttttagtattgatatttgaaggaagggtttctgataaacattatttatattattgcaaagtacaaaattaaagtttgacatacctgttgctggagactataaagattatgttgtatggtccctgtaaaaggccaaatattaaatagtttaggttttgtggaccatatgatctttgttgcagctactcagatctgctgttgtaaggtaaaagcagccatgacaatacagaaatgaatgaaagtaagtgtcatccaataaaattttatttacgaaaacagaaggtgggccagtttggctcgctggctgtagttggccaaccccttcactgtgctataaaatccaaggtctgtaacatttttattcttgactcatcacacagtgttcagcaatacatctcatcagtgcttaatgtagaataagtattgaatgaatcttgatgtttcacaccaagctaaataagaccgtaaacctaatttggggtcaaataatgaaattatttttaattaaacttgttattttgaaaactttcagacctatacaaaagctgcacagatattgtaatgaattcccaactcttcacctgaattaagctgttaacattttgccagtttgctcgttacttctctatacagttatgtacacacacacaatgtaatgtaattttttggtgtacctttgaaaataggttgtggtcattgggacctttagcctgtgtctcctaagaacaagggcacttttacaatcatagtaatgaaatttgggaaatttaacattgctacaatcctgttatatagtatgtagtacatattgaaatatccccagtaatgtccttatggcaactgtcttttgctgtaaggacattacttacaaacttactagtttggaacaatttytcagcctttagcattcatgaaattgacatttttgaagagtccatttggttttatctgtttcctcatgatttgattcaggttattctttccttttttttttttttttttttttttttttgacaggactgctacataagtgatagtgtagttttctcagtgcttcagattaaggagcacctgatagcagtgtccattactggtagtgtggaggtgatgtctatcaaattgctccactgtaaagattctgtttttcctattgtaattagtaaggaaatagtttgacaatggggaaataccctgtttccaaacatttacccatttagtgttagaatgtgttgatgattcttgcctgaattaattgcatttactagctgacattctgctttatagaagagcctgatcttcctccctattcatttgttggtatatttatttgttaaaatataattttaaagccccaaatctttataaggtaactcattctgtggtgtatctcattgtctttcrttttctaaaatgtaaagatgggaaacaaaatgtggccgatttattgtggcctgagcagtatctagggaaaaactgaagggaaggatagactatgagcttttttatgttttacgttacattattagagattatgtagagaatagaagggtgttttgatcaawtttgataaaagtttgtacgaattaaaaagttctctttggtgtgatacttctcaaggtattaatatgctaatgtgcttgtgaatatcttagagaaggataaagtatagtaaactcttgacttatcaattatccctatggactacattttcattaacaaatattaatgaatgtgcctccatgagaagcattggactctgttttttagataatgaaaagtttagcaagacaatctttagggaatttatatatgttggggagggagaggagaagggaaggtaggagaatatgaaaaaaaggaaaaatactttgcaattattggtggagtaaaagcaagggcacccaagacggcagggaattaaaaggaagaactcttaattagaaaatagaaaatgcctcctgggtgttgttagtaataggtaaatttaagctgagatgaggttagagaggacagaaatggaacagatgaaaccacataagacagaaaagtagtggggcatgttgcagcaaattgactccacatgggctgtgtacagaggaggaaactaggttggggccagatcctggacacccttgaattacagcatgagaaagaaagttgtaccttaattcagactgcctgggaggcttatcagggggtggaatggtagggattgggagggagggcgtgcaagggcatctattgaacagagtgggaagattgaagtggtgctgatatataaactggattcgaatgaggggaggctgggagtagatggatccaggcaattatgttaataacagtctaggaccgtggtctttaaactttattactgcatacctactaaaataattttgaaaactctgtatcatgtattttaaagttgacattcaaaattttctccataaaatttccatatttgcaaaggatatatttctaatgtattataaatatcagtgttttaaacatagagttgtatcactttttaaaatggactaaatactatagcacttggatacccactattcattttttaagactcacaaatattcaggcaagaccgtgagagacaaataaaacaaaaaaattgtgaataaattctttaaattgagactcttgcatttttttctttatctcttttcattttccacmcagaaatttaccttgatgtattttcatattttcatgcttgagagttgattgcccagtcacatttctttgcaccaaaaataggtaaagagaaatttaaattttatgtcaggcaaggtggctcacacctgtaatcccagcactttgggaggttgaggcaggaggatcccttgagcctaggagtttgagaccagccctggcaacatagaccagcagctctacaaaaaataaagaaaattacctgggcatggtgggtggcacatgcacttgtagtcccaactagggaggctgagttgggaggactgtgtgatcctgggaggtcaaggctgcagtgatccatgatcacatgagactctctctcaaaaattaaaaaataaaaagaaattaaaaatttgaatttcccgttaatataaaacttaaagttttattgagtttccattattaatacttggttgatcaaccagaatatattacagattgaaaaaacctagtaaataacattttatcaaaaaggcatctcttaatgaaatggatgggaattttacaaaataattatgtattcatggataaatataatytattgcttagaatgagataatacttaacatcatttctacttttcattttaagagctataagtgctgagaaactttgttgcataaataagtcaatgggaatggtagatagtgtatgtgctgtcctatttatattaagactactaattggttgaatgaaaactattaaaaacacatggtttccctacttactggttgaatgaaatgagtgaaaacaaaaacagttggaaaccacacacagatattctgtatctagaaacaaactgaaatgcaaagtgggagggaacatttgcttatttgcctaacactgttgcagacatttgcagacattatcactgtgtcttaaaagtcttaaccattattttatagatgaatataataagtgacaaaatgggatttgaatccagatctctcttaccttaaaaatcttctgttcttttcacacggttttgctatgactatgtacaattttatggtgggcccaactttttttttgagacagtgtctcagtacgtcgcccaggttggagtgcagtggcgcgatttcagctcgctgcaacttccttctcctggtttgaagcgattctcctgttttagcccagctaatttttgtatttttagaagagatgggatttcaccatgttggccaggatggtgtcaaacttctgacctcagatgatcagcccaccttggcctcccaaagtgctgggattaaaggtgtgagtcactgcgcatggctaaaggaaaggtgcaagttttttttttttttttgagacagagtcttgctctgtcgcccaggctggagtgcagtggcgcaatctcggctcactgcaagctccgcctcccgggttcatgccattctcctgcctcagcctcccaagtagctgggactacaggcgcccgccaccacgcccggctaattttttttttttttttttttttttttttagtagagatggggtttcaccatgttaaccaggatggtctcaatctcctgacctcatgatccgcctgccttggcctcccaaagtgttgggattacaggcgtgagccaccgcgcctggccacaacttttaaactattacattttaggcactttttcttaaatttaaaaaagcgaaaaattggaatttctcttctgctactttggatttctgtgttagattcagggaactgcaagtagtatagagagaggatacttctggagctatgacagttgttttgtgctgttacataatctcacgtctatacaaaaagtcattcagttctataggtaacaaggattaatgtcattgttttgttgtttctttcccttgtcatcttccttcctgatgttctctttatttgtattgtaacatatttgattcctttcataatttggaactagaaggttatattgagcctagtttatgtttagcagcagttttcaaagggtcttagagataagatgaactaaagctttaagtgtagggccttagtttatatcctaggttttctcttcctattaagaattccattcttttggccaggcacggtggctcacgccggtaatcccagcactttgggaggccagggcgggcggatcacttgagaccaggagttcaagaccaacctgggcaacatggtgaaaccccgtctcttctaaaaatacaaaaattagccaggtgttgtggcgcctgcctgtaattccagctgctcaagaggctgaggcataagaattgcttgaacctgggaggcggaggttgcagtgagctgagatcactttttaaaaaaattatttatttattttggagacagagtctcactctgtcacccaggctggagtgcagcagtgccatcttggctcactgcaacctctacttcccaggttcaagtgattcttgtgattcagcctcccaagtagctggaatttcaggcacgtaccaccatgcctgactaatttctttgtatttttagtagagaaggggttttaccatgttggccaggctggtctcgaactcctaacctctaagtgatctacctgcctcagcctcccacagtgctgggattacaggcatgagccaccgttcccggccagtatatgctttttttttttcccccaaaaaaaaaacaacagtaacaataacaacctggtttgaacactgtattgcatgctttttggtcatttaaaaaattcagataacattaaaaggtgatgtatggtttttttacttcatcagtgaaagaggctggattttaaaagccatggaacagtatagggctattgctgctattacagtgttcaagaatctgtaaactttagttatgcagagctacataagaattcaagagtcttgaagtactaatgtctccatttctagtaatactccttgtctttgatctattttgtctcataataatatagccactccagctttttttcttttttctttttttgagacattctcactctgtcacccaggctggagtgcagtggagctatatcagcttactgaaatgtctgcctcccgtactcaagtgatccccccacctcaggctcccaagtagcagggatcacaggtgtgcaccaccacccccagctaatatttttgtatcttttatagagatggggtttcaccatgttgcccaggctggtctcatctcaaactcctgagctccagcaatccacctacctcagcctcccaaagtgctgggattattggcgtgagccaccacacccggcctccagctttcttatgcttactattttgtgttatatctttttaaaaaactattttcaacctaatggttgaaattttgtctttaaaaatgtatctctggtagtcagactatatttctgatagtctgataatctttgccttttaaatgaaatattttagtccatttatatttaatgtaattattgatctagttgcatttaggtctgtgattctgctatttattttctgtttgacttatggttttttcctctgttactcctttccagactttattttgggttagctgaatattttttagtactcaattttagtttctccattatctttctagctataccttctagtgtgtttcagagattactcctaggattgtaatttttttttttttttttttttgggaaatagaagtgaacatttgtcaccagtgtctgtaccagagtggaacactccctttgtatggaagtgattatcaatcatgatagagtgatagcaaaacatttgaagcagaatatgattttgttaccttctaggagtaggcttcttaagtatggttgtataacagtctgcatttaaattagtggggttattcatttaaaaataaatgctcctgagccttactccagactaacataatcagtatctgagtgtgggatctaggtatctgcattttaggtaagtgccacaagcttgtcttgaacataattatgtttgacagtcacagctgtaggagttttttcccactgccctttgctttttatgggccagaatcaattttattgtttatctttaagattaacaagtatgagactgatgaaacagtttggtcatagtcatagaattctacagcctttataaaggtgcttcaaggttatgctagcttaacagtcttataaaggagaaaactgaggccagatgagagtggctgagtggcttttacagctctgatttataattaataaggtattttgctatgaattgtagacagaataagctgcagtgtataattatgttcatggttaggtgttgtttgtaatccaatttgacagtctctgcctttagttgggctatttagaccatttgcagttaatgtagttactgatatggttgtgtttaaatctctttatcttgttgtttctcatttgttgtcccatctcttccttgttccctttattctctttttctgccttcttttagattacttaggtggtgtactggcttagtagttatatgtctttggtgtatgtgtgtttctttttaaataatgattgctttagagtttataattaatatgcatttttacctttccacagtctaacttcaagtaatatgtatctcttcacacacagcgtaagagctttataacagtatactttacccttttcctgcctttgtgctattatagtcatacattatacttctacatatgttgtgaaccccacaatatatatttatccatttatttcttagtacgtatttttatttaagcagttatcttaaagatttgaaaaataagaaattttttatttatcccatattaaccttttttttttctttctttctttttctggagacagggtcttgctttgtcttccagactggggtgcagtggtgccatctcaggtcactgcagctttgacctcccaggttcaagcagtcttcctgcctcagccccttaagtagctgggactgcaggtgcacgccaccatgcccagctaatttttgtatttttttttagaggcaaggttttactatattgcccaggctgatcttgaactcctgagctcaagtgatccatccgcctcggcctctcaaagtgataagattacaggcgtgagccactgtgcctggccccatrttaattgtttctgatgtcctttattcttytgtatagatccagattctcatctggtgtaattttccttttgctggaatggtttgctttattatttcctatagtgcatgtctgctgttgatgatgtcagtttttgtgtggctgaaaaaaatctttatttcagcttcatatttgaaagatgtcttgtttcttaggtatggagttgtaggtatttttctttatgtacttgaaagatgttaatgtcttctggcttgtattttagatggaaaagtctcctatcattcttttgtttttctctatgtaacatgagtttttctccggctgcctgaaagtttttatcactagctttaagcaatttgattatattgtgccttggtatacttttcttcatgtttcttgctcatgggtttcattgaaccccttgaatctgtctgtagattgatagtttttaccaaatttgggaaaattttgtccattatttcttcaaatatattttatatctcccattcttctttggggactccatttgcacatatatttggatgcttggagttttcctacaattgattgatgcttaattctcttcctcccccatattttttctgtttcatttaggatatttttcttaccctttttcttcaaggtaacacattttttcctctataatgtttaatctgctcttgatcccatcccgtgtatttttcatatctttttttcatctctaaaagatcaatttaggtctttcgtatcatcttccatctctgttcttaacatgctctttttttctgccttcttaaatgtatggaatatagttaaaataactttcaatgttcttatctgctaattctatattttttgtcctgggtctgtttctgttgtagaattttttgcctcatggtttgtattttcctgccttttgtgtgcctagtaattttttattggatgctagacattgtagagtttaccttgttgagtgctagctatttttatattcatttacatactcgagttttgttctgtgacacagtttcttggagatagtttgtttcttttgaagcctgttaagctttgttaggcaaaaccaggagaattatttgccacttcttaggcgttttgcctcatttattttagaatttttaaaatttttgttgttggagacataaactagtccttgtcctttgtgataatcgaggattcgttcacttgatcgtttcaggtaattatttttcccagaataccgactagtttcctcacacacataaactgtttcaatactcacctaaagactcaaagggactttctgcagctttctaaagttctttctctgtgaaggtccctcctctctgatactctccctctgccaattctagctgccttggcctccctgaattctcaactctgtctcctcaactccaggagtctgctgggattatatttggaccctcctagtgctctggaaattatttccaggaagttagctggaggaatatagggctcatttcatttgtcctctctttctcagagatcactgtccagtactgtcttttgtccagtgtctgaaaccatggcttcgtatgttttatcttttttttaagagatgggggtctcactgtgtttctcaggggctagagtgcagtggctattcacaaatgcagttatagaagagtacaccctcgacctcccgtgctcaaacagtcctcctgcttcagcctcctaagtagctgggactacagacactatcagcatgcctggctctgtcattttatttatttatttaccatttaaggtgtgagggttaagttggttcctgttaatccatcctttgtcaaaagtggaagatcatgtttaagtgttctttaagtacagaagttatttttattttaacaaaaggaactgttgtgttctctttttgataatgttctgttgggagtaaaaatgttatctgtttaaagtagtcagttctgtaagatgggcccatggtatatacacatttactttaaaaacaagcattttaaaatgccctaacagcaataacagttcatcaggaaatgatgaatcttttctgtctctcatatagcaacatttgggaggagtttcttaggtggttttctttttctctcttaagagctaaaggagcaacgacaaaatctcattgtgagtgatgaacagatttatttgtttcaaaaatacttaaatgcttactttgtgcctggaaatatcctggagatgaagcagtgtatgggataaaaatttctgtcctcatggagccaataacttactctagagagacagactataagtaaaacaactaataygtaccagatgttgacaggcactattgagaaagtaaatcaagtaatgcaggggatagaataggaagtgccaggaaataataataaaaatttcttggaaagctcttagggctttgggaaaggccctgatttacctctggatcgcatcctttccaaccccatggtgtttccatcagtaatattttcttattgctaaaacttcaatttatatttatttgttgactgtttactttcattatataaccatgtgcaactctgtcttcttttaaacattaggaacagaacaaaataaataatctttattttgcttgaatgccctggctagtaatctaatccagtttactatatcacagccacagttctggaaagtatattttgtattcattgtcttcactttattatattttcctttacctcttcagtcaggtttggcttctcggctttcatgcaatggaaaattgcccttgtcacacagcatggcacaaaagtaccaaattcagtgggcacctttcagttcttccttgactcctttggtagtagatgctgtttaatcatactttcactcattgcttgkttcctttgaaataattaccttttggttagtttttagccattctttcttggtcttctcttccttctcctgcagcttgaatgggtgtctggccttttagtttgtattaatacatacttttattacaatgatcattttaaagtagattgttttctgtagaatattagctctttgaagtcagaaacattagtattttcattgttgtttctccagcatctaccctagtacttggcacaaatgtatttaataaatatttgtttaatgaatrtaaatatattaatgtttttagctttcttctattaagtgaagttagataccagtttcattagctttatcttccacattgcaggactaactatattggtgcttgactttttgtgtgcctattcacaagttgttagtgtcttgattgaacatgttctcaagactggtcactttcctgcatactgagtttctgtagcctctgacctttgtgcttttagagccaagtagaactttgtgcttatagagccaagtagaacatatctgtaggaaaaggagaggaggtatcttttagttatttgtggcttctggattgattctgagagtctcttgtgattttttttttgtaccattccagaaacagatttgtactgcttcagacaggcaaggggtacattttagtttcaaagtgttataaggagtatttctgatgtctctgatagttggtgtggatgactacagctcagagtctgatgtgattattataccttcagccctggactttgtctcacaagatraaatgttgacgcccctggggagattggacaagtatgctgcaagtgagaacatatttaacaggtatgtgcatattctttttgttaaagtggaagtggaagggtggttttattaacttcagtagggaaaatgaaagtatccactttaaaggaggtattattaacaggcacaatctgagtcaccaagttttattcataatcayagcatgagcagttttgtacttgtttattctttgatcctagtaagcatacaacatgctttctttgcaaaaaaaaaaattaccattaattaccattgcttttctgccactggacataattttggtattcatataaattgcttattgggaagtacattattccttcaacacatgatgttgtatacctgctgtatgacgggtgatgctcaagatcattgggtcacacagcagtgaccaagagccagcactcttcctactgcattgtgtttgtccagccatgatcccagaccacctatatcacacttttctgggaaatcaaaaagtcttggttcagattttttgggtatagctatgcaaaactcatactactaaaaatatgtaagggtaacattttgtataatgaatgagtgtgttttttcattgtgataattgaaggacaactgaaatgaatttttggtgactttttaccaaatcagttagataaagattaaaaaaaaatgttgtaaatattcagtctcatcttgttaaaataaaatcaatactgccgtttgccacttaggaaattatagacctaatatatgttttaataatgtaataagaaaaaattttcttaaaaaatatacagattttgtcttttaaaattctagatatcggccaggtgcagtgactcatgcctgtaatcccagcactttgggaggccaaggcaggtggattgcttgagcccgggagtttgagaccagcctgggcaacatggtgaaacagcatctctactaaagatatttaaaaattagccaggtgtggtggtgcatgcctgtagtctcagctactcaggaggctgaggtgggaggattacctgagccagggaagtcaatgctgcagttagccgtgatcacaccattacactccggcctgggcaacaggaatgaggccctgtctcaaaaaattaaaattctggatattagctattgatgccattgaacatacataattttgttttttttgtgtagacaaatggtggcccggagtttgctcgataccttgagggaagtctgcgatgatgaaagagattgtattgctgttttggaaagaattagcagattggccgatgattcaggtatatgtggagaaagtgaatttactctattctagaaaggcttctttgatcaaatttgtgtttctaaaaactaatgaacaagttaatgtgatatgagatagctttaaaatatttcctaagtaattatcaaacccatcagtgacaacaaaagtaaaatttgttactgagacctggacattttacagtgggctcatttagtttaattttagaaatttctcatcaaaacaaatctaaaaacattgttttgcatcatgtatagtaatattttaggattaataaaaatatatagaataattttgaatacattraaagagatggaggaggctgtaaattattttaggcaactatagaaagcttgctttctgtgtggtttctcacttgcaaaaaaatgttgattaaccatttgtaaaactaaagctggtttatctccaaagtgaagataagaaagtctgcttaagaaagaggtaaacttgatttaaggcttagaaaatggtgatgttaaagtttttataaatatatcttttgttgtagtaaaatatacttaaaacttaacacataaaactattttaaggtaatattaaacatatttttatacttgattttagaaaccatccaaaaatcttaaaactttttcccttaaatctattatctttattaaagtatattttctacctctgacagactttttggcatctcagcaagccctattttttaatttttagacaagctcatcttttgatgaacagttcattttaatgggaatgtgttaaatgtttacataagccttaaatgtttctaatattcttacagggtgggcagaacatttgtaggcttaactgagcaataatctacctttgtgtacataattgcttatgtatgtgcttgttctagaatggttttaggaggggtctcatcaagcataatttttacttatttttttaatttgatttaagttaaataacaatttaacataaattcatggcactgttatagcctattatggttatgttctttagtagagacagatactctttaaggatagatttgtgttttcctttacctgtttaccagctccagagttttttttttttttgtaagtgtgtgtgtgtgtatttwaaaatatgttctcacattggtaaattcatagtaaatgtctctattgacataatyccattcattcagtatacatcaaacagtacatactctataccaggttctagattaaatgctagagcagttattaaggtgaacaaggatttgtgtcatcaagttaacagtttagtgaatgcagccaacatataaacaataaattataatgggaaggatcggggcaggcttcagaaagttagtgacatttaagttggatttgatagatgaggtatagagagggaaaagggcatacccaggaggggaaaagatagagaaaggagttcaagatggtggcccctttggtcaacaatgaggccaacctgacaatgagactaacctgctgagtttccaggttagaaaaattaggctgttaagtaagttaggtgagggctagattgtaaaggtttataataaaccatgctgatgactttacctttttgtgatttagaacagtgtagtgtagcagtatgaactgatatggtgaaaaagatgggtgacaagaagacttgattggaagactataccaattaattgggtgtttttgtttttgagacagagtctcgctctgttgcccaagctagagcagagtggcgtgatatccactcactgcaaccacccctgcctcccaggttcaagcaattctcctgcctcagcctctcgaataactgggattacaggcatgygccactacacccagttaatttttgtatttttagtagagaaggggtttcaccatgttggccaggctggtctggaacttctggcctcaagtgatccacctgcctcaagctcccaaagtgctgagattacaggcatgagccaccgtgaccagccagttaattgttataaggatgaattgttggatagaaattgaagtactaggagggattccaaggctaacctctggatagagtgaggaagagagaggatttgaccctgaggtttctaatttttaggactgggcttattgtgatagctgggtaagataaagactattgaataataacatagctctgaagtgaatgaaatatgtatccttagtttagacaaataagcagctgagaacctttcggtcttctgccttacctttcattagcttttatcttgatttttttattccccaaaatttaccatctgcttttattttcccccggaatggatggatgtatagtggtatctcattgtggttgtaatttgcatttcctcagtaaccagtgaagttcatacctggttatacacttactggctatttgggtatcttttttttttttkkgagatggagtctcactctgtcacccaggctggagtgtggtggcatgaccttggctcactacaaccttcttctcctgggttcaagtgattcttctgcctcagcctctcgagtggtgggattacaggcatgcaccaccatgcctgcctaatttttgtatttttagtagagatgggatttctccgtgttggccaggctggtcttgaacttctgacctcaagtgatccacctgactcagcctcccaaagtgctggtattacagacatgagccaccatgcctggcttcttcttttttgaaatgtctaagtctcttccccctttaaaaaattggtagtcattttcttacagatttacaggaattcattctgcatatgagccgtatgtcatttatgtgtattaaagatatctttttcactctgtggcttctctttgcactccgtgatgcttcttgcagaagagaagtgtttttcctttatgggtcatgccgtttgtgtcttctttgagattttttccmatctcaaagtcataaatatcttttcctgtattctctaacacagagaagccttattgttttttgccttgacattcagatctgtattccacctggaatttattcatgtgcgtgatacaaagtggaggacaagtttcatttttttttttaatgtgagtagccagttgacacaactgggaagaccatctttcccagttcaccttttaataaatcggttgtctgtacatgcatgcgtctgtttctgggctttattcccctgccccgccccattagtctatttgcctaagcggggctttgaagaaagaaaagttgctgatttcatttttaactgaaaccataacttgtgtcctccttttgcttcaaaaatataagcaattgtcagtgttaacttagaaaattcagcatccatgagaaaagcagaggcctgtatgtttacttttttaaaaattaggtttttcttcaaaacagaaacactctattttgttcatatctggccaacttcacatggtacaacagtataatagaaattccagatattggtttgttgataagattctgagctttgtaaaatacagtattatctacttaaaggtatgttaatttctctgttgatatctgaaatcctagtagacacattcatacatatttactttaatgtagctttattaatgcataataataatgggtatcagagttctagttaggtccgatacaatgacttgttactgataatccatcatgtctgtctgtatttcagtcacttgcatgtcttctatgaattgcctacttgtatccttattttctttcttattatttatttgaacagtgtgttcacttcctaatactctgttatacatgaatttgctcccaggctgttttcccttttaactgagtattggtatctgttatctataataaagtttttttgtttgtttgtttttgagacagagtcttgctctgttgcccagggtggagtgcagtggcgcgatcttggctcactgcaacctccacctcccgtgttcaagtgattctactgtctcagcctctggagtagctgggattacaggcatgcaccaccacacctggctcatttttgtatttttagtagagacagggttcaccatgttggccaggctggtctggaactcctgacctcaagtgatctgccygccttggcctctcaaagtgctgggattacaggcacacccagcctataataaagtttttataawgtataattagttggtcttacggttgatttttggattttgtcttcccacctcaagattgaacatttaatattatcttttagtacttttgatctttatgatgtgcagtaggaacttttgttccgtgctaactagctgattttcctactgttgcttcttagacatttcatctttttgaagcccagaaatttgaaatgccatatttctcacatttaaatttgccatatgcacttgggtcttttcaggtgtttaaaaaatatttgtcatctttaattttcatttacccatttttagtcttagttaagtctaattatatatctttcatttattgactaagttgagattaggaactagtttttatgacttgtcctagtaggttcttaaatagtggaatttatggataatactatgtatgtgtcagagtattgatgtaaatatcagataggatatttaacccctagcacagtgtggcacagtgtaggtgatgaataaatttatttattgttaagaaatggttagatactcagtgcatactgtgaacaacagaagcttggattgaagataaggtcctcctttcactcatgggattgatctgtgtatgattctgaaaaggaatgcagaattaaaggatgttgtctcaagtcctttatattttgaagatgaaagtccatagccttcctaagtaccctcaagaacagataaaggttttgttgctgcaggagaacatgtttgctcacattgccgttatttcartagaaccaactgtgagagcggagctgatggaacaggtgcctcacatcgcactgttttgtcaagaaaaccggccttcaataccatatgctttttcaaaattcttactacctattgtggttagataccttgcagatcagaataatcaggtaagagtaccatttatatgttcttaaaagaaatttacgtagtgtaatatatggagaatagccgagcctaagtgttctctttggaatgttttactgtttttcaaaaatgaatatttatcttagacaagatgtgtttagagtctgacaaatctagtagatccctttaatgccattatggacaatgcctagtaactgcactctcacttggtaacctcctagcggtcccttaaaaggtttgttactttgtgaggcatcttttaccaggatggctctgtccacttcctctgttacagcacaatctacgaagttctgtagtctttgtaatagttgaagaaaataaacacaaatatttatttgcggagttttgccagttatgggtccctttgagatgagaaatctttgtttataaaaatcaagtgatagaattttgtcatgttgcatatgtactttctttgtgttgttatttttctcctaggtgaggaaaacaagtcaggcagctttgctggctctgttggagcaggagctcattgaacgatttgatgtggagaccaaagtgtgccctgtcctcatagagctgacagccccagatagcaatgatgatgtgaaaacagaagctgtggctgtaagtcaaatgccatttttccacttatgcaaaatgtggctgataagaggtgcttattaaaagtcaggccggggttaggcacggtggctcatgcctgtaattccagcactttgggaggccgaggtgggtggatcacttgaggtcaggagttggagaccagcctgggcaatatggtgacacctggctctgccaaaaaaatacaaaaattagccaggcatggtggtgtgcgcctgtagtccctgttacttgggaggctgaggcaggagaatcacttgaacctgggaggaggtggaggttgtagtgagccaagatcaggccactgcacttcagcctgggcgacagagcaagactccgcctcaaggaaaaaaaaaaaaattaggctgggctgggtgcagtggctcatgcctgtaatcccagcactttgggaggccaaggtgggaggatcacttgagaccaggggtttgagatcagcctggccaacatggcaaaaccccatctctactaaaaatacaaaaaaaattagccaggtgtggtggcacatgcttgtaatcccagctactctggaggctgaggcacgagaatcatttgaacctgggagacagaggttacagtgagccgaggtcattccactgcattccagccaggttgacagaacaagactctgtcttaaaaaaacaaaacaaaaaaaaaaaaagaaagaaagaaagaaagaaaaggctgctttctgttaaagttgccacaaatcattaaatttgaaatacaatcagggctagaaagggacataaaggcttacaaaggaaagtgtaccttctgcacacaatacgaaaaaatacataattgtaaattattatgtcaaagtggaaaactgaaatggttattttatcagtgcagttaaaattttaaaaaccctggactgaacgaagaaacacttgaaccccttcagtaggtattgaacacttttctaggcactgtgtaagcacagtggaaataaaataatactttgctcctgctctgamaggtatggtctttgtgggaaggatggtcaggcaagtacatttcccaggatatatgacatcagtgatggttatcagaagaatatacagattgttaagtcattacgcayatcataaagtcaaatgtaataggaagtttctgggtttttttttgacatggtttgcaaatattctgattacttgaaggccatgatagggcatgaattagtatagagtagtatctgttgtgattcacatctggttcctgagttcggatagtagtaattctcatggtaaattagaaaagtgataaattcgtctggaaatttattcatayctatttggatagtaagagttcactccttaagcctaaaataatatggttgcgtctttgttgatattttttaataatcacactatatttagtgcttctggatcatcagtaatgggatgaattagatgatctctctagtctctttcccttgaagaatttcttgaatctattatttttagatactcagttaccagttaataataaatttactttttcagtaatgtttttactgaagtgaaccttacatgacataaaatcattttagtgttagtggcatttaatatgttcacaaagttgtataaccaccacttcttcctagttccaaaacatcattatttcttttttcactttaggatttttgcaatgaaggaaatcagttttgggcttggcctaatttttggtttatattgagccgtttaacttgctgtattataattctcgatgcaatgtaaaattagtaaaacattacaataaaaaatttaaaaactatatccagtgctagtaggagtcttatgattctcttacagttgtgtttgttttttggtcatgttttatattccatggctcccatattttctctatcttaatagatagagaaataataattatttcttaataaaaattaatttcttaataaaaataattcatttttaaataaatttagttatgctacatcagtgatatacagcataactttggattgttaactagagcatggagatgcttattcaaaaaacaaaactggttttgggatttaggagatgtaggcgttatctctagttctgatgatggtgggattttcatggggatagtgttgaatctgtagatcaatttggagacaattgccagtttcacagtctatgaacatggtagatctatttatttaggtctttgatttatatctttaatcttttgtagttttcagcagaaagttcttgtgtgtattttgttcgatttcatattttttaaaagtacttctgtgagtgatactgttcttaaatgtttccagttcattgttcattgctaatttgtagaaatacaatagatttttatattctaatttatagcctacaaccttcctaaacatacttattctggtggcttctttgtagattccttctgattttctgtgtagacaaccatgtcgtatttgaatagagagaattttctttctttgcaatctgtatctcttttacttctttattttgtcctgtttgtacagtctagcaattgatacaattgataaatgacaacaggctatcccatttctttctgtattaactgtgggaacaatgtatctaaatagagggccagttttcaaataaagttaatcctcactttgcctsctattgtgttaactgaaacatgcctatatcagaactgtgttcatgctttccctggaactgaagctttgcaaaaccagracatggttctgatatgtatgagctttagttcacagggtgctttgcaaggcgaggactgaattttttcttagcaatacagatatgctaaatctagatctttcctggggatagttttccctttgaacagtcaccaattttttaaattgggaaaatgtaggtttttgtttgtttgtttgttttgcttttaaaattaccaggcaaaatgatgaagtagtagtaagatggaaactgtggacaaaaatgaaattgttaggattttctgtgggtttactgggcatgcagtatttattggttgtttttattgattgtggttaatatctgtctttgtttcctacttagataaataagatgaaattaataattggctatgaatgttttctgtcatgtatatagtataatgatgccatatcatattttatgtttcctcaaattatatacttttattatttaatttaactgaaagaggcttacttgatattttcagtgtgtgtttgttcttacttattttagataatgtgcaaaatggctcccatggttgggaaggatattacagagcgtcttatcctccctaggttttgtgagatgtgctgcgattgcagaatgtttcacgttcgaaaggtatttttttgtcgtttttyttctgctgtttaagaacatagttctagtggttaatgtactgatacatgatatttaaaagattatcttagaagaaccttatgtgtaatattttgaaatgtcaatgatgcttttgttgtcaggtctgtgctgccaattttggagatatttgcagtgtagttggccagcaagctactgaagaaatgttggtaagtattgcagatataaaggagtaaacagtgtgtgttacaaagtagtacataaagtttgaaatgcacacatttactccaaagttttattaacacaattccatgaatataaaccagaaagataattttgaatttaggagtttaaatatctgtaatctgggcatttgaattatctttttgatatttattaaaaatatggatatgtttcagaaccattgatctgttttcacctcttccatttctgttaagcaaatcaattcttacttattcaattgaacctttaattttattgcaaccctcaagaatgttgatgacatattaaatctatagcaagttagtttkaaatagtacacaagatgcctatacttgatgtataagtcaccatatctaaagagtttctgaagccatctcttatgcaaaataattaagttcaggggcaagctcttgtaaaacatttaagctatgattgttgggagtgcttttgcatagccagaaatattgcataagacaatccagtatgcttttgcatagccagaaatccgacggaccaaattatcagcactttttattaatttatcagtgatctttcatgttgggtagggttttgattatcacttttgtraaataatacatttctgtccgttttaaagcaaacataattttgactcataagaaataacttaaaatttaagatatattattatatgttatatatttataatttaagatacattattttttatacttttaggaatagacagtaaattagatgtgatttattgaaaattgttgagtataaatactaatagatcctactttttaagacaatccaacatttaaaacactgaggctgggcgtggtggctcacrcctgtaatcctagcactttgggaggccaaggcaggtggatcacctgaggtcaggagttcgagaccagcctggccaacatggtgaaccctcatttctactaaaaatacaaaaattagctgggcgtggtggcacacgtctgtaatcccagctacttgggaggctgaggcaggagaattgctggaacccaggaggtggagtttgcagtgagccaagatygcaccacctcactccagcctgggcaaaagagtgagactctgtctcaaaacaaacaaacaaacaaaagaagcgtgaaagcagaaaatgaaagcgaagtaactgatgaaatctgctatctttatccaactaacaagactctttccttttcacatagctgcccagatttttccagctttgttctgataatgtatggggagtccgaaaggcttgtgctgaatgcttcatggcggtttcatgtgcaacatgtcaagaaatccgacggaccaaattatcagcactttttattaatttgatcagtgatccttcacgttgggtagggttttgattatcacttttgtaaaataatacatttgtgtccgttttaaagcaaacataattttgacctcataagaaataacttataatttaagatatattattttttatacttttaggaatagacagtagaaagactactatattaacagtttgtgtgtttttttgtaacaggacaaaaatttctttacacatttaagtcctgttgatttttatttaattggcatgatgtattatgttaatttttagatgttaaaccacttgcatctttggaataagtcccacttggtcatagttgtataattctttttatatgtcgctggattcagtttgtcagtattttgttgagggtttttgtgtccatatcatgagagataatagtctgtagttttcttatggtgcctttgtctggtttgttgtcagagtaataatggcctcataaaatgagttaggaaatgttccctcctctactgtttttggggagagtttttgaagaattgttattgattatctcttaaatgtttggttgagttcagtggtgaagccgtctgggcctgggcttttctttgtagatagttgtaaaattcctaattctgtctcttcacttgttataggtctgttgtgtgtttttttcttgagtcagttttcatagtttgtatctttctaggaatttgtacatttcatctaagttacttaatttgttggtatatgattatacataggattcctttataatcttttaatttctgtaatgtcagtagtaatgcctcttctttcatttcctatttgagtaatttgagtcttgtctctgtttcttggccagtctgctaaaggtttgtcagcttcgttgatctttttacagaaccaacttttggtttcattggttttctctatttttctattattcattaatttccattttaatctttattctcccttctgcttgcttttagtttattttgcttctttttccagtgtctttaggcagaaggttaggttgtggattagaggtcttccttccttctttgaattatcatctggggtaaatggctttcaacccgaaaaactttatttagtatttcttgttaatgtggttctgcgaacaacaaattctgttttcatttatctgtgaatgtccttatttcaccttcaattttgaaagacagctttacttaatgtgagattgagtgtgttatgccactgcctcagacctcttctgtttctactgtgaagtcagcggttaatcatattggggttcccttgtaagtgatgtgtcatttttcgcttgttgctttctagatttttctccttgcctttgactttcagaatttttactgtgatgtgtccgtatgtgcacctcttttagtttatactacttggagttgagttgattgaacttcctagttatgtaagttacgtttttcaatacgtttgaaaagttttgagccaatgtttcttcaaatatttttccttctctcttctctccctctaatattcccattatgtatatgttaaatgtgcttaatgatggcccacatttctttgaggcccttttcatttttcctcaattttttccccctctctattctttggcttgcataatctctattgatctatcttcaatagaacaattatttgttctgccagttcagatctactgttgagctcatgtactgactttattttagtcattgcacttttcagctgtagaattccatctggttcttttttgtaatttctctttattgatgttatactctagttgatgcagcaccgtccccataactcccattacttctgtaatcatcatttcctttggttctgtgaacatgtttataatagctactttgaagtctttttttaagtctgaaatctgattgctctcacaatcagtttctgttgcctgtctcttttatccccctaatgtatggatttttttttttttgcctgccttgtaatgttttgttgagagttgaacattttagataatatgtgtagtttgatactggttgtcctcgctcccccatgggggcttgttactgttatttgcttgtttagtgactggctggaatgcttgagtgaagactatttccccactccaggaggtacagctttgggtctgcccacagccaccctggtatgacaggggcttagtgggtatggaagggcagcagcctgaggttcccttggcttctttctcctggtgaggaatcaccaccctgtgaggtagaccagtgccttttggggccccagccttttcagtgtgccacacccaaaggagggtggaagaaaggagcctcacccctcagctgctctcactcaggactggacctcagcatcaggtagctggagcgatgcagcctgtgcccgggagctgcgggagagcagaccccagtgtgcttggctacagcacactgctgtctccacctcacctcactggaggcgttacaaggagggaatggtcagctgggcgcggtggctcgcacctgtaatcccagcactttgggaggccgagacgggtggatcacgaggtcaggagatcaagaccatcctggctaacacggtgaaaccccgtctctactaacaaatacaaaaaattagccgggtgtggtggcgggcgcctgtagtcccagctactcaggaggctgaggcaggagaatggcgtgaacctgggaggcggagcttgcagtgagccgagatcgcgccattgcactccagcctgggcaatagagcgagactctgtctcaaaaaaaaaaaaaaaattagactctcagcttttttatgatgtatactacattttgtcagttttctttaattgttatcccttcaattgctgcttgctcctagggccatttccaggggctttgaattattgttttataattttcacttacttcactgagaagtgggtcagctgagctcctcacaccgtcatggcagagatcaatctcaggacctttgcatattcattcccaaaacaaaattgacatagagggcaagactcttaagccttgatattatattaatgtttttgttatatcctgtatcggcttgttagaaaagattaacatagcttactcaattttctttgtgaagctatgtatttggtcgttgttttggattggtaacatgcattagttcctgttaatttgagaatatggatatgtcagtcattttagagatatacagctgttccttggtatccatggaggattggttccaggaccccttgtggataccaaaatctgaggatactcagaagtctctgatacaaaatggcatagtatttgcatataacctatgcacatcctcctgtacactgtaaatcgtctctagattacttacatctaatacagcataaatgctatgtaagtaattgttactctattatttagggaataatgacaaggaaaaaagtctgtacttgttcaatacagacacaaccatcatgggtctaacaatgttttcaatgtgtagttggttgaatccacagaacctgtggatacagagggcaggctatatatgctgcacctgtctgagaaaaatgtgtatcttatgcctattttacacacacacacacacacacacacacacacacgtgtaaatcctatgcctatttaggtgcaaaaaaaagacaagatagtcttttgtccgaacaatgttaagccatttggggaaggttataatctactgtattgtcccttctcaaaagttaaaattgaattaaaagttaattttatttctgaaattcgttaatatttattctttgagtgacttgtgggttttttagtggtttccagaacctttgtttaaagtcattagttgtttatttcttaaagtcattgaaactagtaaaaataatagcttaaaatcactttattttgaggaatagctcaaagtagaaatatttttatagtgttggaaaattactcaattacaggcagtgggatgtgttggagagttaaaattggacttcagtcctgatttcattgtaactatagggtaacactgaagaagtcattttatttggatttcagtttctgtttttgtgaaatcaaggaggtagattaatagtaggatttaattaacttattagacactgtgatctctctcctccacattaaacttttttcattctaatctaacaacaagctaaactaatgatttagataaattaagttttctatgtcctttattgggaacaagctcagagatttaacagtattcagagaagattaaattcgtgcatacagcgttaaaagtgaccttttatccttttatggaagtaatgtttccataatgtttcgtaagtaagtgacttacgaaggggagaaaaacccttagtttacacacatacaagctattcttttccctctcatgcatataattctagcctttttaaaaaatcaattgagtcattttttatgtatgcttctccaagagtaggtaaatactaataatagatatctctacatttatttgcttttgtaaaaatcatgcttactatataattattatcttaaacttgaaaaaggtattattatgctttttttttttttttaaagaaaagaaatgctagccaggagcagtgactcacacctataatcctaacactttgggaggaggaggtgggaggattgcttgaggctaggagttcaagaccagtctgggcaacatagcaaggacttgtctctgcaaaaaaaatagaaaaattaactggatgtggtggcacatgcctatagtccccaactattcatgaggctgaggttggaagatcacttaagccaaggattttgaggctgcagtgagccatggtagcaccactgttttccagcctccacagcagagcaagagctgtctcaaaaggaaaaggaatgctaaacttcagggaaattggtgtgtggcaaagtcaaggttttagtaacataccagtttcccattgttgttgcctttgtccgattgtgtccatccttccataaaacctctcattttcaaatgttttaaaaattcctgattttaaaaataatacagaaatacgacatgaagtggaattctataacttctttatcacccctcctacatgagacagtcatcaagaacmatagtatatgcttcaagatctttgtgacatactttaagttaacattatgtttctggtacgtctgtcttgcttccttctagtgaacaaattaaagtctttcctacctgaaaacattaaatgtatttatcacattttgttggctttattgatttttatgttctttgtggcactcttggttttccttattctttttgttcttgagaacacagcaggaccttctttagttttgttctatgcaaatgtttcatagtatctcatacttagattatcatggttcaaacattcaagagaggataaaaacaattgaaagtaaaaaagagcaaataggggtttgtttggggttttttttttagacagtcttgctctgtcacccaggctggagtacagtggtgtgatcacggctcactacagacttagcctcatgggttcacgcgcttcttccacctcaggccctgccgagtagctgggaccacaggcatgcgccaccacgccctgctaactttggtattttttgtagagactggatttcgccatgttgcccaggctggtctcaaactgctggactcaagcgatctgcccagctcagcctcccagagtgctgggattacaggcatgagccactgcgcccagccagagaaaatagcttgtaagaatttttcartcctagctaaagttctgaatctgggcttcctttagaaaagcttcattattatcctaaacatacttcggcatttgaaagtagattattaaatatacataatgtgtgcgtatataattctttttcaaaatgattcctttattattgtcctttttatcttcctaggttcgccaagcagcttttcagtctctgggacctttcatatctacttttgctaatccatctagctcaggccagtattttaaagaagaaagcaaaagttcagaagagatgtcagtagaaaacaaaaataggtataattttgaaaccattttctaattttaaaaccttgttttctaattttactgcttttaaacattatttccactattctgcaacaaatgttattttttgatagtttgctatttctcttgaatataaaaattggtgaatatttttatagagctttactttaagcgcatttgtttgttaagtatctctttggttggttacatattgaatgagtagatgcatgtaacacaattagctagatgcctcgcacataggaaactctaaatggtagattatgacttttaaaaaatgtttatttagtacattatttatctagtcaatcattcattgatatctacaatatacagggtaattgttacacactgtgtagtatttgggtttttttaaatttgtttttaaggagtaaaacttaatttaggaatatgttttattgtccttttctgtcaaataatttagttgcgcatcttggattctttgtcaatggtgattgtaatctgtcagttaaaggagaaagccagtatattagccagtatatcagttttaagtatatcagtctcataaggaaaccaaagttttaaataaagcttaaagagtcggctgtgatttttatttttaaatgtttttgcattgaaaattttctattaaatttaaattttaaaaatttattataatatatatttaggggaaaaactaattcaagcctaacttactagtatgcgggaaatgtacacaaacttttacagttatgcacttgaagtaattttagtacaaatatttgaaacagtccctgctataatgcttgagttaccatagtgtcttttccctcccttgtcatgatgctaatggacattttcttctgtaggtcttgatactgtgctatttgctttcttggtgttttgatttggcagttcttctttcttctctgctgccttgttttacctttttgyccgttctcctactgtcctgctgaatagccaaacaaacctgaggtactgttttttgtaaaggaagaaaatcactcaaacctgtcttcctagcaagcaaagtctgtcagtttttttgaaaacaggtgctgccaggactttgacaaaagtgatgatggtgggtggggaatgttatctatttttcatttttgaaatcagcatacttaaaaaattacctgtttatactgaagactgttacataacttctgttttaaaatctgaaatgggtctagtaagaaactataaatttgcagagaactgtataggacgagctggtaaactttcttctgtttcacaactactcactcggcctttgcagtrtataagcagccgtagacattacataaatggacaagcttggctgtgttccagtaaaacttcactgacctcaacagtgtgcctatcaaggccatgtttgccgcctaccggtgtgtagcattactgcaatagctatttaaaggtagttcaattccttgattcttcttccattgtaatgaggtatgtcttaatgtccaggcaatactacttgtattgctgatcttcagtaatattagagcttattaaattatgttaatgatatggtaggggaaagagagcattcctggctaaggaaggagttatgttaaatattgtaaaagcttttgcatagtttgacaaactataaaraagtagtcctatatattattaaatctcagaaccattagtttgtttgccctcccttaaatagcacagtggcatttgttttaagctgtcttaaactgttgtggtattaagattgattgattgattatgcaaaagttaactgagcacctcctatgaaccagaaactgtaaatggaaagatagaacttcgttcctgtcctcaaagttctctcagtttcttagattcaggtttttcaaacaaatgtcttacaaagtaagcaagtttttggcaacatatttccaccactgtttattgtatagtgtttcatctgaccctagaaacatttactatcactttattactctttgaagcatttattgattccaaacatctgacttacacatcagatctttcactcaccctggatcaggctgttaatgcttctttgaaagtgctgataaagcctacttctcagaagcagagttgaaatactcaaatctgcattttaaaagtatgtaaaataagcattcgttatcacattgttctctgaatgcaccatgttctcttaattctccctgtttttgtacttgctgctctctgggaagcttcttgttccatccataccctcgtttaacaaagtgctgtcttagatgcactgagttgtccaggaagtacagagcttttgtcttcatcatcagtagcgctgtaatgagagcactattttaatcctatccttttggctacatattggcatctatcatccagtagcctcccggccatgcagtgtggcgtccagctcctccctttgtctccgctgggcctggcccgttggtgcacatattaatcctgaatgaattattctagggaaatatggatttgacctcaaaaatctgaagtaactaaaccacttttgctggatttttccagtttagcttaatgctaactatatgaaaaaaaattattagcacaaatttggaaatatttcatgaatgctaaaacttcattgagttaattcacagtacttggaaggtatcctggagcgtgtttgcttttatctcaggatacaatacctctttagccagatgttctacaagtcattttctccttgaaatacctgtaattaattttctaggcccatagtctctactaaggaactctgaagatattaattataaacttatgtaggcacaaaaagacacttaagattcctccttaagtaggtagtttctggactgtcctctggtgctcttgatacctacgtctcttaggagacaggataattcccattatacagagtcacaaagggcctcaattttcaaaaaaaaatttgtcttgtacaatagcatttcaaagtctgacaattaggaatatcagaattttagcattgaacagcttgattttgtattgactattatactttaccaggaaaaattagaatttagagaatttatactttcgacatttttgaagccatgcatgctgtagttctgtccacaatttaatactgtactagggaaactttgtcttctagtttccttttaaaaaaatcattctaagagttttaagtttggacaaactaacaagtttacatttatcagacaaacagttatttgaccagtcattctccgttcatttttgcagctgagaatattaaaatttaattttaacaccaaggtgagctagtgatcaaggaacttcaaggccctgtaattccatcactttaggaggctgaggcaggaggatcgcttcagcccaggagtttgaggctgcagtgagctatgatcataccactttacaccagcctgggctacagagcgagaccctgtctcttaaaaaaacaataaacaaaacagaagttcattgtatttattagatagtacatacgaggtcttacaagttttacccatttgctcttctcttccccctttctgaacaatatcttattataattttaaaattttagtttgaatgatttcagaaattttgcaaggatatcacaaagaacttcatatatccatgtagattttccaaatactgttttaccatatttgctttattctttttttctgaactctttgagaataagttttagacatgatattctttttacctttttaaaatactrtgtatttctttaaaacacagatgttaatatataactgtagtccagttaccaaaattaggaaattaacattgatacaatactgttagctaatctagcctttattgaattttaccaattggcccactaatgttctttataacaaaagggaaaaatacatattttttaatatggacaaaatgggaaatacataattcataaacatgtagaagacacatttattttgcataacagcactagcttcaggagctcctttggagtgggaaaacatcttacaggttatctaggccaactcctcatttttatgaataaggaataagtgaggaatcctagaagtccttaaaaggttcagaattttatattaacgtagtgccagtgcgagagtaagaacgttaaagtctgatttcttcacacttgtaaacaattgtattatatatgcatactgtatattttgtagttataagaagaaaaataccagaatttaaaatgcagtcacaatgtgttatgttttcagatgacttacgtatgtttttgttcatcagtattttaaaaaataatcacctgtttgtgaaaataatggttttgaaaacagcattatgatgagagggaacttcgtaatttcatgagaatgtagatggtgactgtttaagtgggagctcacataggcattaacatcaccctccttttgcacagtccttttaagtctcctgttaaacatcttttattgtgtgtatttaaaggcacacagatgctttttcctgtattcatcttacaaatttacctacatattcagccatccttatttccctttcatgtttcttgggaagcaagtctcttcactgtttaatctgttttgctgtgtttttgaagcccatattctttcctcttctcagaaagacattgctttatcagttatttcatcaatctctgtgtctccagttctttcatctcttctaacctattttcctcagcctaaaaatatgctcatcattcttttatacaggaaaaatgccttcactctttgttattctatgcagttgtgttattctttattaatacttgttgcctccgcatatgtcagccccacacatctttctgagttgatgacctccacctctgtctcagtctttacctctttctcatagataatcaccacctagaacccaacgtggatagctaactcaacctctttcaacctgaacctgttagctttcttgtgaaactgtttttgttacctgcagcatgcaataagtggaaaagtcctgttgatttttgctgctgtttgaatgtgttcttctgtagtcctggagacactgcctccatcagaacatcatcacttcttasctgcatgtctgtaattcctgcctcctatcttacctctcaactcattttctacacttcctccagaatggtctttctaaaacaacagatctattaacaatttccttactacatgatttcctgtagtccaggatgaactccggaggtctgctggtctggaatacagtggttcatgtgatatctttcatccttgtcatccatcatttcctcattgctgattcctgaatgcgtcacaccttttctgccactccggcctttgcatgtcctgtttctcctttagatgcttttttcttccccttagccccataaacatgtattggttcttctaagcacaactcatgtcatttccttgaaggccttttaatcttcactcccatctcctcctgtgttcagtgtgcttgcatctgtgcttaccaccctgtctagcagcaatttgctgatatatcttcattttttctgtttgcctctaattgtaatctcaagatcaagagctgcatctcattcacatttgaatcctcaatactgatttcatttcctggctcttagtaggtgctcaataaatgcctgttaaatttaattgaatcaaataataacacttacagtcgtacttcagataatagatggcagtaatcagtggactttaatgaatttgtaccatctgtccttatcaattaaattatgtcctcattttaggaaaaccttggggagtagagatgaatattttagaagaaacagaagtaatatttacactcaagcagattttaatatattttgtgagatagcaaataagtatctttcctactactatcttaaaattgtttttattttattttccttgtgtaatgtaagcaaataggctttaggtctcagctttgcaatatgtcgttggagtagagaggtaatacaaataaccctaaaaataaaataatttaaatgttgttatgtawcttaaaatgattgtaggaatttctgtttccactacttttctttagttatttattattgaaattagcatggtgttatagaatcccaggattcttaaatgttaccttctctaactaatatatattgcttgactatctagacttatacttaacaggtatttacatctttgaacacakaacagctgatggagaaagaagcattataaataatatacataaactcagtttgtacagataatccgtaatttttaatgtttaacttgtctaaatgctatatgtaatatctttcatcagtttttttaaagtaattatcctttcatattgtttttttcccaccaaataaaacaataaaaggaccagagatcaagaagccccagaggatgtacaagtcaggccagaggatactccttcagatctcagtgttagtaattccagtgtcatactggaaaacacgatggaagaccatgctgctgaggcatccgggaagcctctaggtgaaattagtgttccactggacagctctttactttgtactttgtcctcagaatctcaccaggaagcagctagtaatgagaatgataaaaaacctggtaactacaaatctatgttacgaccagaggttggcaccacttcacaagattcagctctcttagatcaggaattgtataactccttccatttctggaggactcctcttcctgaaatagatctagacrtagagcttgaacagaactctgggggaaaacccagcccagagggaccagaggaagaatctgagggccctgtgcccagttctccaaacatcaccatggccaccagaaaggaactggaagaaatgatagaaaatctagagccccacattgatgatccagatgttaaaggtatggaagtcaatcaagttatttattctgaaattgattaaaaatattagtgtctatcttaaaaaaatttcatttcagaaaaaattgtcatttaataatgtattatggactgggcacagtgactcatacctataataccagcactttgagaggttgagacaggargatcacttgagaccaggaggttgagaccagtctgggcaacatagtaagaccccatctctacaaaaaaataaaaaattagccgggcatggtggcacatgcttgtagtcctagcaacttgggaaactgaggtgggagatcgtttgagcttaggaggttgaggctgcactgagctgtaattgtgcctaagttcaaatggtgtcaaaggatcatgcagcagcttgctctgatagttctccagcctgggcaacagagtaagaccctgtctattaaaaaaagaaaaaggtagtataaccatcattatcatgtatttctaaattctcttgataaatacaattaatctgattttcaggaaattttttatttaaaataggctcatcgttgcattccttactgtaatttatacagatttgttgattgacaaatcactctctttgaaagtttcagtcattcaaacagtgctttacagttttaaagtttgggctctgccttaactattttgcacagagactcattacctttttataagatagcagtacacgcagtcattcttttatggaaagactatagaatgtttgtcgcactactgcactgcagcctgggcgacagcaagactctgtctcgggcrtgggggaggaaaagactatagaatgttcacagcaagcatagtcaacttttgataaatgtttaacgtctttacagcttccagctttctgtttaaatkttattatttaccaacttaagtttattaagtttatccaacttcaatgactccggttttcttcttttttttttttttttttctgagacggagtctcgctttgttgcccaggctggagttcagtggtgctcgatcttggctcacaacaacctctggttcaagcaattctcctgcctcagcttcccgagtagctgggattacaggcatgtgccactgcacccagctactttttttttttttttgagacagtctcactctgtcaccaggctggagtgtagtagtgccatctcagctcactgcaaccactgcctcctgggttcaagcgattctttggcctcaacctctcaagtagctgggactacaggcgtgcgccaccatgcccagctaatttttgtatttttagtagagacaggtttcaccatattggccaggctgatcttgaactcctgacctcaggtgatccgcctgccttggcctcccaccatgctgggattacaggtgtgaaccactgcgctcagcttattttatttttcttaaactatatttttatgaacaaaagattaccagttgtccttaagccggttctgggagctctcattgtattatagtacctgctagttctctgacatagactagtcacttaaatattaattgaaatattgaaagaactgctctaagtttttctttcagcaaataaatgcaaagaaatatgcatagattgctttctaaaaagacttacatgtacatacatacaagtttcttgatgtgactttgtgtttcagaagatatctaatactctttgtactgtaaatttactagctgcarttgagagacttcaatacaaataacagcataccttggagatactgctggttcagttccaaaccactgcaaaagagcaaatattgcaatagagtcacacaaatttgtggttttccagtgcataaaaccacaggtgcagtggcttgcacctgtaatctcagctacctgggaggctgaggcagaaggatagcttaaggccaagagtttgagaccagtttgggcaacatagcaagacccccatctctaaaaagattttgaatagtagctgggcatgattgcacactcctgtagtcccagccactctaaaggctgaggtgggagaattgagcctaggagtttaaggtttcagtagctatgattgcactactacactccagcctgggtgagagagtaagacccagtctcagaattttataaaagttgtgtttatactatactgtagtaagcatgtgatagcattttgtctaaaaraaaatgcacataccttcattgaaaaaatactaaaaaatgctgatgatcatctgagctttacacaagttgtagtctcattgctggtggagggtcttgcttcaatgttggtggatgctgactggtcagggcagtggttgctgaaggctggggtggctgtggcaatttctgaaaataaaacagcgtggaagcttgctgtgtcagttgactcttcctttcatgaaagatgtatccatagctagcaatggtgtttgttggcatattacctgcaggagacatctttaaaaattagagtcagtcttctcaaacaccaccactgctttatcaataggtttatgtaatattctagatcttttgttgtcatttcaacaatgttcacagcatcatcactaggaggagattccatcttgagaaaccactttctttgctcatcctaagaggcatttgttcaagtttggtcaggagagccggatatagtgaccatgtgcctgtaatcccarctgaggacaggaggattgcttgagaccaggagttcaaggctgtagtggttatgattgtgcctacatataaccactatactccagcctggacaacataacaagaccccatctctaaaattaaaacaacagaaaacgtttgattatgagattgtagcatttcactcacgttttcaagctccactcctaattttagttctcctgctatttttaccctacctacagttacttcctccactgaagtcttgaatccttcagtcatttatgagggttgaaattaccttcttccatactccctttaatgtggatattttgayctcctcccatgaatcgtgaatgctcctaatggcatctagagtggtgaatcctttccagaaggttttcagtttactttgtccagatccatcagagaaatcactatttatggcagctataactttacagaatgtattcctgaaataataagacttgaaagttgaaattaccccttgatccttgggctgcagaatgggtattgtgttagcaggtatgaaaacaacattgtctcctcatacgcctctatcagagctcttgggtgaccaggtgtattgtcagtgagcagtaataatttgaaaggaatatttttctaagccataggtctcaacagtgggcttaaagtactcggcaaaccttgctgtaaatagatctgctctcatccaggctttacttttccagtgacagagcacaggcagagtagatttagcctaattcttaagggccccaggatttttgagtaaatgagcattggttttaacgtgtgtgtgtgtgtgtgtgtgtgtgtgtgtgtgtgtgtcacagcgcctcactccgtcacccaggctggagtgcagtggtgcaatctcaactcgctgcaacctctgtctcccaagttcaagcgattctcctgcctcagcctcccgagtagctgggactacaggcatgcaccgccatgcctggctagttttttttgtttgtttgtttaatgggatttcaccatgctggccaggctggactcgcactcttcacctaaggtaatccacccacctcagcctcccaaagtgctgggattacaggcgtgagccaccactcctggcctggttttaacttaaagacatcagccacattagtccctaacaagagtcaccttggccttcggagctttgaagccaggcattgacttctctttagctaggaaagttctagatggcatcttcttccaatagaagactgttttatctgtgttgaaaatctgggccgggcgaggtggctcacgcctgtaatcccagaactttgggaggccgaggtgggtggatcatctgaggtcaggagtttgagaccagcctggccaacatggtgaaaccctgtctctactaataatacaaaaattaactgggcatgatggtccatgcctgtaattctagctgctagggaggctggggcaggagaattgctagaacccgggatgcaggggttgcagtgagccaagattgcaccactgtattccagcctgggtgacagagcaagactccatctcaaaaaaaaaaaawtttgttgtttggtgtagctaccttagtggcttaagtaatcttagctagatcttctgaataacttgctgcagctttacctaagcactggctgcttcaccttgcacttctatgttatggagatggctccattccttaaacctcatgaaccaacctctgctagctttcagcttttcttctcagattcctaacctctctcagcctttacagaattgaagccagttagggccttgctctgagttagacttcggcttaagagaacgttgtggctggtttgatttctgtccagaccactcaaactttctgcatatcagcaataatgttgttgttccttcttctttgtgtgttcactggagtagcactttgaatgtccttcaagaacttttccatctgcatttataacttggctaactggcacaagtgtcctagcttttgggctttcttggcttttgagatgccttccccactaagcttaatcatttctagctttggatttaaagtgagagacatgttattcttcctttcacttgaactcttaggggctactgttgggttattgattggcccaattttaatattgttgagtctcagggaatagggagacaggagagagatgggtaaagaaagtcggtagagctgtaagaacacacacatttatcatttaagtttgccgtcttgtatggctagttagcagctcccaaaacaattacaatagtaatatcaaagatcactgatcacagatcaccatagcggatatagcaataatgaaaaagattgaactagtmcaagaattaccaacatacaatacagaggcacagcgtaaacacatgctgttggaaaaatagcaccaatagacttgctaaatgtaagcttgccacagacctttagtttagaaaaagtacagttatcacgcccagcatggtggtgtgtgcctgtagtcccagccactcaggaggctgaggcagaaggattgcttgagcccaggggttcagtgcttcagtgagctatgatcatgccttgtgaatagctttctgcaagtaactccaacttgggcaaaatagtgggacctcacctctttaaagaaaaaaaaaaaagccaaagtgtagtatctacaaagtgcaataaaacaaagtatgcctgcactttccagggaacagaatggatgggggatgatacmcacacacacacacacacacacacacacacacacacaccatgcactttatatgggacaaaacattttaacctttctttcttgtacagtctattttgagtactgttttggtttggcttgggagtgatcccaaaagggagtggctgaagtgattaaaagggttggtgaaaattgcagccgaaattctgaagataatgaaaatattccactacaactttttgtgagtgaatatgttcarttttcttaagttagcaagtaatgacctaatagactagaacctcatcctgtatgttgcttgtgtgtctgttgtcaggcacttaatatacttagatgagaaattttataaatgctgcagcataatagattatcttaaaatagttactgattgttttgtttaaaatgtttgaatttaaaatgttcacattttgaacatccaagtggattgttacttggaataaatgctaagcaatattttttgctaaatttctgatttatttggggagcaggaagaatgccttatcttaattttgaatcacctttgtaagtaaggtgcaacccaaaacataggcaatgctagttgccagatttttgaaccactgcctggtaagttgtccttttggtttgctgcaagcaagacagtgctcatttgggattattgtgtttgggagaagatgcaattctcattttcaaaaagaattagagaaaaataagcagtaataagatatgagatgtttaaatgtaactgtgacaagaatctttgtaattgccattgttttatgttggcagggtttgtgtgactgctcttctgctaaaatagcttagtaagtaagacttgccagtttgattcatgcactaccaaaacatagttaacgtttactgaaattgactccttttaataagccggaggcagctccagcaactagatagcatttctcttttcatactaacgcagaataatgtacagtagcagataaacatttttaatctcatgaaagcatattagttttctactttttctcttgaaggactaatgatttaccacagtagaaatttttttccagctttttgattgcagtgtcaaaaaagtatatatttcattgataacgtacagtgcaaatggagaacagccttgtaagaatattgcaattgtgtttctcactttgtccatttccttattttgcctgtagcacaagtggaagtgctgtccgctgcactacgtgcttccagcctggatgcacatgaagagaccatcagtatagaaaagagaagtgatttgcaagatgaactggatataaatgagctaccaaattgtaaaataaatcaagaagattctgtgcctttaatcagcgatgctgttgaggtaacaaactcagtaaagtgtttaccaaatgagagtagtttgaatcagaagtctttcattggggaatagttgtagctaatcacttttagtttgtatgttctgtttgttgctgattttttagctcttcgttttgcataaagtaattgttttcatcacatcctgtcctcgtgacattagtgtcatatgaaatgcctggaaaagtaaatcccacttctgtctatatgaccatttagtagactcaatgttaatgtagctcactgcagtgaaatagtcttactggaaacaaagccctttatcaagaataattaactcttcccttttctttttggagaggtgctttgtttctgatcggaccatttcactgcagcaagcaacacagtattctgagcagaagatcgggacttgaggccatgttgcggagggccagtgacattatctggactctggagtgtgagggtgggtactgatcctagcatcatcttcactgtgtacttgtagctgttctctatgatccttccctaatttcctgctgcatctccatcaagccagcattatttggtatcagtgctgcttagccattgttkatacaaatggggagaaggaatgcaccaccgattgccagaatcgcatggtcacagatcatagtggcttgaatgagaagctcaggaaagagtacctgcacacactggggatggcaggagggttcttagagctttagtgcatttctgttttgatttctgttggatggcatgtggtatagttagaaatctgtataataccactgctttggattgaagccctgactatttattggagatttgaatagtattaatatatctgcattttagaaggtgtttatgttgttgttgttgttactgtttttggctgttaacatatatataatttgtgaaattagatattaacagccaagaatagaaatagaagaaaaactgcatatgacactccatggtctctaaaacaatggaccaaaagaatcctctcagtactatttcataaataagctaatttgagctgtttggaccatttcaaaattactttcaaatattgtttttaattactctaatttttctggaattggttttcgtacacttgacaacctattcagcaagttagatttaaagtagggtaggttcttargtatgtttataagcttttaaaaacatgaggaatttatatgtttattacttttggcagtcttgaaaggtaagtaacttagtaagatagcttaaatgaagatgtacagacaggacagctctttaagtagttattttttcctaacagaatatggactccactcttcactatattcacarcgattcagacttgagcaacaatagcagttttagccctgatgaggaaaggagaactaaagtacaagtaagtgaccaaaaaatgtgttcttttgtgggtgtgttcctaattcctcttttagagcccatttctgacctaatttgccccttctttatgatgagtgttctaaaaattgactagtgtgtcatattttccataaggaaatcgaagtagtagagagaggaacatggaagcacaaatcttcccttttctacctctgtgatcccattcttcattcagagtgaccacgatcacacaccttattatcttccttcatgtattttcatgggcacataaacatacacatgtgcctctttttatcattgaagacagctgtggtcatcccatcctacctaggtatttcctcttgttcacattgccaataattataaaatacagctcgatttcagagatgaaaatatgaaaaaatacgaaaattttaaagtgccatcagtaacaagctgcagggaaactgtgctcacggaatcattgaaatgtggtagctgtgccttgccttgctcttttcttttctcttctaacaatctgacctggtgacctctcctgtgagcacaccaggactccttcaccttcacagcagcacagcacagtgtccatgccacacccgtggtctccatcgtaagaaggcactgtgggagatgctactcgttgtagtttcactttgatgctataagcagtgctgcattcaccatgactgtctgtacgtgttgtttgcttctatgactttattattattattattattattattattattattattattagagatggagtctcactctgtcacccaggctagagtgcagtggcaccatctcagcttactgcagcctccgcctcctgggttcaagcagttctcctgcctcagcctcccaagtagctgggactacagttgcgagccaccatgcccagctaattttttgtgtttttagtagagacagtgtttcgccgtgttggccaggctggtcatgaactcctgacctcaagtgatccrcccacctcagcctcccaaaatgctgtgattacaggcatgagctaccgtgcccagccttaggattatattattattgttagaagtagatttcccagatcaaatggtatatttattttgttattgttgttagagatggggtctccgctctgtcacccaggctggagtgcagtggcgagatcacagctcactgcagcctcgaactcctgggctcaagcattcgatccttctgcctcagccccccaagtagctgggactacagatgtgcaccgccacatctagccaatttttactttatttactaaaaatgaaatcagyattcaaaacaatagtgttttgaaacatgcttttccccacttacagacattttcagtatttcaaatctcattttaatgagtttatttccattttcattttgtgtatatggataattcgtttatgtagctcaaaattcaagatacttaaaaggcattcagtgatgttcccytctcagttttttcttctccactcatccattttgcttcctgagatacaaccagttttacctttcttttatatccttccacagctatattatacacacctaagcaagattgcaaatatgttcttcttttcctcacatatatactaataattagacatgtgcacttcaattttctagaaataattgcttaaattttcatctaaagaagacaagtttttatttttgttttgagacagagtctcactctgtcgcccaggctggagtacagtggtgctatcccagctcactgcagcttccacctccctgggctcaagtgatcatcccacctcagcctcccgagtatctggaactacaggtgtgagccaccatacctggctgattttttaattttttgtagagacggggtttcaccatgttgcccaggctgggctcaagtgatccaccctccttggcttctcaaagtgctgggactacaggtgtgagccactgtgcctggctggtttttgtttttttaatgaacatgttgcaaatcacgcagagcacctgttattctgcatttgctgggttataacaaacattgtcatctctgcctacatttaaaaggctctggtgttattttaatatgtcttttcaatttagtaattaattctaattttcctttgagctgagatgttattcattgttctcctagagttgcttttatttgttcatatatgtttcccttagcatgtttttcgtatctcttagttattagatacctgaacatttgacattggtttttctcaactatttgagatgctatgttaaaatctatatatttaaaaataattttgcccaatttatgtctaaactgctcaaaatgcatctcagctgctcagtcactgtggtttctctttctccattaggatgttgtacctcaggcgttgttagatcagtatttatctatgactgacccttctcgtgcacagacggttgacactgaaattgctaagcactgtgcatatagcctccctggtgtggccttgacactcggaagacagaattggcactgcctgagagagacgtatgagactctggcctcagacatgcaggtgagtaaagcagttaaagaattagcagaacgtgcatgtggaaggcacagtgctttgctttttgtaacctaaagaatttctgttcatgttctagcatgttcttagtgttataggaaattatgtatggaagagcttaagagtaataacagagcatgttctttttgcagtgtcagagtcccacaatttggcttcttcatttttatctaaagcattagaaattgttatcacattcaacatgcctacattcctaacttaaaatgtattattatctagagtttatatgtaaattaattgttccgaatataggatttaatttttcacctagaaatagtattataaatgcttatttgatttgcacagtagatctgaaaatatttgttgaaaccgtagtagaactccagtattactagcacatgtgaagttctgggccctgcatgccttgagcattgcagtacagacaggagaagttccgtggttcttgctctctcctcatccccacacaccacccccaacccctttcaacagaacacacaaggtaaacccttgcttcacgtcattttgtctggacatctgtgacttttgtgtgacctcttcccaggcttgatgacctgacctcccctgccagggctgatttctgtataaacaaagtttgcccctctttgaacacacctgttccttcagtgaagttgatctctcagttatttaaaaaaaaaaaaaaaaagcagtctgattaggctaatttgtactgaaatgtgatgacttttccttaaacttcttagtaattgtattttycaaggaatcagtgctgttgactcagcaagttataagttggaagtaatcttgataggtcaagttcctcctttgacctatgaggttaggaaagcygggcccaggrgaagtgaatttatccttaaccaggacccagaagaagtgaatttatctgtgttcatatactttttaagtgctgcatctggtcatggaaccacaaaggcccaatttccatagagtgctttgtcctgtgtattcgtgttttcagtctttattctacagaactgtagggttcccgtgggatgtatctttcggggcacctgggtgactctgatggctcagaatctggatgggcagtttcttctctctgctgcccccctcttccatcagaacatctctgccttcatctgtcttatatgttgaacttgggcgtaaaattttatttcaagagtggattctggggggaagggaaaggaaatacartgtttgctctaaactgtttctctttaggtaaaattttaagttactatgtaaaaattttatgattaaggcaccatggagaaaaggatgtttttaacttaaaattattataaatgcaacacatttctgttgagggtttcttttccaaggctgtatgctgatttccctagtcttatatttcttaaattgccaattccttaaaaacaaattttattgttctgttttgtttttcttaatccaaggtttggctgtacaggaatctgaaggggaacagtaaaccggggagggtgctagagatcctttggtccatgtgcagcctcagtacgtcggcatgttctagcatgtgcttagtgctacaggaaattatgtatggaagagcttaggagtaataacaaagccatgtgcagcctcagtacgtcggcatgttctagcatgtgcttagtgctacaggaaattatgtatggaagagcttaggagtaataacagagcatgttcttcttgcactgtcagagccagggtccaatgttcagagagctacaaaaacttcacgattgctaagcattttctcctcataaatgaaaggaagataatacgtactaggcagggatttaaaatgtttctgttacacttttcgatgcataatttaggcatttaaagttagtatctgttattctgatttaattytttgaggttagtaacattcatatataaattagcctttgtatattgcctaatggttaaagtactgcgtactttgtggttagcttactaatgtgttttcatttctgcagtggaaagttcgacgaactctagcattctccatccacgagcttgcagttattcttggagatcaattgacagctgcagatctggttccaatttttaatggatttttaaaagacctcgatgaagtcaggataggtgttcttaaacacttgcatgattttctgaaggtaacttttaaatttttttgcataaaaacacaacaaaattctgccgtaatctaaatctttatcttctgctatcaccaagagaggtttctttgtgtttctatgtaagaaaacacagccataagttgatgttaagatgcaacttaaaaaagaaatggtcccataattatactctcacttttaaaacagtattagatgatagtttacagacatttgtatctttttctttttcaaaattattgagtgaaatgtatgttaaaaaaaatcattagctgcagtcatccctcagtacatgcaggaggattggttccaggtcccccatgcacacccaaatccatggagtactcctgtggaacctgcgtataggaaaagtctgccctccgtgtactccagtttcacatccgggaatactgtattttcaatctggttgggacaaacaattcaagtataagtggacccatgcagttcaaacccctgttgttgaaagtcaactgtgtattaagtttggaggctttgtgtggtatttcaggcgtcttgagaatttacgtttagccctcactactttgatagaggagctgtggtctccaaagtgaatagccctgattttttacaaattgtttactcctggagtactgttgttgtttttagactttagccttgaaattgactctggtaattctaaggcttgagtgatagaagtaattgtagtcctcccttttaaaaaacactgaggctgggcacagtggctcacgcctgtaatcccagcactttgggaggctgaggcgggcagatcacttgaggtcaggaggttgagaccagcctggccaacatggtgaaaccttgtctttactaaaatacaaaaaattagctgggcgtggtggtaggcacctgtnnnnnnnnnnnnnnnnnnnnnnnnnnnnnnnnnnnnnnnnnnnnnnnnnnnnnnnnnnnnnnnnnnnnnnnnnnnnnnnnnnnnnnnnnnnnnnnnnnnnnnnnnnnnnnnnnnnnnnnnnnnnnnnnnnnnnnnnnnnnnnnnnnnnnnnnnnnnnnnnnnnnnnnnnnnnnnnnnnnnnnnnnnnnnnnnnnnnnnnnnnnnnnnnnnnnnnnnnnnnnnnnnnnnnnnnnnnnnnnnnnnnnnnaccttgagtagctgtaactacaggtgcgtgccactaagcccggccgattttgtgtttttttgtttgtttgtttgtttgtttgttttagtagagatggggtttcaccgtgttggccaggatggtcttgatctcctgatcttgtgatccggccaccttggcctcccaaagtgctgggattacaggcgtgagccaccatgcctggcctaaaatttttctgattgtcccagtattgtcctttatagtttttctccgctcaattttgaatcccttaaagtgcatattaaatttaaatgttatctttctttagtcctcttaaatctaggtgtcactggcatttttgaggagtctaaaccagttgttttacagaattaccctcaatttgaatttacacaatttgattctgagtaagcggggtttttttgcagacatgttaacctgtgtaggttgtcatgtatttttctgaatgtgccacatcagggctaatgtggtgttggctcttcccatcattggtgacgagaaggctgacaactccattgtaaaatgaccttttaccttttgtggttaatagagaattggtgaggtgatactttagaactctgaatatctttttctctagagtccttcaccagtgctctcatatccaggcatctatacatggttcttacctgaatcagttaactgtgttggttgtgaaagagtgattttctattttcataattctttctgtttttttttaattaattaacttacttattttgagacagggtctcactctgttgcccaggctggagtgtaatgatgcaatcatggctcactgcagcctccacctctcccagctcagatgatcctcccacttctgcctcctgagtagctggggccacaggcgcaccaccacgcccaactgagttttgtattttttgtagggatagggtttcactatgttgcccacactggtcttgaactcctgggctcaagtgatctgccccgccttagcctcccaaagttctgggattacagatgtgagccactatgctgggccattccttctgtttttattaagtaacattcccatgtaaaaataacctgtgccttctctccttccccggtttcgaaagttattttagtattagtggggactctaggattttaaaaattcaacataatggaatccatttctgtcatttgttttgagcatcaaatttgactagtggagaccccttaaagctgcctcttgtgtcctttgatttgtcctttgatttttaagtgcatcaatactttcagtttcaactttccctttccctgtcccagcctggagtcagctatttctccaaggaactgtggtcctttttagtggagaatggtccttagaaactgagatccaggcactggaagtgctcattgctcctggcctgtcatttcttttaggtcttttcaggagatagtagctaggaggtgtagatagtagctaggaggtgtgatgcttttttttttaattaaattactaacttcatattgttatgaactgcttccaattcaataccgttttctctcttcactttatatatttttttctttttactcctggtaaaaagtctgttcttagtaacattaatgtgtaatatttagttgtggctgggcacagtggctcacacctgtaatcccagcactttgggaggccaaggcgagcggatcacctgaggtcaggagatcgagaccatcctggctaacacggtgaatccccgtctctactaaagatacaaaaaattagccgggcgtggtggcatgcgcctgtagtcccagctactcgggaggctgaggcaggagaatcgcttgaacctgggaggcggaggttgcagtgagccgagatcccgccactgcactccagcctggaccacagagtgagacactgtctcaaaaaaaaaaaaaaaaaattagttgtttgctgagttccacaacataaatgaaatagtttcagaattactccaccaataataattcccacatcaaatcaactacataatattcaggacttcctagcacattctgtccttagaacgtcccttgaagatgtatggtcaaagtagtcagttcacactttggcttttttccctgtgtgattgttttccatctgatgcacagttaggttggtttgcttccgtttataaacttacctttaaatatttatagagcagctattgggatacatttattttttttctctcaacaaatactgaatgcctactctgtgctgtcacagcgtcacacgcagggcttacacacgtggttaagagcataattactgccttaagcggggccatggcaacaaggatgtcatatgaataaagggggcaagccctgtaatcaggctgtgcccggggtactgtggggtttagcgtggctcattgataggcacaaggaacaaagatttccagacaagatggtgattcctgaaggcaaatggaattattcagggaaaaataaacttaataccaaattttaaaacacttaaatacagctactacatttcctcttcagaagaattaaccatattgcttacagtctgtttttwagcactytrgtaaaagaaatactgtctgtaccttgtcctggtaaatatttttattttgttactttagcttcttcatattgacaaaagaagagaatatctttatcaacttcaggagtttttggtgacagataatagtagaaattggcggtttcgagctgaactggctgagtaagttctaacagtttattagattatgttttggaggggtatatatttacttcatttttacattttctcagtttcttcattactttgtgtagatccaagtttctatgtggtattctagccctttaacgcttcctgtaataygtgtcttactgtcagtgaatttcctcagcttttttattttttcttgaaaatgtctttagttcatctttatattatttttatcatggtgaaatacacatagccaaatttgctgttgatgacatttagtccattcacagtgttgtggaaccattccctctatctagttctgaaatgttaacctcccgaaaagaaaaacccatgcccaataagcatctactatctatggatttgcctgttgcggacatttcatgcaagtggagtcatataacacatggccttttgtgcttggtttcttcatttaacaatgttttcagttgtcctccatattgtatcctctagctgaacctgccttcctttttgtggttgagtaatattccattgtatggatataccacattcgtttagggcattcatctgttgaggaacatttgggttgggggtgtggtcttttgtgaatagtgctgctaggaacgtttatgtacaagatttaatatttgaaatctgttttcagttcttttgaggtgaatttgcaaggccatatggtaattctgtgtttaatttcttgaggaactgccaaaacttttccacaacagctataccattttacattcccatcagcaatgtatgggagttccagtttctctgtctcctcactaacacctatttttctactaaattttaaaaatatttctaaattggccaaataataattgtgcatatttgtgaggtatgtaatgatgttgcaatacgtatcggatagtggtcagataagggcagttagcatatccatcactcgcttatcatttacagctgttctgatgggcttggaacagcacttcattgtggtatgatttgcatttccctaatgactaatgatgttgaacacttttccataagcctgtcaaccatttgtgtatattttgtggagaaatgtctatccaagtctgttgcacatttttaaattggattatcttaagttgtgttgttgagttgtaagagttctttatatattctggattatagacctcacctgcattttcaaatgatgtctttgctgagtatggaatgtggggctgacagtttgtctttcagtatattaaagatgccactccattgagttctggcttgcccacttctgactcaaaacacacgcctcctcttctgccatatagtgccggggtgtgagtccatctagtcagggtcaagctgggtttgcgttttgtgattgctgtggttacgttcagtgtacttggggcttcagtttttctcgctgtgggctgccactaccattgtcgtttgctgagggtggcagctggggtaccagtggtcttctagtgtgagtattccacccggcgtttagcggtacctgcacccctgcgtaatgggtgggacctcctatctgtgcttggtctcgggcaggacttcctacagctcctcctggaataaggagcattagttctcctctcccacagttgcagtatttttgctgggcccacagggtggacaggctttggggcccctccaccagcaggttaagccttttgctttgcacgagaaaagggcccagcagagtgcttgatgattcatggctgtcagtcagttgcttctgcctgctatgagacatctctcctgtttttcctgaccatctttcttgaagcacccatgggaggcaggtaccctgtggaagtcagaaggttgtctgggaatgtgagctccctgtgtcgggcacatctggctttgtttgagccaccccatgctcctgccagccaccatctggccctgggcagctgactgcaattcgagctgatttctccctgccmtgttaggtgctagcaggtgtcctgtccatccgggctctgctgaggggcagttctctttcccatcttgggaagttaggttgtttgtgtgctttgcaaccccagctctctgatgggctcaagaaaagatcttgaagtttatgtagctttttctactgtagggtcagtgacgttctttgcagttttctgtattctaagcagaaactggtcctatttggaatttktattttgaattttgtcagaaaataagtgtgtctctttgaggatgcatatttgtatacacaggtgcatttatcattgctgcataatctatattcatgttacagttgacttyctgcttattagaaatgtaaatcctcttgaacataaaatctgaaaggcaaaagtctcacatccaaggtatttcttcaaggccatcattgaagctttcaggttagcttggtagatgtcatgaaagtctcagggcccctcagatgtgatgggaaggttgctggaggacaccctccctctgttatccctagcaaatcccttccaggaaggctcctcagagcctcgacaggtacacagtggactccctccctctgcggggacttcttactgagaaacttgattgtagatggaagcttctcagcacattccaaactgtgaccatggatcagtgtgggccatgttccagttgaacatactaggaagtgctttgctctgtctcagtccccatggatgcagaactctacagcttttgttttccttacactctaaggaacttgaatagcatgtaagtgcatttccagatacacagagactggaggtaactgtacaggagaggtctgcttaatcactcctctttgcgtatgtttgagacaggtgctcagtaatccagtattacagatgatttaaatgggtaacctattttcatttgtctcgctgatttttaaacattgtctttttgtaattcctttttgtagacagctgattttacttctagagttatatagtcccagagatgtttatgactatttacgtcccattgctctgaatctgtgtgcagacaaagtttcttctgttcgttggatttcctacaagttggtatgtattgaacttttaaaattttagatcagcaaactctaagatcctagaatggaagctgttcctcatttctccatgctcaccctcccaggtcagcgagatggtgaagaagctgcacgcggcaacaccaccaacgttcggagtggacctcatcaatgagcttgtggagaactttggcagatgtcccaagtggtctggtcggcaagcctttgtctttgtctgccaggtaagcgaggccctgggcttacctgtttgtgagtttttctcctagaagaatgtcttctttaacttcctacctctctctcaccctcttccttactcttaaggaacagaaccttatagtagcctggctgtttataggatcatctgcccccattgttgggcatctggtggcccctctctcccagctagccaagcccctccttacactggcatgcaccacacacaccccacgtgcctgctgtatgtgcttgttccacaccacatgcctggtatgtgcgtgttctgctctgcacacattcagacgtgtgtatatgtacatttcacagtgcacatacatgcatgttcctcactgttcctcactgcatattacacaggcatacatacatgtaccccaccacacacatactgtgcacacatataccataccacggttcccactagagggtgctcatgtctgggacccagagcgcaggtgtgaaaatgaaacacctgtgaatgaacactctaggtctccgtagagcagtttaaaaactgtgtctgtccgtgtgggcagttaattatgtaatttttgatttgagttcccaagtacgtggaattttggttaaaaagcaataactaaaatttgtacctgtggtcactcagagattttgttagccagtagtcgagtttttggctacattgacagagaagcctagagcagctgtttctcttccccagactgtcattgaggatgactgccttcccatggaccagtttgctgtgcatctcatgccgcatctgctaaccttagcaaatgacagggttcctaacgtgcgagtgctgcttgcaaagacattaagacaaactctactagaaaaaggtaggtagtgactccactagaagaagcgtgtgagtagagaaggagstctgtggactgcactggatcagcagatatcaaagcagaagtattgtctgctcagagaaaataatctggtggaaggaaatactttagttgttccggtgattctcccaagagggcatggaagatgaaagggattttttaattagccctctactgttctagttggagtttatttatcggaagcatgtatcatttttatcatttaaaacttaggtttttttgtttgcttgatattttgagacggagtctcgccctgtcacccaggctggagtgcaatggtgcgatctcagctcactgtaacctctgccttccgggttcaagcaattcttctgcctcagcctccccagtagctgggattacaggtgcccgccaccacgcccagctaattttttgtatttttagtagagayggggtttcaccatgttggccaggccggtctcgaactcctgacctcatgtgatctgcctgcctcagcctcccaaagtgctgggattacaggcatgacccaccgtgcctgacctaaaacttagtttttaaacttgggtgttgtttttatgtacaaaccattgcctggcagcgtgccacttgcaatctgcagtatgggggctggtacctacctatgtttgctctcccttctgctttctcttcattaggcaagagacagatgccccatagtatttgttttgttggaaattataatctcttcaagattaaaggtggtttatttattttaatcgacccccccgccgcctgccgcccaaaacacctcataaatatagttgcacggatgaatgaagcacagaaagaagtttgtagtagatgtcaaagaataaggataaatgaatatttttttttctcctttttttttttttgtagttggtgtttggaagcatttttctttcactgctacttaatggctaagaagtgtgatgttttcatctatttattaatttaatattccttagctgtcattgaatatcatgagatttagtcttataaaaacaagataaatctcataactctttttattctggcactttttcttcctataacaaatcagtttggattactgtttatgtttcagtgtggcttgtttgtacttgtagaaatacccagtttaactgtttacactcgtacttgacggaactctgaagtgttccgttggactggtttcatctgtcctatgcacatgtcatttccagactatttcttggcctctgccagctgccaccaggaggctgtggagcagaccatcatggctcttcagatggaccgtgacagcgatgtcaagtattttgcaagcatccaccctgccagtaccaaaatctccgaagatgccatgagcacagcgtcctcaacctactagaaggcttgaatctcggtgtctttcctgcttccatgagagccgaggttcagtgggcattcgccacgcatgtgacctgggatagctttcgggggaggagagaccttcctctcctgcggacttcattgcaggtgcaagttgcctacacccaataccagggatttcaagagtcaagagaaagtacagtaaacactattatcttatcttgactttaaggggaaataatttctcagaggattataattgtcaccgaagccttaaatccttctgtcttcctgactgaatgaaacttgaattggcagagcattttccttatggaagggatgagattcccagagacctgcattgctttctcctggttttatttaacaatcgacaaatgaaattcttacagcctgaaggcagacgtgtgcccagatgtgaaagagaccttcagtatcagccctaactcttctctcccaggaaggacttgctgggctctgtggccagctgtccagcccagccctgtgtgtgaatcgtttgtgacgtgtgcaaatgggaaaggaggggtttttacatctcctaaaggacctgatgccaacacaagtaggattgacttaaactcttaagcgcagcatattgctgtacacatttacagaatggttgctgagtgtctgtgtctgattttttcatgctggtcatgacctgaaggaaatttattagacgtatwatgtatgtctggtgtttttaacttgatcatgatcagctctgaggtgcaacttcttcacatactgtacatacctgtgaccactcttgggagtgctgcagtctttaatcatgctgtttaaactgttgtggcacaagttctcttgtccaaataaaatttattaataagatctatagagagagatatatacacttttgattgttttctagatgtctaccaataaatgcaatttgtgacctgtattaatgatttaaagtggggaaactagattaaaatatttgtcttttaactagtttattagtttctctggaatctgcctgtgtccctgggtttgggttttgctcttggcagcagcaggtgcctcttgggtgctcctcctgctcctgcctgcagccctaagagcaggtgggtgccgagtgtctggcacagcttggatgccgcccactgaagacagcagaggggggttgtcttgaagctcccgagacacagtcaagcatctctgagcctcgatgtcttcgtcagtaaaatgggaattagtaaaacctgccctgtttctcacagggttgttttgcaggcaaatgagttcctgtgtgaaggtgcttttgtaaagtgctgcgtgtataaatgtttgatgttcctgtaagcctggtttgaaaaccttggcctgtcggagtcccctggtgcttctgtgagttttggttttatttagttagccagcagggactcctcagtaagtcaaaataagttcctttgaacttcagtgtgggatttgagaataggtgggctgcttcctgtctacactattacaaataagcctttggctgctgcttctcgcattataacccagatatttacacactgcaaatataagtgtaaacagattccactgggaaggatgttcaaatgaatagataaatgcataggtaatatgtgaagtgggtaatgggagtggggctggggagtagccgtggagggtgtggggtggtctccgaaggcctctgaaagcagcatcagcagagatcggaggaggacctggccgcttgatttagcctcgtgtgtgagctgcagattgtctgctattatcatatatttttggcccccagtatttcagttctgaaaattgcattagaatcatacactagtagcatttttttaaagcagtggctatgctaacatggtgtatttgggggtaaagaacttgaatttggctgggcacagtggctcacgcctgtaatcccagcactttgggaggccgaggcgggcggatcacgagatcaggagatcgagaccatcctggctaacacggcgaaaccccatctctactgaaaaaatacaaagaaattagccaggcgtggtggcgggcgcctgtagtcccagctgctcggaggctgaggcaggagaatggtgtgaacccgggaggtggagcttgcagtgagccgagatgatggcgtcactgcactccagcctgggcgacggagcgagagtccgtctcaaaaaataaataaataaaagaacttgaatttaagttgcgctatagcgcttgtaaagttaaaaatgcacaagccaattcccactgcagccttcgcacagcctgtcctaccaagactacacagcactgtaaaatacctcaatggcaatgaatacaaaagacacctgcattgacagctttcacatcctaccatcaaggcactcccagtgtgaagactttctaatggaattcagaataagattggagtgttacccatttcatttcaactcttagtagttgccaatgatgccttctgtagcggctctgaagaaggcgaggtgaggtaggcatgttcttggcagcaggagtcaacctgtatgcgacaggtgtcctgggtcctgtctcacgtgtggcctccacttacacaggatctcctaagggaggaagctgggattccaaaggcagtataaagccaagcacatgtggacagtcccccacgagatgaaagtggaaacagcaaaccaactagtattcacaacttctcctttcataatataaaaatgagtaagatggtaagctgtctttgagggtatttaatattgggtggctaatcttagacgatattctttgatatcgtaggacttgtgagtgacgaaggatgaagaggaaagccttactttctggaatagcttcttagtcactgcctaaagttcattctctgctcgcccccaatctccccagcaggcccttccacgtgggggtgtagttgacatggggccccactttctgcccggcctggcttgatctggggtcacagcactcatgagctctgctgtccctcgcctcttgggagaagcgtgcttgcgagcttgtgacagatggaagctcagtagtgagttcctccatccttccctgatttctcccaatctccagggaacagacttgctgctgggctgttggagggctggctcgaggagtagctacatttttggtcttggagatagttctgcgatgctttctagaactctcttaactccaagttggcaagtgttgagtcactgagaaagctgccatgccagcatcctgagaccctcttgtgatacagctgcctgggtgattcttcagcctcggggcgggcgtggcattggttcttctcagaggggaaggaaggtgttctctccaccccctggagttcagtaattgagtctgaaataaactgacagtaggcaggttaacagaagagcttagatgaatttttcacgtgcatgggagcatcacactgaagagccgatacctccaaacccagtgagatggagaagcttctgtactccctcacaggggacagggaaggggatgggggcaacttaggggagggtaaatgaacttagccctcggaagaacaggtgacaccgcaacagagtatccaggtgtgacgtgtgagccttcggttccctggtggatgaggttcccccgggaggggttcatggcagttgaggtccttctggaggatctgtctttgggcatatgaagatgtccagagaaagcccctcccagcatttgccattccacaactcccctcagttcagtgcagcatagattgaggtggcatttcctgaactcctttgctgtcatacctggtttgttcaggtcccatgtttgttgttataggggtgacttatttctgggggagctggtgccaaaacaccagctgtgcttagtgtggggaggaagggccaggcaggtgcttggtgggcagcacagggcaggcaggggcttcggggagggcagcaaggctgtaaactgccttcaggaactgggacatgtttctgtggagggttccagaaggagatgaaaagcaatgagccagcaagagggaaagtcccagcaactcaaagccaagcaaatggcctctttttttttttttgggacagagtctcgctctgtcgcccaggctggagtgcagtggcgagatctcggctcactgcaggctccgcctcccgggttcactccattctcctgcctcagcctcccgagtagctgggactgcaggcgcccgccaccacgcccggctaattttctgtatttttttttagtagagacggggtttcaccgtgttagccaggatggtctcgatctcctgactttgtgatccgcccacctcggcctcccaaagtgctgggattacaggcgtgagccaccgtgccccgccgcaaatggcatctttaatcctctgactcaaacgagagaagaaacaactgagtctggaaataaatgtgtaaaaaatggtgtatgttgctgtgttttctgattcctgcctcaagcctttccaagctggatgtggacctgcaaaaacagggccccagggggggatggcagggtccagggagggtgcaggcctttcctgcacgtgtgtgcatgtggggtgcatgtgtgtagtgtgcacacgtgttcatgtgtggtggggggcgtggtgtggagtgcatgtgtgtggagtgtgttcgtgtgcagtgtgggggggtggtgtgttatgtgtggagtgcctgtgtgtagagtgtgtggtgtgtgtgggggtggtttttaagtgacctggagggctcagggcctagggagtgaatgtgtctttttctcactagaaaaccagttcctggtgtaggtgagggtgggagggaagcccagctctcactttcctctaccagaaattccaaaatggaggtaattttgtgatctgaatatggcagttttgaccatgagaatattttgactaaacaaaaattccaaccataaatttttatgaaaggtattttgtgcagtgagctctactaagccagtttaattctttatccattttctatagggatttaataactaactatgtgtgtgtgtgcgttttgagacatatagtctcactctgttgcccaggctggagtgcagtagtgcgatctcagctcactgcgacctctgccgcctgggttcatgcaactcctgcctcagcctcctgagtagctgggattacaggtgcctgccactacgcctggctaatttgtgtgtgtgtgtgtgtgtgtatatatattttttaatttttttagtagagacagggtttctgaccttaggtgatcacgccatgccttggtgtccacaaaggtcctgggatttacaggtgtgagacaccacagccggccaacagttttagttttatcttatagaaattattttcggtaagaattctttttctggccgggcgcagtggctcacgcctgtaatcccagcactttgtgaggccgaggcgggcggatcacgaggtcaggagattgagatcatcctggctaacacggtgaaaccccgtctctactaaaaaatacaaaaacaattagccgggcgtggtggcagtcacctgtagtcccagctacgcgggaggctgtggcaggagaatggcgtgaacctgggaggcggagcttgcagtgagctgagatcgagatcgcgccactgcactccagcctgggggacagagcgagactccgtctcaaaaaaaataattctttaattcttttcctagaaaacttgacaaatgatcaataatccactttcagtccatgtgatgttttgcagcatggctatgagtttaatttctaccatgtctttcttttagggcaaattttgctgatttagagttgacaagattacttgcagtttttagtaattttaccatgattatttcaccccatctgctttttagtgttaatattaccaataattgttgctagttggatacaagacagctactgagtagtattttcagtagttccatgggaagagccaccacctcgccagaggctcctgagccgcgtttgggtgcgggcccacattgtcctgctgttcccaatccccaggagatgcccggccktggacaggagagcgcaagctggtcctccagcaccgtgaggaattcagcgtggacaagaggaagttccgcagggaacatcccacaggcagatgctgaggggagggagagggagccaggagggcatccacaaggaaaggggagccctagcaagctcaggctagaataggggcttgtcccactggctgggcaaaaggccaagggataacaggggtggacactgtaagactgctggcccaccttcctggatggtcatttactgagattttcctggtttttctgttgtagcttttaagtatctagtgaaatgttgttggacatttagaaagtttccttttttttttttttttttgagatggagtctcactctgttgcccaggtgggagtgcagaggcacaatctcggctcactgcaacctctgcctcccgggttcaatcaattctcctgcctcagcctcctgagtagctaggattagaggtgcacggtgccgcgcctggctaattaatttttgtattttcagtagagacagggtttcaccatgttggccaggttggtctcgatctctggacctcgtgatccacccgcctcagcctcccataagtgctgggattacaggcatgagccaccgcacccggcctggtgcctgttttccaaaagttaacatgtggctaagtcacctggggacttggttcaaatgcagattcagattccataggtctggggtggggccaagagacctggccttcctgagactgaagccataatgcagtctgttggtgtaggattttatctttgccacgttaaactctttgcataattttgatatcttaacccacaatgatcagagattttaaacatttaatatttatattttacttccttggctgcaaatcagcacttccaaactctacatgtcaaagcccacatgaccactagtggtcgtcatggcttgtggtggtcacggcttgtgggggtcacagcttgtggctgtagtggctgctgcggcatcactgccaccctggrggcagccagggtcagtcatggacagggcacagctgccccagacccatccgcttggctcagtcttttactagcaagccgtgtccctttgcgagtggtaggtggcctgcagggatcagtaggaggctgtacgcttgattggtgaatctccccacaattttaatttgaggcaaagagccaaaccttgtcaatgctgag

SEQ ID NO: 95712 - DNA, 12968 bp, Homo sapiens
ccaggctgggcaacagagtgagactccatctcaaaaaataaataagtaaaaaaaaaaaaaattttagcgtacagactaaattattgattttagataatataattatttgttcattaatggatggctattaacagcaactttattataattaatgtaataattgaaatatactcaaaagatgtaaaattgtacctggaagatacggaaatgtgttcattaagtaaattgatatagttagatttgtagtgagttcagagttaacactggaatttaaaaaacaggtttgttgagatctaatttatatccataaaattgtttcattttaagtatataattcattgacttttaatacacttgctataagttgtgaaaccatccccacattcaaatcttagaacatttctatcagctgcccccgaaaagatattttttaacaaaaaaaaagaaaaatatcacatgatatatttgaatgtgtaaactgccgaagttatattggtatgaaagccacactggtgacattaacgttttctaaaatgtttcttttgtgaactccggagggaagttactctcactgtagtcaccagacaatagagatgtcctgtttaaatgcaattattgtctccgtttagcacatggtaaggccagcattggagaaaagacgcatattctagccacgttcacccagacacatagtttctgtaataatgagatcactgtattccatttttaacgtcattgtatgcatagaggttttacaataattactctattatcctgaaaataatatcagggactcttgtatggcagctaaatcagagtttaaaaccacagaaaagtttaatctcacattgaatgctacatagataaaatatcaatagtcaccatcagggattggtgtgggggataggacctctagtctgtctccacagactcagtctgtatctcagaaattatttctcctacttttgtatctttgccacaggaatagtttctactccagaggaatctcctttttcagatgtgagcactcacagagacccagcatactcctgtttcccttacatacagactctgcctcacatactaaaatagaaaatactcatctgatttcttcttactgccaggactttgggcttagtatgatgtcctagtgtgtgtagggggagggagccagccagtctctgagttatgagtttgtcatttgagataccatcttttcatagaactacaatggtcaattcaccatgagtgcatgcttgcttctgaaaaacttttcattaccaattatcagaaacaacttcaagttcctaatgaacatcaccaaagagatatttggagtgttatgtagaggccgttctatttccaagatccgtgaagacagactgtggctcttatggaggaagcagaaaatgctgaggtctgaacacctgatggacagtaatgctgaaaatctttgtatttgcctattgggtttgtggatctgcttcagtgaaatgttcttaaatatctttgcctttttctaattcatttttaatagactttttaaacagcagttttaggtttacaacaaaattaagtggaaggtagagatttcccatatacactgtacccccacgcaaggacagcctcccccattattaacaacccaccagagtggtacatttgttacaatcaatgaacctccattgacgtatcattatcacccaaagttcatgtttacattaaggttcacttttgtgttgtatagtctgagtctggacaaatgtatgaagccatgtattcaccatcatggtatcatataaggtacttttactgtcctcaaaatcctctgtgctccacctagattgtcttccttctttcagttctatcacttgtttcacacgttttgcagctctctgtcctatattgtcaattattcccaattaattatcaccctcctatgaaattatacaactctgccctttgatatcaggcatggcccttgacttgaggcaatgcttcaagtcaaggattgaaattccttgcccaatttatgataggcttggctttgtgaattccttggccaatttggtgtgagtagagatgacatgtttcaatttttaaaaatatttttttttaaataagaaactatcaataagttggagaaactgtcaacttatttgttgattgtccgtgtcaattttctctaattaatttataatcatttagactattttcagctccttaaaaaattgtttctcatgggtatgtcctttggttgatataagccaccttcctcaagtaggtcaatgtcattcttgtagcttttttctttattcttaggcttattgcaggaatgatataaaattctttgctcagagaaaataactaaaactcccccaaaggcagttgactcaccagagttctcgaatgacttggaaatcggtaaaatgcagattcccaggctgcatcaagcccagctgaattcatctggacagtgtttttgttttcaacagttttactgagatgcagctgatacatagttatgcaccgcataacaatattttggtcaataaaggactgcatatataatggtggtcccattagaatactgtatttttaccataccatttccatgtttggacatgtttagatacacaaataccatggtgttacaattgcctatgataacatgctgtccccatttgtagcctaggatcaacagtctatatggtgaaaccctgtctctactaaaaatacaaaaattagtcgggcatggtggtgtgtgcctgtagtcccagctgctcaggaggctgaggcaggagaatcgaaccatggaagtggaggttgcagtgagccgagtctattgtaaattattgtaaaaagtctatatggtttagcctaggtgtgtagtaggcgatcccatgtagctttgtgtaagtacaccctatgacgttagcacaatgatgaaatcaacaaatttctcagcacacatcctcatcattaggtgacccatgactgtgctataaaaggctgcacatattgagggtgaggtcagcttggggccccacttgctcagggggcaggctctacccagacagctggcacccctcagctatatgcatccatccttaggcagggaaaactcaagagtcatctctactccctgctgtgcgcaaccctttgagtacctggttctgccaagaaagctacaaaattgtgcggctccagggcagcaactcgtggatcatgctcccgaggcctggtgagagaaacttgcctgtttgaatttaaatggaagctagaagaggcttcatttgcttcttctaaccctctcttttctctgctactaatatggtatgtcctgatagagactgaatcttaccctgaatcccagcatcgcattgtggaactaagtgctgaataataatagttctgaggaagaaataaacgtttgttcttgcaagcctctgagaattcaaagatatttgctaccacattacaacttccagaaagctgaaagtacactttcaatgacctgttttttctttactcaccttaaccttccaaatccacagttacagatagtagctcattatctccactacttgtacgaactttgaaatctgcatttgagaattttcttcatatgattactttcttcctttccgttttatatgttttacttccattagaataaccatttattttaggctgggcgcagtggctcacacctgtaatcccagcgctttggatttgtgctttggcgggcagattacaaggtcaggagtttgagaccagcctggctaacatggtgaaaccctgtctctattaaagatacaaaaaattagctgggcatggtggcacacgcctataatcccagctactccggaggctggggcagaagaatcacttgaacccgggaagcagaggttgcagtgagccaagatggcaccattgcactccaccctgggtgacagtgcgagactccgtctcaaaaaaagaaaaaaaaaccatttatttttaattcatctagaaatatattaccttttattatgtgaccaccctcaatgaactatttgttctctcacttataactttacccaattggtttatcatcatcagatatttgtaaatatcttcaagaaacttgccctctttcaccctgcctccttcaccttactaatcatcagaatcagacatgctcagttactgactatggtccccttacaatcaggaagttcacattgatgacaaaacaaaaacaaaaagaaaaccccaagcaaacaaacaaattaaaaaaaacctctagctctactaaaaatacaaaaaatagccctctccctctccctctccctctttctccctctccctctccccacggtctccctctccctctctttccatggtctccctctgatgccgagctgaagctggacggtactgctgccatctcagctcactgcaacctccctgcctgattctcctgcctcagcctgcccagtgcctgcgattgcaggcgcgcgccgccacgcctgactggttttcgtatttttttggtggagacggggtttcgctgcgttggccgggctggtctccagctcctagccgcgagtgatccgccagcctccgcctcccgaggtgccgggattgcagacggagtctggttcactcagtgctcaatggtgcccaggctggagtgcagtggcgtgatctcggctcgctacaacctccacctcccagccgcctgccttggcctcccaaagtgccgagactgcagcctctgcccggccaccaccccgtctgggaagtgaggagcgtctctgcctggccgcccatcgtctgggacatgacgagcccctctgcctggctgtccagtctggaaagtgaggagcgtctctgcccagccacccatcgtctgagatgtggggagcgcctctgccccgccgccccatctgggatgtgaggagcacctctaaccggccgcgaccccgtctgggaggtgaggagcgtctctgcccggccgccccgtctgagaagtgaggagcccctccgcccggcagccaacctgtctgggaagtgaggagcgtctccgcctggcagccacctcgtccgggaaggaggtgggggggtcagccccccgcctggccagccgccctgtccgggaggtgaggggcgcctctgcccggccgcccctactgggaagtgaggagcccctctgcccggccaccaccccgtctgggaggtgtacccaacagctcattgagaacgggccatgatgacaatggcggttttgtggaatagaaagcggggaaaggtggggaaaagattgagaaatcggatggttaccgtgtctgtgtagaaagaagtagacatgggagacttttcattttgttctgtactgagaaaaattcttatcctgttgatctggaaccttacccccaaccccgtgctctctgaaacatgtgctgtgtccactcagggttaaatggattaagggcggtgcaaggtgtgctttgttaaacagatgcttgaaggcagcatgctccttaagagtcatcaccactccctaatctcaagtacccagggacacaaacactgcggaaggccgcagggtcctctgcctaggaaaaccagagacctttgttcacttgtttatctgctgaccttccctccactattgtcctatgaccctgccaaatccccctctgcgaggaacacccaagaatgatcaataaaaaaaataaaaataaaaataaaaaaataaaaaaaaaaacctctaggcttaggggctttgtgttaaatgcgagttacaataaaattgccgatgttcatccaagggtgctgtttcccaatgtgtcatacggcaacagaaaatgtcttccaactggggtgtttagaccacttccttttaaagtgattattatatggttaaactatcttggtattgattttatgtttttgcctttgttctttcttctcttttctttcgttgccttgggttttgttttgttttgtttatgtagactggaagtccatattttatttctctagtgacatatttacagttcaatataaattaaaggcctgcttgtatgccaaatccaggtcccttgggtggttcagtcaaaggggtargacctccagctggctcacaagaraagcgtccactccttggcccaggttttgggattttgccagccttgagctcatcaataatttcttcaatatccytagctgtcaaatcytcatagtaattgtcatttatttgaaccattggtgcgttcacacaggcccctaaacattccacttctacaagagtgaaaagtttgtcaggtgtastctccccaagctttattccaagctttttctgaatggcctccagtatgctgtcagagtttggaagcatgcagggtgtagtagtgcagrcctgaatgtgatactttycractggctttcgattatacattgtataaaaagttgctacttcatatactctyattggaggtacttgtaaaacttctgcaaccttgttcatagcagagatgggcaaccacccattctgcctttgggctaaatccaggactggaagaacagctgctgctttatggccttctggatagtttttwacaattgcctctatcctcttatagttttctggtgtgaaatcaaatggagtatcagggttattctcaggagtatctctgtgcacaaataaagctcctccagctccattttgcatagctgtcttatgcaattcctcacatgtcttccggtggggctgcagcggcctccctaagagggctaaggccgtagtgtccttgccgccgcctgcaggcccgtgtagagcccagggctctcctgcgcccaaaactaagggagacacggagagcaagagaagggcggcggcagcgccgggctcagcttgagcctccttacccagtgggcggtraggccagcsgcccgggcccggagcgccgcggagaaggcctttgggtttttaagtggctctcttccaattccttttttggctttagtgttaacgataaccaaatttttagcatttgctttaggggggttatactatacagcttatcacagcctaccttccagtgattccatacgacttcatgtaaagcatcagatccttacccatgtatactttcatttcacaactgttggtgtgtgtgctgtcattatcatacatctaacttttagataacctacaagtggctccagggcagcaactcatggatcatgctcccgaggcagattgttattttctaaacagttacattttaaagagatttaaacggaagaaatacgtttaaaaattacccatgtggggccgggtgcgttggctcacgcctgtaatcccagcactttgggaggccgaggcgggcggatcacgtgaggtcaggagttcgagaccagcctgaccaacaaggagaaaccctgtctctactaaaaatacaaaattagccgggcatgctggcgcaggcctgtaatcccagctactcgggaggctgaggcaggagaatcgctggaacccgggaggcggaggttgtggtgagccgagatcgcaccgttccattccagcctgggcagcaaaagcgaaactccgtctcaaaaacaaaaaacgaaaaacaaaaacaaaaacaaaacaaacaaaaaaattacccatgtggttactatttctggcactcctcattcttttgtgtagatcatgtgttacgaaacacaagtcaaatatgaattactgagagaggaggcagggcttggactccagaccagattgaaaactagctgaaacagggaagaggcaaaagcacctctccataagacacgccccccattgccatgtcagtttaccactgccatcgcaacacctggaagtgaccacccctttccaccgcaatgacctggaagtgaccacacccgttctagaaatttctgaataacctgccccttagtttgcatgtaattaaaagtgggcataaatatgactgcagacctgcctctgagctgctactttgagcacactccttttggggtagccgtgccctgcaaggagccgttcatctgctgctgctrttgccgccgctccaataaaagttgctaccccactttgggaggctggggcgggtggatcacctgaggtcaggagtttgagaccagcctgaccaacatggtgaaggcccgcccccatctctactaaatatgcaaaaattagctgggcgtggtggcacaagcctgtgatcccagctactcaagaggctgaagcaggagaatcgcctgaacctggaaggcagaggttgcagtgagctgaggtagcgccattgcactccaggctgggcaacaagagcaaaactccgtctcgggggggggtgggggggaggtgctacccactaccagttcacccttgaattatttcctgagcgaatccccagtctgggggctcacctgccctgcatcatcaccatctgtttttaaataatgtttacttggaacatggccaaacccacgtgtaggtactattgatccattaaaggcagagtagggtatttgcaaccgtatagcctgcaaagaataaaataccacttggccctttaaagtttgtcgatttctcatgtagagtcatattctcttttttcttttgagaccgagtcttgcttttgtcgcccagactggagtgcagtggtgtgatctcggctcactgcaacctccatctcctgggttcaagtgattctcctgcctcagcctcccgagtagctgggattacgggtgctcaccagaacgcccggctaatttttgtatttttagtagacatgggatttcactatgttggccaggctagtctcgaactcctgacctcaggtgatccacccgcctcggcctcccaaagtgctgggattgcaggcgtgagccaccgcgcctggctgagagtcatattttcatcacatatctgaattacaataaagttggggcaataaagcgtacagtcagttttgtaatccagtgtaaggggaacacaaggtttctcctaattggaaaagaataactggtaggtcttttcccttataccagggaaaacataggaaatacgtgattgtgttgctatttgatttgaaactacagtaatggctgggcgcagtggctcaggcctgtaatcctggcactttgggaggccgaggcgggtggatcacctgaggtcaggagttcgagaccagcccaaccaacatggggaaaccccatttctactaaaaatacaaaaaattagccgggcgtggtggtgcatgcctgtaaccacagctactcagagaattgcttgaacctgggaggcggaggttgcggtgagccaaaatcgcaccactgcactccagcatgggcaacaagagcgaaactccatctcaaaaaaaaaaaaaaaaaaaaaaaaaaaaaaaaaaaaaaaaaaaaaaaaaaaagaaagaaagaaactacggtattttatgtgaaaataatttttgatgacattgacagtaaagataaaaactggggcttaaaaactccactaattttacttgacatgcattcataagaggaagtagcaacatacccctaagtggccccaggggtagatggcagaggtgtgtatcctaacaagtctttgcagaactggtatcatcaaatctctcagacagttttgacaaatggtatttactatcttttcattaactcattacctcaccctacccccacgtctccccagcagctgagaggctcctgtaaataaatttgtctgtgcattccacaaataggtcatcatgattctggatccacacttgtatcttaacccctctaggaaaagaattgttacaagaatcaacgtgcaaaaatataaacagtttatataggtgttttgacttttaggtcccccgaaataaaaaaattgtgaaccataagaagtctcaaattttaaatgtctccaacagatatgatcacacacctcaccaagccacgcgctgattgtggatattcctcaatcattataaacatgttcccatcctgacaattttctccatttcctctgcccaattatttttccccatttgtatctatatgacagagtccaattactgattttgctcaaatatcatcttatcctatgggtatttcctgaacagtttaaattaggacatcctgtcactctgtcactacatgtacactttgttgaacttatcctcctattataattattgctgacttacccgtatagaacataagatacttgagagcagggaactggttcagtttcttgctagatcatcaatgattagaataatccctgagagcagggactctgtgcatttgtattgaatgaatgaatgaacgaatgaacgaatgcatttttttcgatgcaaagaagaaagttactgcaatgcataggctcgtagattagcaggtcataattctacttttattcccacattttgtatctcaggcaacatgaactaaatagatccacctcagcagtggaaaaaggttttcatgaagtttttctaagccatgaaaatggaagattcactctcaaatgctgcattctattcccagtgaaaaataacaatcttatytgtcaggtagaaaaatttttgtaacgacaatctgaaaaacagggactaaaaaacaagtaggaagtttatctttctcacataatagcaagtccggaggctgcagtttgggatgtggcagatcctcttgagaagtccattctgcctactctacctccatcagcactcagccttccttctccttgaggagaatgcagatggctggtgtatgactgagaagggtataggataaggggcaaaaccattttcattttgaggctttgtcttgtttacctgaaaacaatatttccatatttttttcccaaagaatattaattctgttaaatggctactgtaattttaatgaagaacggggattttcaaatttcatattcacacatcaaaaacagaggaagagaaagaaacaattaagttagaaagccaggaacagtggctcatgcctgtaatcccagcactttgggaggctgaggttggaggatcgtttgagcttgagcacaggagttcaagaccagcctgagcaacacagtgagacctcatctctacaaaaaaattaaaaagttagccaggtgtagtggcaacacctgtggtcccaggtactcgggaggctgaggtgggaggatcatttgagcccaggaggttgaggctacaacaagctgtgatcacactactgcactgcagcctgggctggacagagggacaccctttctcaaacaacagcaacaacaaaacccacaaacatgttgcagaccaaatacctgttaccaattatattaatgacaacgtggtcaccataattttgggaagagccagattacattaactgactttgttctttatcatgagagtctaatattatatatagcctatcgcctgtcttttgggtgttcaaaaagaaagacaaaaattattaaacgtccttactgtttttttttaacttacagatttacttctattgagctctatttgtatctaaataaaaatatttctccaagttttaatatattctaattccactatcaaggtaggaaaatgaatttgagatttaaaaaaaaattcatgccctcttaccttaaagtgagagaggtaaacacttccaaatgtattttcatattagactataaccgaaaggtaatctgttatatcataacttggggattttcagagggagcctatatttccaatgaagcattaaagaccttcacaggatttccttgcatatatagaatatactcaattgagggtgaacatttaaaatgtttaaggctatatttgttccaaaaaatgaataatcccatcttgttttagttttcaatttgtttagtttccctttttattcgttgcttttccacatgtaaaatatttttgtctctaaagtcaaaattatattacaaatatatgaaaatccctattctgttttgccttctcaaactttttattttcttaaataggtttcttgataggtattaatttcagattttttttatcacaaagagaataccatatatgatattctataccttgttttttaggtatggtggtgatcactccaatatgactttcctcattctttttttttctttttttttttttgagatggagtctcactccgttgcccaggctggagtgcagtggcgcgatctcggctcatgcaacctctgcctcccgggttcaagcgattctcctgcctcagccaccagagtagctgggattacaggcatgcgccaccatgcccagctaatttttctatttttagtagagacgggatttcaccatgttggtcaggttggtctcgaactcctgaccttgttgtgatctgcccacctctgcctcccaaagtgctgggattacaggcatgagccaccgcgcccagccctgactttcctcattcttttaacagcttcacatacatagccaacattcccctaatttctcagccaccttgcctcaagttaaaaccatgagaccggttttgccaaacagggtgtaagtgtaatgtatcactttcaggccaaaccacttaaaactaagtgtgaccttcttgcttgtttcctttgcaataatcagaggcccatttttgagatagagaaaccataatatggaagcccctccatctctgagttaccacataagcatcagttgccctacagggtcaactatcccagtggtgcaattgacagaaaagactcattttatacagtaagcttccaggatttaacaaaaaaggttttgtatctccgggcaccacaggacatgccattccttacaagacttttaaaagcaaagcctagacagctttagcaataccctctttcttgacaaactgttagagatctaggcctgaagggcaaggaaaggacaataaagtctgtctttctacatcat

SEQ ID NO: 95713 - DNA, 94903 bp, Homo sapiens
gattgcgcctctgcactccagcctgggcgacagagggagaccctgtctcaaaaaaaaacaaaacaaaacaaaacaaaacaaaacaaaacaaaaacactaaatatttcctcagtggaacatatgaatattcacattaagtggcataatgattataaatagctttctgtctattcaggtcaggttttgccactaaagaagttcaaatcaggtcagatcttgctgctaaataaattataaaaagccttccatttttaggtttcctggaatttgaattgtagctaaggatttatggaccagtatgaggaaaaaattggaacaaacttaaatagacatcattaggaaaaaggattttaaaaggtgaggccaagttatatgataaaatattacacagcagtgaaaatgaataaacttgagccacatgtatcattatggaaatatcttataaaaataatgtcaggagaaagcaagttgcagaacggtatatttatgataagtaaggataggccaggttttctgtattaaaaatagcccttggcctggcgcggtggctcatgcctataattccagcactttgggcggccgaggcgggcagatcacttgaggtcaggagttggagaccagcatggccaagatggtgaaaccctgtctctactaaaaatacaataattagctgagcatggtggtgcacgcctgtagtcccagctacttgggaggctgaggcaggagaatcacttgaacccaggaggcagaggttgcaatgagttgagatcatgccactgcactccagcctgggcaacagagcaagacttgtctcaaaaaaaaaaagcccctatatctcagaggctttatttattgctcatgctacgtgtcattgttggcaaaatggagttgggagcatctcctcctcattctggaacttagctggtgggtggctgctctgaacaacattgatggttatttgatagaaggaaaagtagagggaaggatgcaccggctttttttatttttattttttttcttgagacggagttttgttctttattgcccaggctggagtccagtggcacgatctcagctcactacaacctccgcctcctgggttcaagtgattctcctgtctcagtctcccgagtagctgggattacaggtgcccaccaccacacctggctaatttttgtatttttagtagagacggggtttcaccatgttggccaggctggtctcaaactcttgacctcaggtgacctgcccatctcagccttccaaagtgctgggattacaggcatgagccaccatgccctgccggattgttttctttatgtgtgtgatttcagccagcctgcaattgggtgttgacaagcacaagaggcccaacctgtgctctcccgagatttcaccaaggacctccctttctttaggccactcccctgcgctaaaaccttcaagggctctctatggctcagaggaaaaagttaagaatagtgatggctcccatggattgagcacttcctacatatcaggccctttatagagatactatttgtaatctgtgcacaatcctagaaagaaggaactgtctgatctccattttacagatgcggaaatggaggttccgagaggtgaagtgacttgccaagatgacagagtgagggcagggaggaaggaagactggcagccagatccatctaattccagggcccatgctgagccacagggtcagacctcactcttccagcctcacccctcacctctttcttttccttggcaggactagctgctccaaccaggcaggcctcttctcactgccccttgagcaaacctgtctcaatgtcccttcaaagaccatctagaatctcacagaacaccttttcctactgccagccatgctgagtcctgcccttatgacagtgtccctcagttagtcactttcctgtagctcatatgtcactaggctgcaagaatgtcttagtcatctttgcatctgccatgcccagcacacagtcactgcacacctgtcgtccttcaacaattattcagcgcctactggctgctgagcactgtgctaggtgcaaggatacagcagagagtgaaaccaaatccctgctctcgtgaagtttacattctgatctgggagaagaaaatgaacaagtaaacgcgtacatgtatagtagaatgtcaggggataaaaagtgctatggagaaaaatcaagctgaggaaggctatggatagagagtgctgggatggggagaagaaagctactttagaggaaaggtctttttgagacggtaacatttgagcagagattagaatacagtgagtttgtctgaggagctgaatagtcaaatgaatatataatgaatacatgctttagtgagttggaaacctaacttggagatgaaaaagtagtgtggaggaaggagtttgaggtagggatccctggatactcctgacatacttctttttcttccatttaaaaacataaactgccggaggcggtggctcatgcctgtaatcccagcactttgggaggtcgaggcaggcagattacctgaggtcaggagttcgagaccagtctgaccaacatggtgaaaccctgtctctactaaaaatgcaaaattagccgggcatggtggcgtatgcctgtaatcccagctacttgggaggctgaggcaggagaatctcttgaacctggaaggcgaaggttgcggtgagcagacaatgtgccattgcactgcagcctgggcaacaagagcgaaactccactgaaacaaacaaacagacaaaaaccataaccagtttatttatttatttttgagacggagtcttgctctgtcgcccaggctggagtgcagtggtatgatctcagctcattgcaacctccacctccagagttcaagcgattcttgtgcctcagcctcccaaatagctgggattacaggctgcctgacaccgtgcctggctaatttttgtattttgcattttttttttgaggtggagtctcactctgttgtccaggctggagtgcaatggcacgattttggctcactgcaacctctgcctctgcctcccaggttcaagcaatcctcctgcctcagcctcccgagtagctgggattacaggcacgtgccaccacgcccagctaatttttgtatgttttagtagagatggggtttcatgttgttggccaggctggtctcaaactcttcacctcaagtgatctgcctgcctcggcctcccaaagtggtggggttacaggcgtgagccactgtacccggcctaaaacataaccaatttattttgatgccttgttatttcagataggtcagaaatagagactgatcattggtacatagtttaaatgtaggaaggtttctctttctctgtctatccagaacagacyggatgttacagaatgttatggtataattgttaattctcttagtattactgtggttttgaaggataatgtaattttccttaggatttgctactgaagtattaaggcatgaagtactagtaaggcaacaacttacttttttttattgtttttttgagtcagggtctcactctgtctcccaggctggagtgcagtggcgctatcttggctcactgcaacctccacctcctgggcttaagagatcctcccacctcagcctcccaagtagctgggactataggcacaygtcatcacgcccagctaattcttttgtattttttgtggaaatggagttttgccatgttggccagactgatctcaaactcctgagctcaagcgatccatctgcctttgcctcccaaagtgctgggattacaggtgtaatcgcccagcctacctttaaatatttagcaaaaaataaaaattttcaacatatgaatatagatacatacatgtggaaaaatgataacaatgatcaaatccaggtggggagtgtacagatgtttcttgtactattctttcaacttttctgtatgtttgaaaatgtttcatagatacgagggttgggaggggccattgtgtgggccaacaaaaactatttgcaagttagatgattccggctagtctgggatttctggtccagggccttacctgcactatttcatcgaatccacatcacatccccgtggggtgggcagcactgggtccgattcacaggtgatgaatagagaagctcagagaggtaagtgactttcccagagtcacacagccaggagatgccaagccgagatttgaactcacatctatctgagtcaaaattctctgctttcctttttgatcgtttaagcctcttctcttccaccataccattctccaggggtattgaattaggtgacagctaagcactcttactatgtgcactttgcatgtattacttaaatcctcgcaacaacctgatgaggttgctaataacctcctccattttaccgaggcacagagagtttaacttgcgtgaggtcacacagctaacaatggaaaagctgggagtcagagaacctgggcagtgtggctctagactccccacttaaaggatcaaagaaacactgtaaaaagtagaaatcactttaggaatataaatcagaattattgttgattctcacagaatccctgcaaagtcctctcccctccccactgcttctggcattccaagacagtaccctagtttcagatatgtctacacagggacactggcctcctcagtccagctccttgaggctactgcttcttgccataaatttctaggactgttcattgccttctgaggtcctttgagctgatgctgatctgaaagcatttttttggatatggtccyatacccaggtgatggggataggataccgatttgcctgcaggataagaattagaggycatacagactgctgagacagttacaacctagaggtcaagggcctgacatgggagacaggccagttttgatttaagcccttactgcaaggcttgggtgaattgcctttccatctagaaacctcagtttcctcatttgtatgatagtaataataacagcacacatctcaagactggtgggggaatttcatggcatgagtgaagtccatgtttctcagcagaagtctagagacattgacaattgttatcattatgctatttctgatacagtaggatccctgactacagctccaagctcatccctatttccccccctacttcactggattttatccatgttggccttggattcaactcgggggcagatcagcccttttcctacctcagggcctttacacctgctgttccccctggtatgactgctttttccccagcttattcaaaaaagctggcgctttctcacccttttatatctcagttcgtgtcactgctcagtgaggccttccttgaccactccagcctgcctgcaatacatcctcctgttttatcgtattcatatgtgttaccagtacctgatattactagctgatttgtttcttttatctctcacataatgtaagtttcaagtagacagagatttttatcgttttttttctctgtagcatgcccagcgccaacaactgtgtctggcattcaataaataaatggtgaattgaatgaatgaatgaatgaatgaatgagggtgtataccaggccgaacccccaagccttgcagtccccactcttctgctgcagtgggcaacgagatgagtcagactttgtagatggccccttggcccccgagatgggggacgagctagcgcggagcacttgggagacattccccgaaagcctgggcggtggccgcactgggagagggtctgtcgccatttggcgattactccatgcgggctgctgtgggcgccgagcgagggtcggcggcgagcgcaagcgcgcgggtcttttgcgacggtgcccggcggcactggccccgcctcccgcgcgtgcgccccgcctccgcccccgccgctgcgcccgctcggggccgctctggcccccgcccgcttcatgtggcccggcccgcgacggccggcggctgggagcggcgaggcggcggcggcggcgagtggcggcccgcgaggcccgggaggcggtggccgaggcccaggcggtggcggcggcggcccaggaggcggcggacggggagctgcgggagcaggcccggcctggctctctagcggccgcctggctgcagcatgcgcgcccgccgggggctgctgcggctgccgcgccgctcgctgctcgccgcgctcttcttcttttctctctcgtcctcgctgctgtacttcgtctatgtggcgcccggcataggtaggaagggggcttgggaccgcggcggctgccgctctggccttgagggacccggggaatccccgcccctccctaaggggccccggccgggaggcggccctgagcctggtcctccgaagactccggagtcctggcccggctctcggggacgccaggacattcctgccctccgcaccccaacaggcgcccgggatccctctcccgcgccagcctccggcccaccccgcccctcctaacgccaccctcgcgaacccgactgtaccttcacgcccgccccttgctccggaacccccttcccgctcttgcctcgctggaactcccacttcccgctcctctgctcgagaactcccgcttccccttcccttccccggggtctcctcgaacccccattcccggcattccccgcaccccagtcccccgcggcgcgcccgctcttcgccgagcccatgtgcccgggtcccaggccgccccaccttctagctcccatccatcctcccccactccccatgactccatcgtttyctgctcccgtgagccccctccctcccctttcttcctctacttcccctattacatccacctccaggtcctcctccctaactcacgttcacctcttcagtggcctgatctctctgcctgccggtggcaccccccttccccttacagaggtccacccccattcaatctcctgctaatcccctgagcgtcccatgcctcttccccatctcccccccccccacctcgcgtacccacaagggcacatccttgtcacctttgcccccagccccccagactttcagccacagcttctttctcaactgaagacctggggaaggggtgctgtctgtgttctttcttccacttctgcyctctcctagccttgagggtagatggtgtggttcttcagtattggatagtgcctgctctgyggacaaaggagaagtttaaattgtccgtagagaaggggatatgattggggcctttgggaaatggtaccaggtgagaagggggagcatggaggaaagatgtaatgggtactccttcttttcaaagtcttatcctttaaaggaaaggcggtctctggagaaactgaccctcccacccctcccccgcctgccccaagcatagtcttttataagaccacagggcaccagttaggacaggaagagatcagaaggaaagacagcatgaaggttaagagcggaggacacagaggtcagacttggattccaatctctgccctgtatgaccttgggcaggttactaagcctttgcatttctcctctgtaaaatgggaatgtgagtcccaatctcatacagtgttaaggatggaagtagatacatgttctttaaaagcacttaccactgtacctggtgcttgaagagttttaaaaataagtaaataaaggcagctattacatgtaacttccaggaagaagggagttaggtggaacgcttaaggaatgtgtttgcctgacttggcatcactatgaggaaacctcagtttatggtgaaaaatgatcagaagatgctgctggggtaggggcagggagagtaaattctgctagaaaaattttggattatatggattttaggaaagggttgatggtttagctgtagggaaatgccttttaggattgtagcaataactagtgccattctctgttgacctgtcaacgcagaactagctgaatagagaaatttccagatagagcaggagatcgtctcctgattattttttaagcatattttacttgtggttaatgttgatgttttgaactatcaactagatctgggaagatagaacaggcagcatcagattgccttgtttacaaagtgtcatcacgaaaagtgttcctctaggaaggcataatatgtggcctgatggatttgatgagtagattgtaaaagggttgggattctggcagaacaagaagagataactaattagtggaattaactgagaaaagagttcattagcatgttggctattagactctaataaaaatgggtgtgaaaagatgggatttggacctagaggcagtcttagagccataatcctttttttctccttttgtgaaagtgacaggtacttctggtctgagtccataaatcagctatatctaaatggaaaactatatcccactgggatggtaatcacccttttgatagaaaggttagaagccagattcttcaacagaaatggaacttatcaatttaattaagattcctcaacagtagatttttaggtcagtggaacccctgtgtaaagcgatgtgctactgccatgcctagaatcctatatcactgatagctgaaaaagaggcagagcacttacattttcattagtactgtatccccttgaatgtaagccttctgaaggggaattctacttaggatggaaattttgttygtgagaaaggggaacaataaaaaaaggatgtggagtagttacatttagctgtttgcccttcctactaatttttttttttttttttgatagagagtctctgttgcccaggctgtcrtgcagtgatgctcatagcttactgcagccttgatctcctgggcacaagggatcctcctccctcagcctcctgagtagctgggactccaggtacatgccaccctgcctggctaacttttaaaacagttttttgtagagacaggatctcactatgatgcacaggctctgttgaacttaaatttttagaatgtctagctttggacagtggggcggcaaattttttcaaggttaaggcaatctggagaaatagaaggttgttttgtgttccttgggttatgaagaccttatttgaatagttattaaaatgagcttagaaaataatactaggttggctgggtgyggtggctcacacctgtaatcccagcactttgggaggctaaggtgggtggatcatgaggtcaggagttcaagtccagcctatccaagatggtgaaaccctgtcagtactaaaaatacaaaaattagccgggcgtggtggcaggtgcctgtaatcccagctactcaggaggctgaggcaggagaatcacttgaacccaggaggcagaggttgctgtgagccgagattgcgccattgcactccagcctgggtgatagagtgagactctgtctcatacacacacacacacacaaaaaaaaaaaaaagagagagaaaataacagaaaataacattaggttgagccatatgaaatttctgtttttgcaggtcaaaaacagttgtatatcagcagtttcatgtagttcactttaataaatttcccaatgacaattctgttttctggcacagtggaattattggacttatatttccttctaggtttaactttttccagtgcttgcttttgatttgctttgtataccctgtggctacattgtgctcaagggctagagatatcatcactccaagagattcagaaatagtagacttgaatttgaaataagaaaaatcatgtagctataaatgttatgaattgtccatgtatactgtaacccagccaaaatttcagcctaaccattaacttagtatttttgagctctaatgccacttaatgtgggtgacccgtattctaagagcaaaggaaacttttcttggacttgagagtcatccgtgaaatggggtaccatctcacatagaaaattggatatgaggaaaattactaaataagactattaatagtgtgtttgcaaaaaatataaaatgccctcagctactataataataccatttgatccatttaatgttttaaaaatacgacttcgttggaattttttttttttttttgagacggagtttcgctcttttgcccaggctggagtgaaatggtgtgatctcagctcactgcaacctctgccccccaggttcaaaggattctcctgcttcagcctccagaatagctgggattataggcgcttgccaccactggctaatttttgtatttttagtagagatggggttttaccatgttggccaggttcgtctcgaactcccgacctcaagtgatccacccacctcagtctcccaaagtgctaggattacaggcgtgagccaccgtgcctggccgggagttgtgtttgtattgttaattttggaagtagtgttttatatcagcaatttaaaaggagaaggttgggacagaaagtgagagagtgaaagagagaaagtggtggatttgataaggagcaaggtaataatgttgcataaaaatgtgatgtcccttctcttcaaccctctaccctctggcctttatgattctcatttatttaatcacttgttttatttgcaatgttgaaatatccctattcccttcagggttctgcagaaaacttttgaayttatttatgacctgttaacttaaaaaaaaatccgagagctcagagtacttccgtactccagtctgatcaggtcttttaaaagataacagaagcgagctatttataaatatacatatgaggtgctgatttaaaatcttaataagtttatggtaccatcatatggcaaggttgtgtagaggttactgaccttagcaaattgtcgaaacagttatcggtttcaagagaggtgcctgtgcatggttaggggtaattgtttatgcattgatgamtttttttttttttttttgagatggagtctcgctctgttgcccaggctagagtgcagtggcgcaatctcagctcactgcaacctccgcctcctgggttcaagcaattctcctgcctcagcctcctgagttgctgggattacgggcacctgccaccacacccggctaatttttgatggggtttcaccatgttggtcaggctggtcttgaactcctgacctcgtggtctgcccaccttggcctcccatagtgctgggattacagacatgagccattgcgcctggccgatgacattttattaattgaaattctgttctacatttaaactaatttttctctttccttgattactgaagaaaagagatggggaatgattttgacatttttggcctgcttagttccaagagaaatttgatttatggctggcttttggaaggcaggagccagtaattctaatcttacctgatttgatcgaatgaccttgagcaagtgacttgatttcaatgatctgatactttcaaaaaatcccaaagccctttgaaaaactagaactgcatcttagtcaatcttttagagaatttttaagaaatcatacctcaataaagctagtgagatgctttcatatatagaawgttgataattcatttacattctacataaacattggtcctaagattttaatttatttttatcttactattttttgagatgaagtctctcgctctgtcacccaggctggagtgcagtggtatgatcttggctcactgcaacctctgcctcctgggttcaagtgatcctcctgcctcagcttcccaagtagctgggattacaggcgcctgccaccatgcccagctatttttttttttttttttgtatttttagtagagacggggttttaccatgttggccaggcaggctggtctcaaacttctgacctcagatgatacgcccaccaaagcctcccaaagtgctgggattagaggtgtgagccaccgtgcccggccattcctaagattttagacaaaaaaaaaaaaaaaaggctgggcaaggtggctcatgcctttaatcccggcactctgggaagccaagatgggcggattccttgtgtccaggagttcaagacgatcctgggcaacatagtgaaacctcgtctctactaaaaatacaaaaaaattagttggatgtggtgcctgcctgtaatcccagctactcgggaggctgaggtcagaagatcacctgagcctgggaggtcgaggctgcaatgagccatgattgaaccactgcactctgtctgggtacccagagtgagaccctgtctccaaacaacgattttagagaagatacatgttttatataatcaaatacaacttttcctaataaccacatgaaaatttcagattttccccattcaagtgtagtctgaaaatagccttttttttttcttgacatgaaaaagccctctgaatccctcagcacactcagtttctgagctttctagaatgaaatacatatggggaaatatgggttacttcacttcagagaattaaagagccttatcccgtgaaggacaccttttttttttgctccaaatccacatgcactcttgcgcacatatttgagtatagtgttgtcccttcttcttaggaggaagccgtgtttggagaacaggttgatgttacaaaagtaaacagcaccacttttgaccaggactttggtgatgttttatgttctctttgtggagtttttgctatattggaagccaggtcttgggtttggagttgaaattttctttagtagaaagaaagtggttggttttggatagtctcagccattcaaacagtattaattactgttccaggatacctagccggcagatgattctgttccagcatcaactccccccgccccagctgaacaggccagtgggagccttgtataataatcaccaggaaggaggggctctgtgttgccatgcctctttagagctctctgagagagcagaaattccaaagcagcagaaggccagaatacaattgacttcttgcttccctaaattttgctgctttttagatcttggaagtatgttcggcacatctaatcacataaggyaaagaaaaaccttagcacgtaagaagtgagcaatgtaatgctgctgaggcctgtcagagaaatagagaaaaagggaggttaccactggctaagacaaacagataatcgtaagcaagcaggttgggtgtgggctgaagagaagaggcaggcctatgtgcactgtggggaaaagggcagttgttcttcactttctagtagccaataaaggtrtgcttgcctttgcacacgagttatgttttgtagaaaattgtgaggaaaaattaatgggattttaagatccacttaaaatcctggagctacccaggtacccagcatttgagtgtcatgttatcagttatgggagatctttgaattctaaacttttgactacatctgtcaatttatagatgatcatataagtcaagttgagtcattaacttgcccaaagttgagaattattaagatattcctgaagcacatacaatgtggttgaaaagagatctgggttcagatcagcttggagtgggcagattcattttgttttcaaatagaggatactacctttctcaggctacttgtcagaattaagtagaatatgcacataaaagggcttagcacagagcttgacacaaaggtccttatgtttatgattttttttttttttttgagayggagtttcgctctcttgttgcccagactggagttctatggtgcgatcttggctcactgcaacctccgcctcctgggttcaagtgattctcaatctgcttcaccctcctgagtagctgggattacaggcacctgcaaccatgcccagctaatttttttttttttttttgtatttttagtagagatggggtttcaccatgttagccaggctggtctctaactccagacctcaggygatccgtcctccttggccttccaaagtgctgggattacaggtgtgagccactgcacccggccttatgattcttatttataaccataggaggtgccctcttggtctcatgctcatattaaactgagattaggtttgggctcctgtctgactttaccaataactaggtatgaattttttttcctgttttctgtgaactgaggagactggactattgtgcagattctagggtccctttcagatctgaagtttcatgattctgagcatgtgtgaattgaacctttgaagtaaagaaggaatcattttgtcaagtaaagacactgtcttttaaagttctgatttcccgttgacttcatctcctccccagactgctgcggtgagaatggtgacatgcttgtgtgtaatcttcagactttatagtttcagtctttggggtgaatggcaaggtccccactgtgcagtgccattgctttcggacattagcctgggaactccagacttcgtgtctctacatggaaatctgtctttgaaatcattgtcactaaggaagggagggaaaattgtgctgtcttggtcaaaggaaagaaaatcagaaagaatttttggaaatatctttgggatgttaagaccattttttcctttttttggaccattttttttgtcctgtgggctaatccttttacattttgatctgctaagccagtcctttcctctggcttcacacttcagcttttaagtgtgaaatagagccccagactcattacctcaatcctctaggtagttggatgttaaatgaaaatgaatattgcatttggattcagtaattctttttatatggtgccttttatactgaggagcattccagctcctgctggttgcatgaattcagtgttttcccaagcatgggaatcacattaaataatttagagtgctgccccttctctacttcctcttttttttttctccttttgttagtttgagtaagcaattattagaccctgggtattgttcctctgcctttgcaggtgacggagctacccaggtactttgcagcaatcagaagcgaacctgttcattgtttctgaggcaccttcattactgtcatcaattatgaacagttctcttaggtggttagtagcctaattataaagatgaaaaatattgtggagtattgggtaccggaaagagtaggttgtaagacagcaatgttgtggtttttttttgtttttttttgttttttttttgagacagagtcttgctctgtcgcccaggctggagtgcagtggcgggatctcggctcactgcaagctccgcctcccgggttcacgccattctcctgcctcagcctcccaagtagctgggactacaggcgcccgccactacgcccggctaattttttgtatttttagtagagacggggtttcaccgttttagccgggatggtctcgatctcctgacctcgtgatccgcccrcctcggcctcccaaagtgctgggattacaggcgtgagccaccgcgcccggccgcaatgttgtgtttttacatgtcagtggatccagggtatgctagtgagcacaactgtatattatttttattaaaaagttgtaggatatttaaatatcagtaaagaggtaactttttccaccccctcccaagtagtcctaaaagtatggataattgacatttaaaccttcttcttaattctactgtgttgaacaatcataagcttgggaagatggagagacagggttattttttcctcacagagctgctcattatcccattttaagttctactttcaggaaccaagcctaaattgtattcctgatcaggatgtgtgtatttgctgattggtagacttggctggtgaaggtcataaaatagtgttttcctaaatactgtgttgtgtcttgcttatgtaattgaaaaaggaaaaaaatgttttattcctgttcagaaaaatgacagaattgccaacctaaggaagtcaaaccagatagaccaaaaatgatagtagactgactttaggattcatgatatagttattttgaatctgtattttttttttttttcctgagatggagtctcactcagttgcccaggctggagtgcagtggtgcgatcagggctcactgcaacccctgcttcctgggttcgtgtgatactgctgcctcagcctcctgagtagctgggattacaggcgagcaccatgacccctggctatttttttttttttttttttagtagaaatgcggctttgccgtgttagccaggctggtctcgaactcctgacctcaggtgatccacctgccttgggctcctaaagtgctgggattacaggcttgagccaccatgcccggctgaatctgtatgttttaaataaaagcatttaatgctttaacttttttagaaaagctcatttgacccatatcctcataatctatatagtcatgagagggaagttttctggattgtaatttccttgtgcctaggatggtgcccagcacgttgtatgtacttaaatatttaatgaaatgaaagaagaaactattgtctgggcagaccagcctcttggtcgttggactgcatttactttggggaaaggaattaattaatcctgattttgaagtgactgaattawttttttccaaatctactttgtacatttttcttcttttggtggtaaaatatgaaatttgccatgtatctattttagtaatttaagtaattaagtgtacagtttagtggcataaattacattcataatgttatgcagtaatcacttttttttttttttttttttgagacggagtctcgcccaggctggagtgcagtggcgcmatctggtctcactgcaagctccgcctcccgggttcgtgccattctcctgcctcagactgtcgagtagctgggactacaggcacccaccaccamgcccggctaatttttttgtatttttagtagagacggggtttcatcgtgtcagccaggatggtcttgatctcctgacctcatgatccgcccgcctcagcctcccaaagtgctgacattacaggcgtgagccaccgcgcctggccagtaatcactattttttagggtttttttttgttttttgagatggactctcgctctgttgcccatgctggagtgcagtggcactatcacggctcactgcagcctcaacctctcaggctcaagtagttctctcacctcagcctcccaagcagctgagaccaccagtgcgtgccagcaagcccggctgatttttacattatttgtagagatgggattgccctatgttgcccaggccggtctcaaactcgtggactgaagccatcctcccacccccgcctcccagagtgctgggattacaggcatgagccaccatgcccggcctgttaggagttctttacggattctgaataatattaaacctttatcagatacatgatttacaaatattttctattctgtgggttgtcttttcacttctgatagtgtcctttgatgcacaaaaaagtttttaatgaggcccaatttacctaattttttgtttatgcttttaaaatacactactttgtaaatattatcacttaccttttgctccctacagtgtgcccattctttttctgcccatgaaggtctttataagctactgatgtgatttttgagaaagcaggagtcatggttttttttgtttgtttgtttctcttgctctaacgtgtttaagtttgaagctgttttctttctttattattctctgtctttattcatttatttagattcggattcggcaggcgacacgggatttattttttgccatacaggaatgaaaagacatgatgatttcgaagatagggaaaagcacattttgtttggtatttcctttttttgttgttgttttttgaggtggaatcttactgtcacccaggctgtagtgcaatggcatgatctcaactcactgcaacctctgcctcctaggttcaagtgattctcctgtctccgcctcctgagtagctggggttacaggcgcatgccaccacccccagctaatttttttatttttggtagagatggggtttcaccattttggtcaggctggtcttgaacacctgatccacctgtcttggcttcccaaagtgctgggattacaggcatgagccaccacgcctagcctgtttggtattttcttagccccaratctccattaatcagcatcatttatgttttggtgtttagtattaagtagttacaataaagaccctgaggcatgactttcagtttggtattgtgggtgttttttttgtttgtttttgccttctaattctttgaaaattagtaatgctttattcaccagaatattctgtttccccgtgccttcctcgtccacaacacaggcacagggtggcaggtggtgaagagaaacaggctgccaagatggtccctagatgactaggaggggcgtgatgtgtgcacagggtttttttttctrttatcctttataacatcagaaaatgatgtcaaatgctgacgaatgaggaaatagaaaaatctaacgtgtaaaagctgctggactcccacagctctgacttagtaaaatttgacaatttgatacatatttttttttctgatatcagctgaactgcaaatgtatttatctaaatgtgagtgataaaaatggtgattaaaggcaggggtgggtacttagaaaacttttatgttctggtgcctgtgataaaagagaaaaaattacaaactcatctttgcatttgcctgattttgctattttcttatagctaaattcattaatctctgtgtaacacccctacagtgtgctagacttgaaggatacagtgatgaacaaagcagacagtgtatcactgttattttttaagtcttctaaggagcatgcttcactttagtaaatttttagttttgggtgattttatatttctggacagatgtgtttaattgagggccaattcatctggtgttcagttggagttaacattctttaattgccaggaatgatagtgaataaggtagtcacccccttatccagagtttcactttctgtggtttcactgagttctgaaaatattaaatggaaaattccagaaataaacatttcacaaattttaaattgtgcaccattctgagtggcgtgatgaaatctttcaccatcctgctctgtccccctttgtcttgcctgggatgtgagtcattcctttgtccagcatacccacgctgtatacacatttagtagtcgtctggattatcacatcatcatcgtggtgtcacagtgcttgtgttcaagtgacccttattttaattttattatttgtaatacttttgaattttaatcttatggccaggtgtggtggctcatgcctgtaatcccagcattttgggaggccgaggctggaggatcgcttaagcccaggagtttgagaccagcctaggcaacctgggggaaaacttgtttctacaaaaatacaaataaaaattagccaggtgtggtggcacatgcctgtagccccagctacttgggatcgcatgagcctgggagtttgaggcagcagtgagccatgatcactccagcctgggcaacagagtgagactctctcagaaaaattaactttacttaattacttttattattgttataattgttccattttattgttgttgttgttgttgtaaaccaaattgtaaaaccattttatatttgttgcaaaccaaaaagtatctgagacaggtctcaatttatttagaagtttattttaccaaggttaagggcatgcacccaggcccaaggtctgtgcctttctcctaagatgattttgagggcttcagtatttaaagggggagaaattttaggaaggcgtggtagataggaggcaaatggttacattcttttgagtctttgatcagctattcacatgtggcgggcaagggtggggggcagcggaggaatagtcccttatgcattcatctagctcagtgaatctgcatttttacataagacaaaatatacttacmgggcagaggaagtgatsagattatgcatttgtctcaggtaagcagaggaatgactttaagttctgtcctttgtccyatacctgtgaagataagctgtcaatttacgttgtcagggtgaaattcagcagagtggttgtagggtaaggatgttgaggtccacaaggaatttcctattgggcagattgtgagggaggtaggtttgcatgatgccgttcctaycttgacttttctctttgacttagtgggtttggggtccccaagtttattttccttttacattgttattcatcttttactgtgcctaatttataatttaaactttaccataggtatgtgtgtataggaaaaagcaatgtatttagatctggtactacctgcagtttcaggcacccactggggaatttcagaacgtatcccttgaagataagggaggactactgtatgattcatagcacagtttcagattaatcatgtccgatgcagtcagatgcttgatggttatatggggcctggtttgtgggcaaatgactagtggggtttttttttttttttttttttgctcatttaggattcaagatgggttttaaccttttaagttacaattaagcactttgtgtcgtacagtatgtatacaataatgctttgaaatggctagtcatgaatgtattaatggtttgtcttgcactgaaacctgaaatgtagatgaaaaagttgataaacataaggcaatcagtactgattgtcattgtcatctaccccagtacattctaagtgtggtagatacagtaattcttatatgttgctattaacgtcatttctgatttttgattagaaaaatatttaggttaatggctttcttgttggtttcaaatttatagtaaaagctatacctttatgtcttgaatctgcttgccagtctttgctttgataggtggtttttgcttaggctacgataaattgtttcatcttttctaaagagggatgaggaagtatttactttgtgaaattggaaaaccgtgtggttggtgtggaaaataagcatgttattaataaacagctagtcttgtgctccatactcttggatgkaaggtagaaataaccttgcctctattgctgagatttaaaaaaataaaaagctaggctactacccgtgccttcctcgtccacaacacaggcacagggtggcaggtagtgatgagaaacaggctgccaagatggtccctggatgactaggaggtgtgtgatgtgcgtccagttgtctggatggggcaactggaatccttcattgtgtggttcatgcttgtgtgtgtgtgtgaatgcgagagtgggaggaagttcaatgttttggctttggtgtgggattaattttctcttcgattgttaatttggcatacctgactttttcattctggtttaaagtattagaaatcttaagatttgtgtgaattagaagattgggatttatttgaatttcatttggcactagggaaaattcactttaggtaagagctactttttgggttggctttatgttcaaagcagttttttccttaagagtttcattttattatggaaattttcttttttctttttttatttttttgagatggagttttgctctgtcccccaggccggagtgtggtgccaccgtctcggctcactgcaacctccactttccaggttcaagcaattctcccacctcagcctcccgagtatctgggattacaggtgcgtgccaccatgcccggctaatttttgtagtttttactagagatggggtttcgccatgttggccaggctggtcttgaactcctgacttcaggtaatctgcctgcctctgcctctcgagtagctgggattataggcatgagccaccgcgcccggctggaaatttccaaacatataaaagtaaacttaatagtacagtataatggaccccatgaacaaaagtaatttttctaacctcaaaagcaggggcagtttatttaatcaggtaaaaactgagccttaaaagtcagactttgctaaaagaaaacagtatttttttcactgtcctgaatataacattaaggaaataggatttggttaggtctagataacatttaataatttcaactgtgttaaagacaaaagtaatttttgatgtgaccatggacttgtcatgaaaaatataaaggtgaaagggattccatcccccttcctctaaacagaatggaacataagcacaggtttaggctaattcataacctggatttttaaagcttttacatagttgggtttcatgttgttcagatgtcttactaaaccaggtatctaaatgagtgtttttctgttaaaaaaaaaaaaaaaaggacatgtccccttcctctgccatcccttaatcacggggctccactggaatagagatgggcggataaagaaggaaacttagtgttagcagctccagtgaactggtatgaggtagaggagggttgaagccattgatcacagtgacgtttccagaggatttaagctttcccattgtcccatccttcatttgaaccctcagaatgtacagccagaagtccaagagcaagcgtctctgcgaagggtaaaccttccaggctgtgctccctcaaaggcgccgctgcgcttgaggagcaggtgctgtggctgctgaagtcaggtgctctgggagcagacaacaactgcctgggtgtgtagcacctgtgtccttttggctcccctggccttgtcttctgagactctgttgttaatttctttagctgtttatgtcagctttgaccaaagcccactgcaaagcttagaagggtaaggaggcaacaatatccctttgaagacttattttggcacagattttgtgatttgtgaatagtaacattcctcagtagccacaaattaaacaacatcgatctaattttggtattaattagttgtataattaaaatagtaaaaccatctgcatagattgaagctatagtttcaggttgtattatatgtgtgaaaaaccgactcttcattgtgaattttgagtagacttcccagtagattatttatgtaagctgtgtcatcagaaacattccagaatgaatcacgtttaattaggatctaacaaatgttaccacctttgttctgttgaacaatatttttaaaccattaaatcaacttggttgataaaaggaaattgcagtaatttattcataaccctttcatcacaagtgttttcacttgtgtccttgtcattgtatacacagatatttgaaaattttgcacctcaggaattgctgggctgggagaaaaaggatggcagcaatttaaatctgtatttgtgctagaataatcttttacaatctctttgctataagatcttttcctggccagttctgttttccccactataacgaaacatcctgtcttaatataagattatttctggcaagggattcttgaaagctgtaaagaaaacatacctgctgtctttaccgataatgtggaaaacttcatgggaaattctagccccttcgatgtcaagtctatttaatctcattcctttactattaataaatttaaatagatgaatttcaaatctcattaaatgttacaacagtatgtctaattagtttttttctttctttgattggattccacaaagtagaataaagctcttctcagaaacctgtttggacttagtaattatttttctctagattgttattttttctctagtttgtcaagagtgagtaaactttgaatgattgagagtctgttatgacataggtcaaatcaattgagcaggaccaaagagttgggctaccctggtcacattaactatatacatttactgcgattatttccattgtttcttcatacacagctgtgtgacacagcgtgccttttgcatcggtaaaggagttaaatctgtagttaatttgtgtggcattctctaggctgagccaggctttcttagccctttggaagatcccacatggaagcattagacataatgaaaactcagcatatttctttgcttctgagttgttggaaatgattagattgaaactcaatgtgttgttttcttttcccacccccaccctttagaaaggtatctgtatgtacagaatgggaatatcattaatgtcatgcagtttattcttttctacaaaggtgattatattaaatagttctgctataacatggcataagcatttctaacagtgaccacactggccgggcccggtggctcacacctgtaatcctagcactttgggaggccaaacacctgaggtcgggagttcaagaccagcctggccaatgtggtgaaaccccatctctactaaaaatacaaaattagccgggcatggtggcatatgcttgtaatcccagctactcgggaggctgaggcaggagaatcgcttgaacccgggaggtggaggttacagtgagccgagattgcgccattgcgctccagcttggcgacagagcaagactccacctcaaaaaaaaaaaaaaataaaccacaacagactgtcatgataggttcacttcaccctgtggttaatgagttaatccatataaagcagtggtctccaacctttttggcaccagggaccagttccgtggaagacattctgaaaggggctggggattgtgtagggggttgtgtgttgtgccactccagcctgggcaacatgagcaaaagtctgtctaaaaaaaaaaaaaattactgcactatgccagattgttcaataaaagccatagagattatgaaaaattggagttaggtgtgcaaaaactgcattagttactcatcaccaaaaaaaaaaaaaaagaacctaatgaaaacagtgcaggtgttcacatgttaagcagttaaggaatactgtaaatatggcactttgaaaatctaaatctgtggtttgctcatagaagtgagcatcagcagggttgcagcttgagttattgtgaagtggtagaaggagggttctctgaaatggcattgagagttctaacatcagatgtgtgtggcacccacttggtgaactgagtagctggtagatgcttcaggggtgtgtgtgtgtgtgtgtgtatctgtctgtctttccagctgggtgtagttttctgggttttcctcgtggatgaaattgtgcatatgcaaaggcagagttcaggttatgcgcatattgttcccaggtgttatcagttgtgttagagcaaacttgccttccctttccctttccctttccctttcccttttccctttccctttcccttctcagcagggccttgctgtgtcaccaaggctggagtgcagtggtgtgatcacacctcattgcagcctttacctcctgggcccaagtgatcctcccacctcaccctcccaagtagctaggaccagtagctactttttaaaaaatttttttgtagggactaggtctccctgtgttgcttaggctggtctcaaattcctgggctcaagtgaccttcccacctcgccctcccagagtgctggggttacatgtgtgagccaccgtgcccagactttgatttgcctttgatttaggaagaggaagttacagttttcccaactataactttcaaaagttatagttgggaaaagaaaaatagatgcgcaaatcggtggtaggtaggtgtgaagcctaggtaaacccattcttttcccatctaggcacatcgcctctctatacagaaagggcactttgaagtatgaggaacatactttttctaacttctttctggaaataaatgtgaaaattagggtgttaataaaaagtacgtttacataagctgtctgcttttcaaggaagagtggcttagacttctgctagcttagttgatcaggtcatctcacttctgttatttttttgtaaatctaatgaggtggctaattatcgaaagtgaggtgtccatcctgtcactttgagttatcttccaggtgcagagattaattttgttgtgcctttgttcccttcattaactgtttgtgggtaggcatttgtaaggtcactttctgggattggggaacctcccctgaggctaccccttatgcaaagagttgttctttatgcaaagctgcatacctgccctggagtccacctggcaccttaacctcatttgcactgttctctaaacttctggggcctagctagtcacctgagcataagcgcacactgctgccagcaggcttttggaaaatgtcttaaaaagtggtggcgaaagtaagcttgtttcttgatgatatgtaaccatgaatagtgaagacgtttatactcagaattcctagactcctagaaatcagatgtagagagcttccctattagtcatctaccttagggcctttagaaacagcaaggtagagatactgtgttgtgttgtttaggacaaggagaattagcctgcaccttggagagagaaactgcaatgagctgtggagcctaatgattcttagctcttgtccccgctctgcaacttactggtttggtgactttgggccagttactggaccattctgttcgaacttcagtttcttcattggaattgatattagtttctacctgatagtgaagaacttagcaaagtccctgtggtggcaagcatatgcagtcagtgttattgctaccrtgattgatattctgactattgggagattataatctcagatgtgttttcaggatgaattcacaaacacagtcatatgttgcataagtatggggatacatcctgagaaatgcgttgttaagctattttgtcattgtggcaacatcatggagtgtacttacaccaacctagatggtatagcctattacaccccttggctgtatggtatagcctattattcgtaggctacaaatctctacagcatggtactgtactgaatactgtaggtaagtaaatgtgtagctaaatatatctaaacagaaaaggtatagtaaaaatacagtattataatcttagaggatcaccattggatatgcagctagtcgttgactgaaacgtcattatgcggcacatgactgtgtaagatacaacaggatctgaagaatcgcaacattttggataattttttttggtrtgtgtaatttttcaaaaacataattgaacttacattatatgtacagttttatatactaactaaaaacgttaaatgtagtctagaggcagtgtgacaggttttcagtggaaaggatactcaaaattattgggcttacccctgtatcttacaggtgggaaaacagaatcatggaaaggtttaaaggatatactcagcctcctaggcaatgccagcactacaactgagtcccattctagttgttattccaaggattttcaccagtttacatcaggaattttcataaagttggcattggatgatgatatggtgataccaagatattttctattgtttttgttttgttttgttttttgagacagggtctcgctctgtcacccaggctggaatgcagtgatgcgatcatagctcactgcagccttgacttcctgggctcaggtgatcctcctgcctcagcctcctgagtagttgggactacaggcacgcgccaccatgcctggctacttttttttttttcttttgtagagacaggctctcactttgttgcccaggctgggatgttttcttttggatgggagtgaaaggcttatgtataaatagaaacagcacactcaacatacctattgtttttataaggcacactacagtgaatacaytaaaaaaaaaacagtaggtgagaatactctgaagatagtgagaaagcataattgtaggggacatagtttttaaatggttgaattactgtctgaggcctctttacagacatggggtaagtgggatgccaaggtgtgttgttgccaggagaatcaggttatatgtacctttgggtggcagcaaggataaatcaggacaaagggcattcattcattgtagcttcataatcacagtgtgataaaatcagtcatttggtgatcattacaggtcagtcactgcctagggttttgttttttccccggtatctttattttggattttaaaaataatacattcagtgtataaaatttgggaaatacagcgaagcataaggaaaataaagacaatctaaaacctcataacccaaagataacacactgttaacattttggtgctttttcttctggatctttttttaggggagtatgtgtaatttttcaaaaacgtaattgagcttacattatatgtacagatttatatactaactaaaaatgttaaaactgtagtctagaggcaaagtgactgtcaggttttcagtcctgtaagaaaatgtggactctaccatatactgcagaagaacatgttttggcgtgtgggtttttttttgtttgttttgtgagactctgtcactcaggctggagtgcagtgtggcaatcatggctcactgcagccttgaacctcccaggatcaagcgatcctcccaccttaacctcctgagtagctgggactacagttacgtagtaccatcacgcctggctaatttaaaattttttttgtagagacagggcctcactatgttgcccaggctggtctcaaactcctgggctcaagcagtccttccacctctgcctcccaaagtgttgggattacaggcgtgagcccctgctcctggcctggcatgtacttgatataggagcagtgtctaaagctggctgattgccccgcaccgtcattttaatcagaatgactcatttttcccatctatagctagtctcaaaaattaataataaattacttaaccctccaggaagtttcagcaaacacccggttgatcatttaccactcttatctgctatctcttaaataatattctaggaccagagcacaggcataatctgctaatttacgttaaattatctgtctgccagttagagccaggtaactacagttcacagtagaggcagcaatccattcttgccaagaaaggattccatttggttatatgcagaagggaaacccaggtattcaaggaatataaattatagataaattgcaatttcagggtaaggattcttctctaggatattttgtgtctccatgaattcataaaaatagaattttaggaaacaagaatacttgtgttgaacatatcaatcggtatgccttctttgagactaaacatttcattgaaaattagctgttagattgataccatttaaatggcttatatgcatttaaagatgtaacagatataacttttttgcaactttttgtaagtattaaatttagcttcaggaatatggtttcatttactattttataattaaaatataattgtcacccccccctttttttttttgagttagagtttcactgttgttgcccaggctggagtgcaatggttcaatctcggcttactgcaacctccgcctcccagattcaagtgattctcctgcctcagcctcccgagtagctgggattacaggcatgcaccaccatgcctggctatttatcccttttaaacattacttttctaagactgtctcttcacaccagagacttgaagattgttcaaagtgccgtgggttaaaaataacacttgtggccaggcatgatggctcatgcctgtaatccccgcactttgggaggcggaagtaggtagatcacttgaggtcaggagttcgagaccagcctgaccaacatggcgaaaccctgtctctactaaaaatacaaaagaagtagccaggtgtagtggtgtgtgcttctaatcccagctacttgggagattgaggcaggagaattgcttgaggccaggaggcagaggttgcagaaagctgagatcatgccactgcactccagcctgggtgacagagggagactgtctcaaaaacaaacaaacaaataacaacaacaaaaacacttgtgctatgtatgcctagagacctagctcctcagaacctgaggccaggagttccaggacagcctgggcaayrtagcgagaccccgtctccaaacaaacaaaaaaacatttattctgagagagggaaataagggtagggattgactggaaaggggcttgggaaacctttcaggagtgattgtaatgtttcatatcttgatagggatttagattacacaggtatgtgcatttgtcaaactccgcaaatgcacacctattcattgcatgaacttttacaccaagaagggaaaaaaaatctaattaattaacatgcatgttgaagtgtttagcaggaagtatactgatctccgcagtttacttggaaataggtcacaaagtaagatggattaatggatatatttgtgataarcaagttaatagtggaatcaagatggtgagtatatgggagttcactgtaaaatcctttcaactttgctgtatatttgaaatttttcataataaaacggtttaaaaatgttaaaaattttcacatcggtgattagatatcaaaaaagatgttacaaatttgtatctgtgaaattgtagttcccacggggcagaaacggatccattgaatcacaccactcccgtgatcattttaactttgagattgataagagagtgagctaagaattatcaggttcttcatcctcagtatgttaaggakctctcttatctttctcattgagtctaaatattttttttctgattattttgctgtctttgttacttggaaatcaagtaacataaatcctgtataattgtcaaagaggtgacatctgtgtttatttctgcatgtatcatccaatggatacctaaacactgttttgctgagacattttctcaggctagcactcaatacaaatctgtatttttctattctccttccttctcctccagctttcagtctagatgttttctgatggcatagcttttggatcratcattctctttttttgctctgtcttayccaatattaaaatattacaccctgttttttttttttttttttgagatggagtttcactcttgttacccaggctgaagtggaatggcacgatctcggctcactgccacctctgcctcccggacttaagcaattctcctgcctcagcctcctgagtagctgggattacaggcacgcgccaccaagcctggcaattttgtaattttagtagagatggggtttctccacgttggtcaggctggtctcgaactcctgaccttaggtgatctgcctggcttggcctcccaaagtgttgggattacaggcgtgagccactgcacccggccttgacactcattttgtcctatcttttggcatgcctgttaatttttattgaaaagtgggcattgtatataaaaaaattgtagcgaccctagatgattttctaatatctagatggcttacaccatttgctaggcaaatagaatgggggctgattccatttatcttgtctgagctgaccacagcaagggcgtggttttggtcaggctccatctctttttggtttgcctctactctttggaagtaccctgcaggagttctggctaagaactggggcccttcccccatggtgtgtcctgaactttaatctttgtcccccacggtgtgtcctgaactttaatctttgtcttcttagtacatgggattggtgaagaaacctgctgtgctattcagaggctttctgcttggtttcagccttctgacctgtgcatctttgggattttgtaaaatgtcttcagggtaaaacactcagttcttttcacaggaatcctaggcccttgtctctatttttctttcttcaggcctgagacattaccatgagctctgctggtttctctgcctgtgaatagtggctctggtcatgttcccaggctgcttttctgtttcctcagcctccttcctggcacctagcattggcagattccctgaggggcaaagcagttgtggcatattggcttgctcctaaagggtttacccttccggattgtgtctcttcaagtcatagtagcttccacagttctccaaagtcttcagactttgaaaaaaaaaatttttttttttttaattttctctggctgttggagttgtttctctgagggatctctggtctgccacaggctctcagtcatagccagaagcagaggctactttatgcaaatcttgcacatgtgcattgttacttatgttgcagaaaaggtgatgctagtctgtgctccatttactaaggaagaaatattcagtttatagggaatcgaaaataaattatctgtttattttattttattttttattttttcccaggacagagtcttgctctgttacccaggctggagtgcagtggtgcaatcttggctcactgcaacctccgcctcccgagttcaagcaattctcctgcctcagcctcccgagtagctgggattacacgcgcctgccaccacacccggctaatttttgtatttttagtagagacagggtttcaccatgttggccaggctggtctcgaactactgaccttatgatccgcccacctcagcctctcaaagtgctgggattacaggcatgagccaccgcgcccagcatgtttattaatccaataaatgtgaaccagcaaatataaacttaacrtttatgcattactgctgtactttctaacagtgtcagtggttaatttaaaagtcagtagaagttaagtgatttgtctaaggcagagtttctcaaccttggcactgttgacatgctgctttgttgttgaggctgtcctgtgccttgtaggatgttttgcagcctctgtggcctttacccaagagatgccagtagcacctttctcccgcagtggtgacaacgaaaaatgcccccagatactgccaaatgtcccctgggaagcaaaagcacccctaattgagaactactggcctaaaggaagggaatagttttcctaatttgatataatgccagaaaagcagaattggattttgagttactcaagtcattgtctctgaccattggactatatgccagcttcattcttttttttttctttggtaaagatggggtctcgctgtgtcacccaggctggagtatagaggcataattatagctcattgcagcctcgaacttctgggctgaagggatccttccacctcagccttgtgggtctctggggctgtaggtgtgcaccaccacacttggctttttttttttttttttttttgggcagagacaaggtcttgctatgttgcctatgcaacatagcaagaacccttggcctcaagaggtcctcttgcctcggtctcccaaagtgctgaggttacaggcatgagccactccacctggcccagcttcattttttactgacaatttgatggtaaattctagggtcctaaaaatggttgtaagagtaaatgtattttttttttaaccattggcttgccatctgtgaattgggaacttaggtcacttggttgcttattctagggttaagaagacagactcttgatttctaggcagtagtaagtgttaacatcctatgtgtggtatctcttgggcttctgcagagcagttctgttgcagtctgtcttcattggatctaatgcgtgtacagcagttctttaaaactgacaggagcaaaccaacacagagaaatccactcagaatgtaagtagtaaccatttggaatgtaaggtaggaaagacataaagagatcagaattagagctaaaactaagggagaaaaagacagcttagaagattagaatggacaattttgaatggcatgacactaccaaaaataatttaagctgttagctcccctttctcttattctgcrgacattttccggttttccaaatcattctgctttgatgccaaatgtcttgttaataatgcatggcttttttatagtactcccttcccatcatgcctcttaggtgctgagtcagaggagatgttacagcagcagctcaggagaaaggagaaatccctctgcaatgctcaaatactactttttttttttttttgcacatttatctcttagcaagcttttcactttaaatactctaaagcttcaattcaggggatgcatttttcttactgttaaagaacaagacttttaaaactatccaaaaatgtctaataacgtgaggtttttgaaagctcttaaaagcagatctaaatgttagtgtgtattgtatttgatttctaggacaatagctgttatttttctacttttctacctattgtctggatatgcctcttctgagtccgtaatttctattctgtaaaatttaaaataatattttcacattgcctttatgatagacagctataggagacaaacagataattgaggaaatgggacaaatgattgtccggtgagcactgggatccaggcttggatccagcgtttttctcccctactgtttgccagcccattgcattctgggtggctactcagaggctgacttttgaggctcagcagttgctacccctgctgctttcaaaggctgggctgtctgggtcacagagtttttcrttttctgttggttaggaaatactgtgttttgaagggccctggtagagggaaagtaatttttgaagcccctgggtttgtggtatgagttgagaggaggcacccactgcacctgctgaagttccttttagagacggcaacatggagaaagtgttcctaggtctgtgatacacatgttagcctcttagtcatgtctgcctttaaactgtgtaacacatcttaacaaacttgggaaatcagttcacctgatgcggagtggtgtgtttaagtgcataaatcagaagtttcctagagtgacagtattctttgttgtcatggatttttaaggtgtaatttagaaattgtttacctctcttcacaatcagaataacaatattgttgaaaataaaataacagcatggaaactctgtgtactatattcacaacttttctataattctaaaattactctaaactgaaaggcttatacaaataataactgtgacttcctgaaggcctactctgtttcaatcactctggaatctacatttgttatttctaactctcctaagactgtaagaagtttggtcacgagctcaagatcacacagctaagccgagcagggactcaaacctctgtcttagctgagtgaaactctaatcctaccgcatgccacctctgttctctggggaattggaatggaattatttgaacaaggacgtggctcttcagtatgtcgtttaagtctgcaggtatgccttgatttctttctgttgtagatcagtacttactgtatggcacttgctgattttgcgtgcttatgtycttgatatgtggcctctttcagttcagggaccaacttttttttcttcttgaggagtcttgctctatcgcccaggctggagtgcagtggcgcaaccttggctcactgcaagctctgcctcctgggttcacaccattctgctgtctcagcctccccaacagctgggactacaggcgcacactgccacgctcagctaatttttttgtgtctttagtagagaccgggtttcactgtgttagccaggatggtctcgatctcctgaccttgtgatccgcctgcctcagcctcccaaagtgctgggattagaggcatgagccaccgcgcccagccaactttttttttaaattaaagtaaattctgaatgaacacattagcgctcaccatatacaagactcccttagagctctgcatgtgttgcttctcttcctgacccagtgaggtaggtactattactttgctcttttttttttgagatggaatcttgctctgttgcccaggctggaaagcagcggtgtgatctcagctcactgcagcctccacctcctgggttcaagcgatcctccctcctcagccttccaagtagctgagattacaagcatgtgccaccacacctggctaatttttgtatttttagtagagacagggttttactatgttggccaggctggtctcaaacttctgacctcaagtgatccacccacctcggcctcccaaagtgctgggattacaggcgtgagccaccgtgcctggctgcagtctttattcttaaatgttttaccaatattaactcattcaatacaaatgagatagggatattattatccccgttttatggatgaggaaacacagaatgaataatttgccaaaggtcattcagctgactagaatttaaacctgtctaggccgggcgcagtggctcatgcctgtaatcccagcattcgggaggccgaggtgggcaaatcatctgaggttggcagatcatctgaggtcaggagttcaagaccacgctggccaacatggtgaaccgacatctctacaaaaatacaaaaattagccgggcatgatggtgggtgcctgtaatctcagctactcaggaggctgagacatgagaatcgcttgaacccaggaggcggaggttgtagtgagccgagattgcaccattgcactccagcctgggcaacagagtgagactccatctccaaaaaaaaaaaaaaaaaaaaaaaaatttaaacctgtctagccctcctccagagttaatactttcaaccattaaaccatttacctgacaatttattcagcttaaagataaaaggaaaaccagaaaatacctgttagactaaacagagcacatttatgtgcagatagtttgcaacttctaaggagaacattatttgtgaaatcaaaacagtttatttctaggataacttttattatttaacttttagttgagaatttgtatttgttgtatataagcatatgtcgtccttctatgtcacttttttttttcctccccagaaacagggtctcccactctgttaaccaggctggagtgcagtggtgcaatcacagttcactgcagccttgaactcctgggctcaagcagacttcccacctcagcctcccaactggctgggactacaggtgcacaccaccatgccgggctaatatttttttatgtcagtagagaaggggccttcctatgttgcccaggctgatcttaaactcctgggctcaagtgatcctcctgccttaacctcctgaagtgttaggattgcagatgtgagccactgcgccggcctagaattggaatcttgaatttttgccttaggctcactaataatactctttaactacatttaacaaatatttattgggctgctgctatgtggtaggcaaacttgtgtgtccttttaggtaattagtgctttggagaagcagaggaaagtggatgctttgcagggagtagagagaggaaattttgcaattttaaatatattgtgatgagggaaggtctcactgaagtgaggtattcaggaggtgtgcgagcaagccatgtggttgtctgggcagcgctgccaagacagtggttgggtcagtggcctgtggtgagagcttgcatgggtatcttcaggacaggacagcgagaaggcccgtgtggctggaacagagtgagtgaggtgcagaactagagagatgaggtcagagggataagggaaatcatttaagagctggtgtagacagacttgctctgcgaagggccagatgtaaacgttttcgactctgcagtccatagcaacaactcaactctgcctgcaatgccgaagcagtagtaggcagtgcacagaggggcacagggtgtccagcagtgctttattcacactggcaggcactgggcaggattcacccaccacagcttctgactcctggtttagtgtaagccattgtccagagtttgatgtgtactctgaatgagatgagaattcattggagggtttttatttatttatttatttttgagacagggtctggctcctttgtccaggctggagtgcagtgatgcaatggaagctcactacaacctcaacctcaaaggctcaaatgctcctcccactttagcctcccaaggacctgggactacaggcgcaagccaccatgccggactaatttttgtattttttgtagagacggggtcttgccaggttgcccaaactggtcttaaactcttgagctcaagcccttcacccacctcagccttccaaagtgctgggattacaggcgtgagccaccacgcccagcctttcttggaggttttcaaatagaggaattagaaaatttgactgctgttgtaaggaatgccactggttgcctaattgagaatgaactgacaaggaatgagggtaaaagggtagagttaccattaaccaggatgggaagactgcggtagaacaggtttgtggacgggaaggacagtgatctggttttggacaaatttgaggtaactgttaggcttctgagtggagatggcagggaggctgttggtctacaatcctggtgctcagtgcagaagtcagggctcaatataaggatttgggagtgtccagcaaacaggtggtatttgaaatcatgagactggatgagatcaccaagggagtgagtgtagatcgagaagtccagggtctgggccttggggatctgcagcattaaaatgagagaaattagtttggggctgttttgtcactttgggagtgtggattctttgattctgattacggatgcatgtagcgctctgactcttaacgtgaattttaaatacagaacctcagtgtccttccggctaagtttattatttaccacctatgttcttcttactatttttttttttttttttttttttagagatggggtcttgctctgttgcgcaggctggagtccagtggtgtgatcatagctcactataacctaaaacacatgggctcaaacaaacctccagcctcagcctcctgagtagctgggacaacagatgcatgccaccacgcctggctaattgtttttggtagaaataaggtttaactctgtttcccaggctrgtctcaaactcctggcctcaggtagttctcccacgtcagcctccccaaagtgctggaacttattaaattataattctagtttttatgtacagtttttttaaattgtggtaaaatatatggtaaaatatacataacataaaataggccattttaggttgtcctgcctatggagtagccattcttttatttctttactttcttaataaacttgctttcactttacggaaaaaaaaaagtaccatttaaatcatttgaagtatacaatttagtggcgttaagtacattctcaatattacgcaaccattacyactattcgtttccagaacttgatttcttcattccaaacagaaactctgcacctattaaaaattagtccccttctcaacctctattattagtccacctattattagtccccttctccgcaacttctaataatcaccattctactttccgtgtctgtgaatttacctattctgggtacctcagataaatggaatcatataatatttgtacttttgtgttctggcatagttcacttagcatgttttcaaggttcatctatgttacagcatgtttcactgctttttaagtttaaattttttaagttttaattttgctaaacatcctaggatgcacatcagtgcttttattattattattttttaaaacaacctctaatatcgagtcttatttctgacaggaattctttgctgcagaagggtctccatagctcagccttatgttccaaaacactcatggtctctgtgtccagaacactccaagagcttgttgaaatggctcttcagcccatgcagccctcttatttgtgctactagtaaaataatgataatgctattgaatagctggattgttgaccctctggctaatatgatttgatggattttattatatggcattttaatcaaaggataagcttgtctcatttgaaatagatagaaaacctgaaaaagggacagtttaaaggtagcaatcaagtcaaaatagttttcttcttctggaatgtgataaatgtatttagtgagaggtatcttggagagcgtgattttaccacttactcatttgacaaattgctgagcttaggggccaagtcctgtaatatttccctgttgcttcaaggcaggtatactgaaaaaaatcagttattaaatatttgccatatttcctaaataacctattcattctttgcctgataacagcagtttttatggcagcaatatgtgttaaaggaaaacctggctgtcctttggggttcagtagtcaggtccactgaaagttcagctgatgtgtgaaacaaggtttttgttttttgttttttttttttttgaagatgtagtctcactttgttgcccaggttggagtgcagtggtgggatctcggctcactgcaacctccgcctcctgggttcaagtgattctcctgcctcagcctcctgagtagctgggactacaggtgcatgccaccacgcctggctaattttttgtatttttttttttttagtagagacggggtttcaccctgttagccaggctggtctcgaacttctgacctcatgatccgcctgtctcggcctcccaaagtgctgggaaacaaggtatttgtttaactaactttcggtattgtaggaaagactcattaatgttcttgattgtggtgctagagaatgaccaaggataaaatgaaaataaatttttagcttcattttaggactggtgattgcgaaacaacaacaacgaaacagcaaaaaaccctttttagtcaaaaaaattgggggagaagaaaattagaggcaagaggttatttttaagatgtggccacagttcagtctggtttccagtagacttttaggccatttcccataatctattgagtcatcccagcagttctgcagtcagctataatgaaagtttaaaaggaagatcatagtatccattcttctctccttttgtattgtggttaactttgggtcttggctttatgttaccctccccacccccagccccttttaatgtaatcatgtagtgggcaagggattaaattaatgtaattaggagaatggagggaactttgctttgtgctccaggaaccctggggattccccccagcccccattaccagtaacagcactaacaatgtttatattgaagtggatatggaagccaaggatcttcaaggtcttagtagcaagcctagtagtgagctgttaagccaaatgaaagcagtgattgagtctcagcttgtttttctatgagagtactaatacctactttatcgaagttaaatgaaaccttttaacccttaatattgattaaggcttgtgttaggaggaagtttgagagaatgtgtccttgctacatgtctgtccaactcccaaaggcccgagggtacctggatggcttccagggctcagtgattatgtattttatgcattagtaggcttctttcaagatatcttggccagataattatgaggcttgtccttcagaggcagcatgcacaccaccacgtagggactcatggctggtgcctgtcttgcagctagaatagcaagacatcttcattcttggaacagtgagagtgaactcagaaaagggcctgcattcttgtccagccaaattattgttcacctgtcctagactataaataattccatgacatgtgtccagtcctttgtgagttccagggttggttttgcttttctattttgattgccttggacttgctctgcgaaattagtaacsaagttgaccttcatcttttagtttagcccaggactctaggccctgtgtgcttgccatatcaggaggggtgagatcaaggccccacttccagtgtcatttgattctctaccctgccatttgctgtgttctgaagaaataaagtttgtttgctgtttgtcctaaggtggaacatatctttcagagcacatgctaacaagatttaaaagatatttcaggctgggcgtgatgactcacgcctataattccagcacttggggaggctgaggcgggcagatcacctgaggtcaggggttcgagaccagcctgaccaacatggtgaaactcctgtctctactaaaaaatacaaaaattagctgggcatggtggcacatgcctgtaatcccagctactcaggaggctgaggcaggagaattgcttcaacttgggaggcggagatggcagtgagccgagattgcaccattgcactccagccagggcgttagagtgagactccatcccaaaaatcaatcaatcaatcaatcaatcaaagatatttcacctctcacagccaaatacagatgtaattttgggggagtacgatccttattttatattgtgttctgattatatgtaatttttgttttatcctttcagctgcgtaagaaaaactcaatttccactctttttgcagacaattcttcaaaaatagattgcaaagttttcwtgtattcattttaccatttgttcttaagaagacttactttaacataattaccaacaaatgtttgcacctagcatttctgctcagagaatggtgtgaaaggggataaaaatagtaagccttagccagtgccaaagttgtcagtggattaaagaatagtgctatcctggaaatgctgctttaggggagttggaggcagggggtcttgctggggatggtgtgcagagggtggttggtgcaggtaggaagaggttccaagcaccttgttaggcttagtttctgtgctattatcttagggctagacttttgggaggggttgtacttgtacttcagtttgtatgtgggtcatgtttgcaccatagcgggtgtggttattgacaactgtgtttcccggtggttccccttccagcccatgctcaccagatgccattagcaagttgtaccttctctaataccctgaggtttttctgagaaggctgcagaaataccccctagaacaaagaagtcagcaaaaacaaaacaaaacaaaaaacaccacttaagggtaagcacacaaacacatacaaatataaggacatacatcataggtattgtaatgttccaatcccataattttggaatgattacataggtggaatacagaagtatccctgcttttcagcatgactgcccttgatgactcatcaaaaaacagcagtgctagtcatcttagacacagaggatgtgtgccatttagacttgttcttttaaatagtgaaaattattgctttatggttttattctgtgccccccgccctcatgcccctatgggccagagaggcagttcaccaacttctctccagttgtgcctccccttccttcctgtgactttagggagtttgtacgcatctgctctagtcctagaaccatggggccttcatagcccctgcgcagtagccaagagcaatgggccttcttacggaaggaagagctcagttggcaagtatatcctgagctgagttgtgaaggcacacattcatacctctctttatttttaatggggttagcacagtcttcaatcaatagcttaacttcatctctgcttttatttctgctcctagcataaattatttagcacaaatgcagacataatctcagaaattacttagtattagtgtcctgctgtgagcatcattttcttgagtgtgttgtgttctaaccgcaaattagcaaaagacccttcaagaaagtctttctgtggattcatttagggggaatttagaaggttgtagtcagtgctacctgatcacttttattttcagtgaaattttgttttattcatagtatagttaatagctttcctgtaacacacacacacacactctctctctctacatatatatgtattatgtacatttttaaaagtcactttttacctggtaatatcttaatcccttaaggatttgtcagttgacccatcggtggactgagtcactttatgagtagggattccgaaaatgccaagctttgtctgggggggttgggttgggggaggatgcaataataaaaactctaaccttgaagatgcggggagggcctacagacatgttggaattcaacaattaggtatattttagtgtagcctcatagtgcagcgacccagctgtaaagatgaagtcactcattcctgtaatgatttgctagcttgttgaactaaagtctagagttgaaaattctgctccttttgaacagtgatctaattgtgaaacggacagttggctactgacagttttcaaatattagccagttgctgattttaaaaataactgtgagaaaggaagaccaaggtgagaagagactaaaaatcaaacagtcacatgaggttttgtatcttcagacagctgaagaaacccgacaacctacaaagatatgatatttgcttgggtagttgtagttcaggtgtttccttgtgcaccgagcccctagtgcattgctcataataggttctggggcagaggtacctgctcatagctccacagggtcataagcaactttgaacacccccaggagccttgttgttgggcgtggtgggaaatgttaattggcctctgagtgaactaggaggtactgttaggattcttatcccttgataaacttactccctgtggccgtcttgttaatatttaaaagtaaagtgtaaatccattacaggacaccataatttaatatttgttgcatttctgagctatgtggttgccagcatagggtcagtatcctaaggcctttgagttttctgagttttaactctcagcttgactgtggggtgtgtgggcttgggaattgacttttgtttgagagtaacagcaatcttaggaattagtgatttttttggtccttgcaaatgttactgaacacacggaacaagccagccaccaggctgctcgtggaaggggaagggaggcaaagttgggtttggtccccctcccctgctcttatcccctccactcccttttcttcctgagctcatgcttttgttgtgatagattatttttcccgggattttttgcttttgaaatcttagtttttgtgtctttgcacctagccagtaggagcagcattgtctgagatcttagcaggttccagagaactgtccattgtgggtagagttgggagtggcaagaactgaaattccagaggcaggagccaggttttatggacttttctgagtcatactaagcatgaggaatttggaccttgaaagtggtggaaagccattgagagacaacaggaggatatatttatcatttcttttagttcacctatgacattataggacgttataggtaaagactaaatgcaattctttttcttcttcttcttcttttttttttttaatagggatggggtctcgctatgtttcccaggctggtctggtctctgtaactactgggctcaagtgatcctcccacctcggtctcctgtgcctcccttccccttccatgagcagtcctgcggctggcttattcagtaacatttgcagactcactaaaaaaagttactaattcctgggattttgtaattccaaagtgttgggattacaggcatgagccaccacacccgaccctaaatgcagttcttgattccaaagactaaagaatactttacgggcatagaaaaacccygcagtgctttaacttcttatgtgaacattgctagggtctttattccctctgtaacaattcctggcccatttacaggatttttaatattagtatactttgatttaggtttagttggcaatctagatacatcccaaaccaaacttttcccacatcttttttttttttttttttgagatggagtcttgctctgtcgcccaggctggagtgcagtgacacagtctcggctcactgcaagctctgcctcagcctcccgagtagctgggactacaggcacctgccaccacacctggctaatttttttttttttttttttttttttgtatttttaatagagatgggatttcactgtgttagccaggatggtctaaatctcctgacctcgtgatccgcccacctcggcctcccaaagtggtgggattacaggcgtgaaccaccatgcctggcccccagaactttttattatgaaaaaattcaaacttayagaaaagttgcaagaataacacaataaaagcattatcttccatctggagtcaacagttaccactattttgctttttttgtttgaactgtggctctgctttctccactgagccacgttaaattgttgataattatccaggcagttaacctttaaatacttcagcacacatctctttaaaaaatgacattctcctgtttaatcaaagtactattattgcatctaagaaaattaacagtactttcataatcttttcaatacttgatcttagccagaaggccgagaagtgatcataatactttctaatatccagtcctcatccagtggtgctcagaatgttatttgtagctgcccccatccccaaaataacatattacatttggttatgtctgttagtctttagtagctttctcaccccatccactgctcattgtagtaactctttgagaaagagttcaggccagtattattgcatgtcctacattctggaattgcctagtgtcactttgatgtgttccctagttttctggttgtttttttttttgagttggagtctctctttgtcacccaggctggggtgcagtggcacgatctcggcttgctgcaatctctgcctcctgggttcaagcgattctcctgtctcagcctcctgagtagctgggattacaggcatccaccaccacgcccagctaatttttgtatttttagtagagatggggtttcaccatgttggccaggctggtctcgaactcctgaccttgtgatccgcctgcctcggcttcccaaagtgctgggattacaggtgtgagccactgcgcctggccaatccactgtatttttgtaaaccagaagataagtctaagagcttgattcgatttaaattaaaagtttttggcaagaatactcagaaggtaatcttagtttgttctagttggtgataacccagtttgggcacttggttaagtgrtacctatctgatctctccattgtaaatgcacgtttccccctttgcagttatgtgatctgtgggaagaatttgtttttgattttctttccaaagtgtagccttacaagatttgttttttgtttgttttttttctggtttgttttcttttttaaatccaagcctttgcggaggtcgaggccaagccacccaccttggcttctcaaagggcttggattataggtgtgagccaccttgcctgactccttacaagtttccatcaatcatgctcttccaacgtgcctttgtagagtaggttggcccttctgtttctgtggacttgggtcttgaattgctttaaaatgtgaacattacttagctaaagaaagaaaagtttatgtctgatcaagtgacagagtctgtctgtcataatagatgacagaaaaataatccagcattctgcatggcccagagaacccgtttctaggactacaagttgatatatgcaaaagacaagccatctggaggagaggaagggtttcattacccacaaggtgttaaggaaagactttgttttgctaagtgtgtgtgccttagaagctagaaattttcaagtgctttctctggcatcttttgcctttttatggaaagcatggctctgatttcctatgtttgacagtttgggtgttartaccagttggaatgctgccttcttggaagcacttaaattcccaacgagtagataacccattagtctgttacaagcttccaggctaacaataatgtgattaaaatatattatccccataggacatgaagaataatctttccaaaagagaatcaggagggagaccaaagaacagtatgtggaagaatatgtttggatggtaggctagatagaggaaacttgcttgatgaagttaaagctagaagcaccaagagctttaggatcattatgaatcatttggggtaggataatttgggrgtagaataacagtttgagattaggggaattattagggtctggagcaatgaagaggggaggaatctcttactaaggcagaaggttgtgtttttgtgcttcccccgaccccatacaaaaatktattgattattgttttaaaaaaaatgaaaagaaaaagaccctgcccaaaggcagcattcctaaagggtgctcataaagtagatgctgtgtgaaaaggggttctcagtaactttggaaactttgaaattttgggtcagttgatttaaacagatttggttactgcagtttttcactagtggaacagagaacctccttatcttacagggttctgatgttcatggaaatgttgcattgtaacaaagaaaagacaacccagatgacctgtaattctgccacacagagataaaaaacactgaacatcttgataagtgatttctaaaactgttctaggcttatattttcctttgtgtctttaacacaaatgtgatatactgtatgtagtatatatacaatgtatatacagtcttgaatcaatagcttcatctctgcttttattactgctcctagcgtaaattatttagcacaaatgcagacataatctcagaaaattattattttttgagacagagtctcactctgtcactcaggctggagtgtagtggcatgatttcaactcaccacaacctctgcttcccaagttcaagtgatccacctcagcctcctgagtagctggggttacaggcatgcaccaccacacccggttaatttttgtattttttgtagagatggggtttcgccatgttgaccaggctgatcttgaactcctgacctcaggtgatccgcccaccttggcctcccaaagtgctgggattataggcatgagccaccgtgcctggcctgcacggtatgatttttaaatagtgagtacttctaaaacaataatcattatttcagtgatagctgagttagtcatggtctgattttgccataattttttttccagacccttttggtgcatagataggttggagttttgcttttataagtagcactgagataaacagtattgaacacatttgttatttatccaattatttctttaggatgaatacctgaaagtaggaactactgggttagagtatgaacatttcactttgatctgtattgccaacctctctagaggttatatcaatttgtttccatcaacaaggtgtgggatacctgttccaccaaagcctctgaatgttggtgaggctttggtagaacaggtatcagtcttttgactcatttagacaagcagtttgtagtgtcaacttaaaattttacgttacatgtttgcaaagggttagaagaaacttagttgtaggcagatagcagttcagtgttgaagaaattcaactttttgctatagaattgcattcttttaaaccctcactcaatcagacaccatgatgcatgcctgtagtcccagctgcttgggagctaaggcatgaagatctcttaagctcaggaatttgagaccagcctgggcaacatagtaagaccctgtctcaaaaaaataaatcattactgttgtaaagaacattggtaaaacagaaggaaaaaaggtcatctcacatcactgttactccctaacagcaaagcaggttggtaaatttgcctcaagtctgttttagcctgatgcatgttcttattccttagcaatagttgtcaagatatagcagaacttttttcatgttgttaaaaatgtgatagtctatgctaaatattatacataaggtgtatggtgataaggttgcatagttttcacttttaaagatgtgtaagattccgtcaagttttgtgtcacagtttatgtgctgttgttttagtaagtgaaagcaagtttattagagaagaaaagaaactggctactccacaggcagagcagcactgagagctgctggttgttgattttgagttgtttcccaagattttgcttttagaaataatgtaagtaaaaactttgtgcatagaatagcctcatatttaggatactttgctagctcagaaggtatgagcatttttatggctattgttgaatttgcaaatagttttcccaaagggttataccagtctgcacgaacaccagcacagttggtgaagtatcagtttcactatgaccttttctggcttatagcctttttttttgtggttgcagaaaaaccagtatacttctaccttaaaaaagcaaggcaactcctccggctatcacagcatctgtgtgccaagctataattctttttttttttttttttgaggtggagtttcgctcttgttgcccaggctggagtgcaatggcgcgatcttagctcactgcaacatccgcctcccaggttcaagtgattctcctttctcagcctcccgagtaactgggattacaggcatgcaccaccatgctcggctgattttgtrtttttagtagagacggtgtttctccatgttggtcaggttggttgcgaactcctgacctcaggtgatccacctgcctcagcctcccaaagtgctgggattacaggtgtgagcaaccacgcccagcctatgtaattctttaataaatagctaaatgcctactatttatcagaagttgatgaagaaaagaataagactgtctgtactcttaaggagcttacagtctattggaagagagagacatgctcaaatttgtagaggtcatggatagaagttggtgtatcagttgagaaagagcccaaagataggtgtaggcagttctaatcttgggggtgggatgataccaggaaaagctaggaaagggacattaaagcttagtattggctgggcatgatggctctcacatgtaatcccagcagtttgggaggctgaggcaggaggattgcttgagcccaggagtttgagaccagcctgggcaacaaagtgagattctacctctacaaaaataaaaaaattcaccagatgtggtggtgtacgcctgtggtcccagctacacaggaggctgaggcaggaggattgcttgagccaaggaagttgaggttgcagtgagctgtgtttgtgccactgcaatccagcctgggtgacaggacgagacactgtctaaaaaaaaagcttagtatgagcgggtgtcacaaaagcacgttcatacagaggaggtgtcagtgggggtgggaggctggaaccacaaggcaattcagggacagggattggtcggtggagtgggggcggtgacggacagagattaggacgagggggtgcggaggtgaggggagcagagcctttgttctggtttcagttccacagaggagtgtggcagtgctggtcttgtgcctctagcacattcccatcagcaacatccgtcataccctgacgccccccccacccccacccattctccgcagggttgttttgataagtgtacgtgttcagtttcaatggaaccagcaagataatttacagttttctcccacccaagcttatactgaggttatgtggctgtgcatgtggatattggtacttctgagggttgataactggtcatgctattaagaattttgggggaagcaaagctgaagcttagatcagtaaagtacttaccataggctacccagccatcyagtatctgtttagacagcattttcatgtctaatcttatgtacagtttaataatttaacagatggtagactaataggtcagtggaaatgtttatagggtacttcatagctgttaatttttaccacttggatttttttaatagctaggaatagtaattagggtgaaaaatgaaacctacgaatgactttgtgatttttctgcctcaaatgagaaggattaggaaagcaaaagtttcctcaaatcaatttttcccccaaaatatttttttgtattatttactttgttaatgtgtgtatgtgtcccccctcctcccagttctctttaaacactttttgtatgaaaattgtcacacggttgctccaaaatatttaaatagataagacaatgggtgtaaattttgctgccaaaaattccttgtatcttaaaaaagctgtattttctctcttaaatgtatgttaatgtatgtaatgcatagtatgagtatccagcattttaagcagatttaaaatggaaaaattcatgattcacattagagcttcaaacttataaaatttgggggatgcattatagcgtgagtattggcacccactcctgaagtggaatattggaagcctgaaatatatgacatgttgacartaaagatccaggtaatattggccatgcggggtggctcacacctataatcccagcactttgggaggccaaagtgtgaggactgcttgagccagggaggttaagactgcagtgagccatgatcgtgccactgcactccagcctgagtgacagagcaagatcctgtcaaaaacaacaacaggccgggcgcggtggctcacacctgtaatcccagcactttgggaggccaaggcgggtggatcacaaggtcaggagatcgagaccatcctggctgacacagtgaaaccccgtctctactraaaatacaaaaaaaattagccgggcgaggtggcaggcacctgtagtcccagctactcgggaggctgaggcaggagaatggcgtgaacccctggggggcgcagcctgcagtgagctgagatcgcgccactgcactccagcctgggtgacagcragagtccgtctcaaaaaaaaaacaacaacacaagccaaaaaaaaaaaaacacttcaaaaagatccaagtaaaaggaatcaaacaaagtgtgggcagcatagtagctgtggattcaggggattgagcatctgagaggcagtagagcatgtttgttaaaaatctggactctggagacaaagcctgctgtgaaatcttggctccacatggtcagattgcgtattcagacctgagtttttttcatctctaaattgatggtaacaacctgcctctcagttattgtgaggatgaaatgagataaaacacaggcatttggaaaggtgctggcacataaggactcaataaatgcattattagttgtataggaatccatctctttataagcagaataagcagattctttctttacctgttgtgcagagcagtgaacactgatcatctgcttgtttrggggtaaggttgaattatttttcaggttgtgctttttccacaaaatattggtctaaaaagataatgcaggttttgcagatactctagcatggcagaaatcaaacttcaacattcctttggcacattttgtttttccttaatttttattgtgtcttatctgtgtattttgtatatgggggaaggagagagcactagcaagcatgagcgtgagagggagcctcctgttctatttattcattttctgcttctcttctctttagattctcttcccttttccctgttctttatgccaaaagcatggacatgctaaagaggtagaacctgtgatccatagattggctccagtgtttttctggaatttatttgactctgttataaatcccacattttatagtgggatgatgatgtgagtaaattcagagaaagaaaacccagtctaacagacccccctgagcaccaagcagcacctttgctgagtgtcattctttctggctctggtcagttgtgtctagctttatatcttgacattttccctccactctacatgccatggagatgtggtgttcctctgcattgctccatgtagaaagtacagtctttgctaagattcaggctcccaacttttattaatcacctgggggattctacacacagaatcttatttagttcatctaagaatttagatgtggatactaaaaagttcagtccttaatctggagccaggaattttgagtagggtaaatttacttgttccgattgatacctactcattggcccactggaaatccaatcctggaccgtttctgcaatgtcgtggctttcagaatcaagttcagaccccaagtatagtgcgtgaagccctttcgctcttgctccccccatttttctagcctcccgtctcatgttcttgccatatgcaaccttcgctccagccatatgaaacttctttgattcctcagatgtatttccccctggatggctctttgttttcatttatgctgctccctctcctgcttcagtgctcttctttcaggaccatactctagaattacctcttctgagagtattttcctggcccctgctcccaatatgatctagtagccactctcctgtacccctgaacaaacgtgactattcttccattgcaaggtgatggcagggactgtgtcttacttgtatctctttatctttagagtatagggcagtcctggaacatcttatgtatataatgagtgttgaatgaatgtatgtctgaattacagtttgtaacatttataaaagaattcatcatctctttgtagctggtgttttatagaagtgtaaaaagtccttaggacttgatgtttcttcattattattattattattattattattattattattattattactactacccccccaccccccctttttgagagacagggtcttgctgtgttacccaggctggagtgcagtgacatgatcataactcactgcagctcaaactcctgagctcgaaggattcttctaccttggcctcccaagtagcttgggagtacgccatcatgcccagctgatttttaaatttttttgtagagacagagcctcactaggaacagcccaggctgttctcaaactcctagcctcaagtgatcctcctgcttaggcctcccaaactgctgggattacaggcatgagccactgtgcccagctctgtttcttcattaaataaagttgggaacttggccactcctggagagtaagtggccactttacttttccccttttggagaaagcttgaagtccagcagaacagtaagccacttaacctggcagttgcaacacattaattaacaaccttttatttttcttttggaaaaaaattgcaaatctgtagagacattgagaaaatagtacaataaatatatgctctacacctgagttcaccagttggtagcattttgtcacatttgctttaactttttatatgcatacataagctcatacatgcatatgtgcatatgcacacatttttttcagaagcatttgaaagtaaagttgtagacatcatgatgcgaaacctctaaatacttcaatatacatctcctgagaataagcgcattatgcataatcacagcactatgattacacttaagcttaacatttagtaatatctgatatacattccatgtttaatttttctcacttgtctcaaaaatatctattttagcactctgatttttctattcagaatttagtcaaagttcatgtattgcgtttagttatgtctctaatctagaatagcccctgcttttttttggtccagatcagttattttgtagaatatcctatgttctttcagcctgaagaatctaaagtgtgtgtgtgtgtgtgtgtgtgtgtgtgtgtgtgtgtatttggagacctcatctctaaaaaaatataaatgttagctctgtgtgtgggggcattccgctgtggtcccagctcctcctgaggctgagttgggaggatcacttgagcccaggagttggaggcttcagtgagccatgttcatgccactgcactccaacctgggtgacagagtgagatcccaactcttaagggatattctagatttatcttcttgttttctcttcagtagattagcaagaatattatataggaagtaaatatcttacattgcattaggagcctggaactgtaggttgttctaatattggggttgctgagttgagacatttggtaaagggatgacctgctagatcttcctcttatgcagcaaaattacaaatgtcagttgtgatcaacatgtaatttgtggggtggtgcattgaatatgtgttttgactatcctcttcaacaaccctttcacctgagggttttagcatccattgatttccatgtcatgattatgacccaaatatgactgtaatcaacagacctgctaaacagagttccagattctttacggttctttttgtccttacagtatatctctcaaagaatgtatcggagtacttttccgttggttgtgttttcagtacaatgtattattagaattatttgtttgtgtttgtatttagttttagggtttgcccatttttcatatatatatatatatatatatatatatatgtatatattttttttttttttttcttgagatgaattctcactatgttgctctggctggacttaaactcctgggctcargccagcctcctacttcagcctcccaagcagctgggaccataggtgtgtgccaccatgcccagctagataatttttttaatacgtaaatgtccaaaatataaaaggtgtactcaggcctcagtcctaccccttcatttttattagtttctggtttactcttcctatgtttttttttttgtaaaaatatgtgagtgcatatcaatttccctttattaagtagcataatatgtcttggaagtcaattcatgggttttgctcaccttatttttggggaaggtaaattttgttgacatataacattaaaatgtgtacatgtaagcaaaaagcttggtgaatgtttagaaaatgaatatatctgaataaccagcatccaggttaagaaataagatgaccagaagccaccttcaactctcctgcactccagggtagccattctcctgacttttatgttgtagattagctgtgcctgtttttgtattttatctacatggaatcataccacatgtgttcttttgtgtctggcttctttgtgtcacataaagtgtgagagattcattcacgtgggtgcatgcagttctagtttatttattcctgttgctgtatagtattccaaaatcggaataggctacaaatatttaatctcttctgagttctttctagttttggactataacaaatgttttctcattcttttttatggtctcatggtactcatccatgggagtgagtataaaaatgtattcaaccagtctcctttggatggtcatttaggcttttttccctagtgtttttctactacaaatattattgcacaagattttgaataaacttgtgcattatagtatggaacatgtttttaaaagctttatgaggaatgagagtaacagaacattttggggggaaagctaatctttttggcagtgctgctcaattggtggaaaggaatgactgagcttttcttaggaacaggttagtgcagtaaaactggttaacttacagtattttgggttcctctcagaaaggaggagggggctaatgcaaaataaagagaagggcttgaaatccatctccatgcctcctggagcacagccaagttcagaaaactctatattgtctcaacttattattattattttttaaattcagatatttattatgcatcctctgtgttcccaacacaccattctagccactgggggtacagcattaaaggaagtaggcaacagccttgccctaatggagctcacattcttatgggggacaagataaattttaaaatatgttgtatgttaagtagaaaaccaaagcagaggagggtgattggtgtttgggtgtgagtgtgtgtgtgttgtatgtttgcatatgttgggggtgagatacagattgtaaaaagtggtcaggaagggaatggtttcttttctggttctgaaccctcttttagcttaccaagccaaccacagcaaacattaaggatacacattaaggttcagtgagaaaggaggaggttttcctgttagaatcagaagcagagaggaagaaaggcaccattgtgtggccaagaggtggctgaagggcaggaaacccagtccttcgcccccggaagctgtccagttaagccatggcccaaggctgctaacactggcatctgaatggaaatttctaattgtgtagacctgaatggggcttatttttctcaactgaattatggttatatataagagatccctcctcctagatatgaggctggataataattacattgtctcatgaaagtgtaaaacaaattattagtaagtgtgaatttgtgttaaatgttgtcgcatttaccacactgcattgtaatttgttgaattttgtctatacattactcatctattcagcgttgccttatgcatacttggcctccagtgccctcgtacggtgcctgaaaagcacacagtgaaggaggtgctcagtagagactcgttgaaactggaggatttaaccactgcacaccaacttaaaattgttttttttaactgtgattcagccactgttgcgcaggaccatattattagaaagtactgctttcagaattttcaaagttagctgggtgcggtggctcacgtctgtaatcccaacactttgggaggccaaggcaggcagatcacctgaggtcaggagttcaagaccagtctggccaacatggtgaaaccccatctctaccaaaatacaaaaaattagctgggcatgatggcaggtgcctgtaatcccggctactcaggaggctgaggcagaagaatcgcttgaacctgggaaatggaggttgcagtgagccgagacgcgccactacactccagcttgggcgacagagggagactctatctccaaaaaacaaaaagaaaaaaacaaagtaaagctcatcaaaatatatgcagcaactcagttcacctctctggttttgatttctctaaccatatgaccttgggcaaattaccccctggaggacttgacttcctaatctaaaataaacactcaagatgatatctacttcacagagatgtgaattttgaatgagataatttagattgaaagcaacatgtgtatgcatatgtacttcctactttaggccagagccatggcctaagtttattaacaagactgctttttttgttgttgttaaccaaacagcatctcactgttgcccaggctggagtgcagtggcacgatcatggttcactgcagccttgatctgagtgagtggctgggactacaggcgcacactaccacactcggctagtatttttaaaatctatttttgtagagacgggattttgctgtattgcccagctggtcttgaactcctggcctcaagtgatcctcttgcctccgactcccaaagtgctgggattacagatgtgagccactgcgcccaaccggtaacaagacttttaatagagacacctgaaaggtcctacagtttgatttgtataaccaactacatgagcattgcacaggagaagggcaatttagcatctctaaaaagattaaggggattttgcttctagcaagcttgatatgaattagtaataggatgtgactgctgtttaccaacaacattcagcaaagattgattgattgattacctaaccatgtaatggacgtttaaaaagtctattcatagaaatatccaaaactgaatttcccaaagtaagttctgcagagactcacttgatgttctggtttgggaaatggcaggctaaataactaaacatctctcttctgggaatttctgggccttgagttattgtgcattgtgaatctccaaaaaggggcttgcttttacagatctttggtaacaggtggaacagggctgctggtggtttgtgtgtttctaggctcatcctattgcatctggacaactccgttagtgtggtcacaactctttgtcaagtgtagacaactgggccagtatgcagagagcgcagcctggatggggagtgaggttgtgatgatgaagttgtgatgatgaagatgtgaagttgtgtgaagttgtgatatgggaggggcacacatagaaggggcctgagtgggagagggtgtctggggaaggttgagagagaaccagtgggcaaaagtgactgggccagcctggccaacatgctgaaaccccgtctctatgaaaaatacaaaaattagccaggcatggtggcatgcacctgtagtagtcccagctacttgggaggctgaggtatgagaatcacttgaacccgggaggtggaggtgcagtgagccaagactgagactctgtctcaaaaaaaaaaaagaaaaaaagaaaaaacaagtgactgggaaacattttgtacccaaccaaagtaggttttctttgctgatggccatattttccctgttgactctgtgttcttggaggtcatagttccccagtagtgggaagcattcgatgatattggtgagtgttccttaaaatgccatccaatcccaagttgtggatttgtgattatttccttttgtttggcaatctttactccctcagtttttatttttttagcattgtgctagttcctttcgataattagaaaaaaaaatactatgtggtttacgttaatttattagttgaatgacgagactaacacgagacagttgttagtgaattaagtcaacatggaaacaaatccaagttttgatagtctgtaatagaccatcacagaaactggagaaggggggagactgacacggtactgaaagcttcctcaagaggtctgtgaactggggtttgaaggattaatgggatttgcacggcagaaagaatagaccccttgctgtagcagcagctcagggataaaggcaagagacgtaaaagacttttgagcagtaacagtgtggataaatctgtaattaagaaaggtcaagaaagatccatctggcagctttgtgcaggagatgaagatgtgagagctgtctccttaagagtaagcatttaagccatgtgggtgcttgaaatctttcagagagaggttgtggctagaacatggatgagtgaggtataaaagcttagtggttaagagcacagacacacctggttcaaattctagtgctctcagttgacctttgtgaagatacttggagaaactgaagcctagaagttgtttgtaaattggatagtattacttgcctcttaggataattatgaggattaaatgcagtaaggaattatgtaattaagtactcaataaatgttgcttatatttattatgtggccagagttccctagagcagtggttatagaagtgtggtccttagtccagcaccatttatcacctgcgagcttgttacaagtgcacattcatgggccccactcagaccagatgcatcagtctgggtagtgggacctaggaaacaggcttcttaaaagcactctgggggatgggtgggaaacattagagaatgactgccctagaggaatcctccagttgggatgcaaagctaagaaagggagagtgtttaaaggaggggctaagcaactgtgtcctttgcagtgcagaggaaaggaggtagtgagttcttggcggcaccttactataagctttacacaagattttcaataaatacaataaaagctttacacaaaattttcaataagacaactggtttagtaatatgttgggatgaaaggaagatttcagggcagtgggaacatactgcacagcccaaatgattaaaaacaacaacaacaacacaggactgaattagaaatgtgatattagatgaagtttaagtcttaggtttaacaagtatttgtggactgcccccctactgtgactggcagtgtcctatctgctggaaatagagaatgaggtgttactcctgctttcagagacttcacacagttatacttttttttaataattggaagctgtcttttttccttaaaatctttcctagctactagagaataaacacaatatctgatctattctccgacggtgccagaagttaagcatagggctgtctcccaatcaatgcaaggccgcatttgaaactgctccctcatttcggaaagcattctgaacactggtcctttttgcttattattttatggcttgggatataccttaagagatgatttgaaatctttcgaaagatttcaatgtccctgtttaatgttggccacgtggggtttttgacattatgctaacccaccccacctctgtcattcccagtataaagcaccaaaagcactagcttgaaatacagtgacttctaagcttcgtccattattccattcagtcattgtttgctgcgcattatgtacaggatactgctttaatagtgatgaaacctaatgtcagccaagtgttttgtcaaagagccggaatccacatcccaaggccagatgtattgagtgtggaggaggcactggggcctggtcccgaggttagccaagcggttagatgaatccacccccagacacccacaaagtttagatttgtaaatgttccacccctgtaacacatccccctttcacaatgacaaaggcaatttgagggaattagagtgactggttaagaaactatgttttacaatctcactgtttcttgaaaatagatggcatagcagtggagtttgcaagtagaatatagggattacattttgacgtgtttgtgagcttctagttttgtatcatagagagacttcaggaaaatgcaagtggagatcactttccaaagaagacaagattggcaggttaatctgaacactcatttgttaagagcatgttttaattgaccttggactgtgctctttccctattgctttggacttttgggctgggatgggtggatagtgaggactgcaaatagtctttcgttactcctttttctttccaaatctcccaagggtaagtgattggagcctcagtctaccactttgaaaaggttgccaagaccagaccgtggcttcagaccatggcttcagtgcttctagcagtcagagagtcagtggtttcttttctctatgaagaaccatgaactaattctgagaaggtgaacttaaagagagcagaaacctttaaaaaaaaaaagttttaactaattcataaaggtctttcttctgatgatcagagtgctagaatacagattgggtatttggagaagagatggaatatatttttttttaagttgatgctttttctagaactgyyggatattgacagaaattcctctaagctctactagctacccaaaagatgttggtgtcctgaaaggtatggaaaatagagttatggtcatgtagggttttaaaagaactaaaagaggctttaaaagtccaaaaagaaaaaaaaatccatagctatgtggtgtgtttttttaaatgattgcttctgaatccacctctttttcccctttttgctttctgcagtgaacacctacctcttcatgatgcaagcccaaggcattctgatccgggacaacgtgagaacaatcrgtgctcaggtttatgagcaggtgcttcggagtgcttatgcyaagaggaacagcagtgtaaatgactcaggtatatttttagtaaagaggtggtctgattagaatgtctcctcccaagagaggtaaattcggttgcaataattattttcaatgggaaaagcgcattgtaaaagagggatttggctgagttttactttactgctaaaaaagctcttgccaaatgaatcctcgttcatttttgttaacaatatgactcagtctgtttgtgttgctataaaagagtacttgaggttggataatttacaaagaaaaaggatttatttggcttatggttctgcaractattcaagaagtgtgatgccagcgtctgcttctggtgagggcctcaggctgcttccactcttggtggaaggggaaggggaagcctgtgtgtatggtgagaggaagcaatgtggcaggtgagaggagggcagggccaggctcttcttaacaaccagctcttgtgggagctaatagaggagaacctaccgcaacagcagcaagccatttgtgagggatctgcccctgtgaaccaaacacctcctgtaggccccacctccatcattggggattacatttcagcatgaggtgtgcaggggacagacatttaaactatagcataatacattaagagtgactggatgactacttctttttttttttttttttgagacggagttttgctcctgtcatccaggctggcatgcaacgggtgatttcggctcactgcaacctccacttccccagttcaagtgatactcgtgcctcagcctcctgagtagctgggattacaggagcatgccaccatgcctggctaatttttgtatttttagtagagatggggtttcaccatgttggccatgttggtcttgaactcctgacctcaagtgatctgcctgcctcggcctcccaaagtgctgggactacaggcataagccactgtgccagggctctttcttttcaactctttcaaaaactgaatacaggaaggaagtaatacttccacatgattaagtgggactctcttgaggcctctctagtccagccagggatggtttttatttaaaaaatagattctgagatttcatcttactaaggattcatgattcgcctcatttctgtaactgaggactaatgtgctttctgggtttgtttgggtttttttgagatggagttttgctcttgtcacccaggctggagtgcagtggtgttaatctcggctcactgtaacctccacctcccgggttcaactgattctcctgcctcagcctcccgagtagctggggttacaggtgtgcgccaccatacctggctaacttttgtatttttagtagagacggggtttcgccatgttggccgggctggtctcaaactcctgacctcaggtgatccgcctgcctcggcctcccaaagtgttgggattacagacatgaaccactgtgcccgagcttttttttttattctcttgagatggcatctaagtttgtctcccaggctggagtgcaatggcatgatcttggctcactgcagccttgacctcccaggctcaagtgattctcctgcctcgtcctcccaaagtgctaggattaaaggtgtgagccaccgtggctcattttttgtattgtttgtagacatggctaatttttgtattttttgtagacacggctttcaccatgttgcccagtctggtcttgtactcctgagcttaagcgatccacctgccttggcctcccgaagtgctaagattataggcatgagccaccatacccagcctcctatggcttcttaatgatttcgtctaagcccaatattttaaaatacttacatttaaaaaaaaattctccctctaaatcagtcctctcttcttctctaataagttacaagatttttggaagttcactgtcgaatgtgaaattgctttgcaaatgttgcaaatgcgaattattctgtggcgcttagaaaatcaagagaaagcattgcctctcttaaaagaattgcctctccttaaaagaattgaccacatcctaatttatcagtttcctttgccgtccactttagcaacagaggactgtagttagcaaactgataaacttttgatactttcttgttggcaaagaacaagtgaatgacatttcagagctttttagacaaattgtggtcgcactgggtcaagttacctgagctctgaaccatacctgggagaggaaaccctgcagtttccgtcttgcatgtggtggtaggttttgcacaatccgcacacacattctcactcgactcatgtggctctgtcagttaaggcagaattttatgctgtttgcatttttcacacatagtacatataatcttggggaagatggcrcagcttgatcatgtgactctttccctaaaccctgccaaaatcctgcttctagttaggtgaagaaacgaggcagtactgactgcccttccagagcgctctcccctgtatagcactgagtaagggaacatttgtgtcctcatgacatttatccagtccagatgtcatacttctgcagtgttagatgaggctggaatatctgtctctctgggcatttggcagtactggcagttctctcagaagttagaggggcatgcagcaggaccccatttccacaccactgccggtctggcaacacaggattgcgctacttcctgagttgctgtctttgaaaactgagtacagaggtgagtttcacccttggagggtgtatccagtgacccgttattattgaacttggtgtacttttattctcaaattatcatacacccaaataccttttccttgcatctctctggttagaacaatctattttttgttaaacgtgtttatttctctaatagattggaagtctgtgccatcagggactctcttactgtttattagatacttgacttacatgatttcatgtagtccctcacaagaacccagaaggtagctactgtgtccccattgtagggataaaaggaacaaggcacatggaagtcatggaacttgatgcagcagcagggttagggtttgctgattctctgactccagggcctgtgccctgaatcgcagtaatggcttcattccttttgtcatctttgtatccttagtaccttatacactgcctcgcacataggaagcacttggtaagttatttttgtatgcatgaaggaatgaatttaacaagaaagcacgtcttaagtgttgtagcatgtttctaaggaggtcaccatcttgtggagctgctgtgtcactggcacatctttggcgagtaagtacaggttgagcatccccaatcagaaaataccaactccagactgctccagaatccacacatgatgaaaccttgagtgccaacacgacacttgaaaaaaatactcaatggagcattgcagatttcggatttttagattggggttgatcaactggtaagtataatgcagatattccaaaatcctaaaaaatcagaaatctgaaacacttctggtcctaagcatttcagataaggggatactcaacctgtactgaaaagaaaatagcatttcactgaaagtgtatttaatgaaaacccatcattcttcttcatttcaaagcagttgtctacctagcacagtcagagagggtattctgggcccagcactgctgagacagccaaatgactgacacctctggcccgaccacttctgcctggagcactgttggcttaatggtggtaacctggattatgcaccatcctctgctgaaataatgctgaggcacatacccacattcaggcatctgcattaggccaagcatagctcaaaagcccagggtgacatttaagtcatgctggttttctttaagtttaaaagcaacatggtgattagtgaatgaaaacagacttttggggatggggtctgtgaacctggaaataaacctgaagtggtgaccaggagaagcttcctgttgtcactgaaagccattggtttgtgagattgtgaatctgcagagtgagtaaagtcatgctggtgtgctttgtaatctattaatggagtgggtcatcttcacctctttctcggtggttttagatgtccagtctgtagtcttcgatgtggctaccctcccagtaggtagtcatcctttaatggactaactcttgaagaatgctaattctttatatttcacagatatttgtcccagtggcatctttctagtatatataaatttccatatttttttcaagcagagaggcaagtgtttggtcttttctcaaatgggaggggaaagtggtgattcttgctggggtccattggtcagcactttcgattccttctcaactggatttggtaacacaagggagaaggcaggtttttacctcctccaggtattagggtagcaataccaagcttagctatacattggaattcccaaggacgtttccaaagtactgatgtctgtgcctgactgctagcgattcttatttaattggcctgaggtatagcctgaatgttagaattttgtttgtttgtttttgttttgagacagtcttgctctgtcacccaggctggactgcagtggcaccatctcagctcactgcaacctccgcctcctagattcaagtgattctcctgcctcaacctcctgagtagctgggacaccaggtgggtgccaccacccccggctaatttttgtatttttagtagagatgaggtttcatcatgttgcccaggctggtctgaaactcctggcttcaagtgatctgctcacctcggcctcccaaagtgctgggattacaggcatgagccaccacacccggcctggtgttaggatttttgaaagcttcttagatgattccaatgtgcaaccaaggctgctgaaccactggtgtgaagcaatgctgaataagcagttgctgttggacagaaatgttggtctgcaagcccatgatatcagtagccatttgaacctgtaggtaggagtctgttgttttcccattttctatctatctatcttcttttttttttttgagacggagtctcgctctgttgcccaggccggagtgcagtggcacgatcttggcttgctgcaacctctgcctcccaggttcaagcgattctcctacctcagcctcctgagtagctgggattacaggtacccaccaccatgcctggctaatttttgtatttttagtagagatagggtttcactatgttggccaggctggtctcaaactcctgaactcaggtgatccacctgccttggcctctcaaagtgctgggattacagatgtgagccactgtgcctggcctgttttcccattttcttttttgagacaaagtctcgctctgttgcccgggctggagtgcagtggcgggatctcggctcactgcagcctccaccttttgagttcaagcaattctcctgcctcagcctcctgagtagccggagctacaggcgcatgccaccgtgcctggctaattttttgtatttttagtaagagacacagtttcaccatgttggtcaggctggtctsgaactcctgaccttgggtgatccatccgccttggcctcccaaaatgcagagatcaccgcgcccggcttgtttttccattttctaaatgtaaaagcagctgccttctttgcccttcaagaacatgtccaggtttgaaatagattagatttaaattaaaaagtaaaactgtggctgtagaaattcaacaggcttgtttttctctcagcattttcctcattcagtaggtacatgctttagaagagtaagaagttatatttggaactccaaggggataaggtataaccccacccgttgctggacagctagcaggggagaaaaacaagggctcctcacgataactgcacatagttttaccaggtcgtgagcaattaatttcctctgtctctttcattttaaaaggcctctattgctactgaaaagcagactttgtttgtttgtttgtttatgatggagttttgctgttgttgcccaggctggagtgcaaccgtgtgatctcagctcactgtaacctctgcctcctgggttcaagcgattctccttcctcagcctcctgagtagctgagattacaagtacctgccaccaygcccggctaatttttgtgttttttttttttttttttttagcagagatggggtttcaccatattggccaggctgatctcgaactcctgacctcaagtgagcaccccaccttggccttccaagtagactttattttaattaaagttttatttaaaaatttttaaacaagaaatcaggaaattaagccacccctcccaagatgtagagtaagtttctggaagatttttgcaatagagttgttgygtatttgaggattcttaaaacagtgacatattattaatttagtaatcagaagaaaaataaatgctttttttttgtttcatgctagktgctaccaggcttactgtatcattgtttgaaggaagtagaaaggaatttatctatcttcaaagaaactccaaatagtagaatcattagagttagtgatatcttgtctcttgcctcatgttttttaaattctagtttcctgattaggttctagctctagggcttgggtcagtcattgaccagaatgattattatcttcgtttttgttgatttgtttatgaaaatatacttagtgtaatacttttgggaatttcattgccttctagtgaatgtattgactgtgccaatacatgtttccagccagcgtctcttgccacacatgggcgtatcacaaacacaggcacattttctattacttgtgaggtcttttaatttttttctaaaggagaataatttcatctattagattcatccwgagtaataattaggatgaggggttcttcacatagatttttgaagtagttactaccttcagaagaagattcaacccaggccaggtttgcatgtatgagctgagctcagagaatttctgtgtaaatattatctttaaggttctgtcttggttcatgtttttgtttttgtttttttttaagataggatctcattctgtcacccaggctggagtacagtggtgtgatcattgcccaccggaacctcgacctcccaggctcaggtgatcctcctgcctcagcctcccgagtagctgggaccacaggcgcgcaccaccaggcctggctaatttttaaaattatttgtagagacaggttctcagcatgtttcctgggctggtcttggcctcctgggctcaggcaatcctcttgcctcagtctcccaaagtgctgggattataggcatgagccaccccacccagcctggtttatgtctttatataaattagtctctactattctctataaatgcaggcttagtgtttttcaggaaagctactactgaaaaggacagaaagcattctgttccttcccttgttaagacacagttaaaattttcaagttgcctctcgttgaattttgccccagagtacttgcagagtaggcagcgcagagtaggcagccgtgtgcatatataaaaggattcaatgtgttagccatttgattcttggaaacctgctcatagtgctttttcaaaaatatcttagttgaagattctagaattctagggtacaaagtgaatttgaacaggatgttttaattttcatagaatcagcatggatccaaaaggatttaatattctgtgaaaaaaataaaaacaatacagtatactggaaggatctctcattcagagtttagttggagctctgtcatgcattagccagggctcctggtctgagttctgtgtatgttgttccagttattcatctgtagaaaatgaggttggaggaccctcctcctactctacaagtacagtcccctaggaaaaagacatctgccatcacactcttcatatccactaacgtgactctaaaggggcatacatatgtgagggtttttaaattataaacccttgagaatgagaacacaaaaggagaccacagcaaaaaaccttggtaggtagaaagcagaagaaccactgataaaagacttaacaaacccaagaaaastgactgctcaaagcagcaacaggagraccagcaaccaccccaggatcccccagaagctcaggarctagcaatatgggaagtaggagcaaaggtggcaactaaaataaagggagattgaaagctgttaaaaagcagtcagatacccagacccatttccccatcctggcaagagctggagacttaataaccccagagatggcaaaacagaggctcctcaacctggggatacctggcatgaccacagtatttgaaaagatggggattacatatgccccagcctctttctcttctttcttagtttcaggatgtttatagtcaggactctaccattctggcaggagattcgagtggatttctctggagaatctggtcagaccaggagaaaagacccaaagatattgacactggagataccaataagagaaaaatgactgcaaacatgaaacaagaatatagtaagaaatgaacattcaggaaacaagagctcttcaaagttaaaaaatatgatagcagagatgatgattaaaggaaggttgagtaaagttgaggaaatctcttggaaagtagggcagataaatggcaagackgaaaactggatagaaaagatgagacagaggactgggaggtctcacatccaactcctgttctgtattctccagaaaggcagcacagagtacagaagggaggaatcatcaccgagagaatacctccccccaagcacatttggcatggaagaaggccagaagctgccacacctcctctgggaggatgaagttgagagaatacctaatgtatgtcttaggaggaaatgtcttggtgaaaggcgtrgtgttgaattagaatcattgcatataaaactgagcaaacagaaaaacaagatgcataactttccacatttctcagcgacgactagtacttaacagcagcatcgtaatacaaagactgaagattgtcctaaccacagctatgatatgtgaccgatgggagactggggaatggaaggggatcgtgtggcaggggtggcagaaggaaggggataagtgggaggtcggtaggtaagactgaaaacagaaacatcacgaccagccgtagaggctgacagaggtgaatactgcatataaatgctgagatacttggccaaaagaagggcaagtggttcctttagaaaacagaaatgagaggagggcaactgctgtttttaaaattacatttaattacagttgactgtaaactgagtgctgcatataaacctataaaatcaataggaataggaacactggttaaaatctgccatttggctgacatttttattgatgggttcacatttttagctgcatcaaagcggtagtccagagtcctgtctccttctaccaagatgatagctaagagaaagacttacttggtaggcatctgataattgcacggttgatcacacataccagtctgatcgacytttttcctttacctccctagattatcctcttgacttgaaccacagtgaaaccttcctgcaaactacaacatttcttcctgaagacttcacctactttgcaaaccatacctgccctgaaagactcccttccatgagtgagtacagctctggcctgtcttcctctgcttttaaaatggataaaggggagggcrctcttgatctctctgtctgcctgcagagagaatataaatacctccctgccattggaaacagggtttgtgaaagttgtgctcctggctcctcttcaaagcctgctgcaaggttgcctgtgttcttgggtgccattttctacctttcctactttttcactcttccctttgcccttgcctgtcctttgtaacttgggttctgtttgaacttcctagagaaagtatgaatacagtcattcatagcttaacaacgagggtactttctgagaagtacatcattaggtgattttattgttgggagaacctcctagagtaaaattccacaaatctagatggtgtagcctgcgacacccctaggctgtatggtatggcctattgctcctgggctgcaaacctgtgcagcatggtactatacagtaattgtagctcaatggtaagtatttgtgtatctaaacatagaaaaggtacagtaaaaaatgagatataaaagataaaaaatggtacagctgtgtagggcacttaccatgaacggagcctgcaggaatggaagttgctctggtgagtcagtgagtgagtgaacgtggagtgaatgtgaacgtgaaggcctgagacatgactctgcactactgtagactttatgaacactgaacactttggctgcaccaaatttattcagaaaatatttgtctgtctttaatggtagatgaaccttactattatacctttctactttctaaacttgtgaacttgtaaaaagttttaaaaaaaactgcagccttgaactcctgggctcaagcaaccctcttgcctcagcctcctgaggagctaggactacaagtgcctgttgtcaatgcctggctaattttaaaattattattattacttttttaagaaatggggtgttactatgttgcccaggctggtcttgaactcctggcctcaaacaaccctcccacctaggcctgggcaacacgctgcagtgtgccatgatcgtgccactacactccagcctgggcaacaaagcaagaccctgtttcaaaagggtaaaataatgatttaaaaatatagtataataaatatataaaccagtaacatagtttattatcattatctagtataatgtactctacataattgtatgtgctatacttttttatttttgagagggagttttgctcttgttgcccaggctggagtgcagtggtgccgtctccgctcactgcaacctctgcctcccaggttcaagtgattctcctgcctcagcctcccgagtagctgggattataggcatctgccaccacgcctggctaatttttgtatttttagtagagatgggaattcaccatgttggccaggctggtcttgaactcctgacctcaggtgatccgcccacctcagcctctcaaagtgctaggattacaggtgtgagccactgctcccagccttgtgatacacttttatatgactggcaatgcagtagatttgtttataccagcatcaccagaaacacttgagtaacacaacaatgctatggcagctatgtcatcactaggcagtaggaatttttcaactccattgtgatcttatgcaaccaccgtatatgccatccgtcactggtgaaaatgtcaaagcacatcactgtataggcagtcagctttgtctttttagtataaacctctcactgattgtagtgcttgatcttagaggtgggggtctcactatgttgcccaggctggtctccaacttcagggagcaatcgtcctgcctcagcctcctgagaagctgggactacaggcatgagccaccatgccttgcttggaagttattttcttaacaaagtgctagttaaaacaattcttagatctttttgttcttttttttgaatctcgtgtaagctaaaacaaggacagtaaactcttatacctttcctatacttttaggcttcttaatatggttccccacttctttttttaaaattgtttttttttaagaagtgagatcaagaaaaggaaaatcttacatttgcaaagttgacttttatgcacaaatatagtgaaaatagggaaaatgttagaaatagtcgtgcatggtatttgaacatattctcatccatatatgaataattaattataagtatgtaagttgtgttggaagccttactgtttcatttgcatgtctcaccacacatatataggttttccctttaaaacctgcatttgtctgcatctagatgtaagcttagtttgggaaggctgagatttgtgtatcagaaataggcgttgacaggcctaaaactaatgttattagttcattgtttcagtagcatttattgattgttactgtaccacttcctgacttaagtcagagatgaccagcattctgagttaggacataatcactcagggtcctgacccactggtgaatggattgagagaggtagtgtggctgcacttgcatcaggagcaaacctgacatgactctaagctcagctgcttttctccttcttctcagaaaagctcagctgcagccaggtgcaggggctcatagctataatcccagcactttgggaggccaaggtgggagaatcactggagctcaggagttcaagaccaacctgggcaacatagtgagaccctgtctctatttattaaaacatattaataaacaaaacaaaaaaaaaagaaggctgggcacagtggcccacgactgtaatcctaacattttgggtggcccaggtgggtggatcccttgaggtcaggagttcgagaccagcctggccaacaaggtgaaacctcatctctactaaaaatacaaaattagctgggtgtggtggcatatgcctgtaaccgcagctactcaggaggctgaggcaggagaattgcttgaacccagaggcagaggttgcagtgagctgagatcacaccactgcactccagccygggcaacagagcgagactgtctcaaaaaaaaaaaaaaaaaaaaaaaagctcagctactgttttacttaaagttttcatttctacctggcccctgacagaagcagaactctaaagtcttaattccttgatttgcctcttcaccttgaaaatagtgaggaactgaaatacggtgagatggaaagcagaggaagggacttccatccttgctaaaaacaaattcagctgaaaaagcattgcgctctccagagactaaaaccccaggcatagggaaacctatcattttctgacctcttaatcccttttycccgtctctgttcagagggcccaatagacataaacatgagtgaaattggaatggattacattcatgaactcttctccaaagacccaaccatcaagctcggaggtcactggaagccttctgattgcatgcctcggtggaaggtagggtgtgaagtcacagccaaaatgctgagaagcccacctggggtttgcctttggtccgaatcaccatgggattagctaaccatgacattttgtcattttcatcctaccattccatgcaaatgtagaaacattttagaggaatgggtttccacaaggactctttttgtagatacagaaatttgcattattctgatgaccgagcaagaccctttggtcttcccaccaggaatattaacaaagcaaggggatgagggcgttggtggtctctaatgacccatttgcagaagtcatctacagagtcagtgcttcattcctgttctccattggttactacaagattagtggattaaaaagcaaagttacctggcttgacattgagatttagtttttttctgcctgaccatagtcagaagacatcagtagttttcgttaagctgtgaccccagctgaagtccattctttcaacaagtatctattaaaatgcgtattctgtgccagcctcgttaagtgctgctgatgcagcagatctggaacacatcagtatccagcccatcgctgggaaataaaaacagttgaataaccagcatttgtacattgcacattgtaaggggaaatactgttttgtgaagcttgttttaattgtaagtttatagatgtatttttgtcacagtgtagaatgtgtgttttcctatgagttatggcctagaataaattataggcctactatgtactataagatatggtatatgtaagaatcacattcatctaggtccaagggccaacttgccaacatagatctttgtttagagaaagctgaggacaagatagccagcctcccagaactcccatgggttggtcagcaattcatcaggggtgtcctgctaaggagtgaaagctgagagtcctaactgtgcttcttttgctgtaatycactccaggtggcgatccttatccccttccggaaccgccacgagcacctcccagtcctgttcagacacctgcttcccatgctccagcgccagcgcytgcagtttgcattttatgtggttgaacaagtgagtagtcctttcttttcctttcttttttctcttctgagacagcagtttaggttgctgcaagctaatccactgttggtgtgaagagccaataaaactgaaatcttaggatcgagttgcctgaggtttgaagggggagcagagagcaattctgtgctcctggtttgagatgtctgttgcccagtactgggcacacttgaatccaggagagagctttgttggctcatgaacaaaggcctcttgtattatggttttgttggtgcctgcaggctccagacccaggaagttccccttaagataaagagctgcagcaaggtacagcacagaggatgtggccttggagtcaagagacctcagtgcttgtcatgtctgctgttaatcaaccaagtggcctgggacatttgcaaacttctctaagcctgagggtttggttttgttttaatcttaaaaatattggtagggaaccagatatagaggtcacaaactgaagaagaccgcatggcaaattcagtctgtaaatctttttttttttggtcctgcatatattttatttgcctttagatggaacatgactgtcctactgtggttttctcttgccgggcctactttatatgtttacattactgacttggcttctgtaggcattttgaagtatgtgatccttgaactagaggtgctatatccatagataaacaaaaggttgacagatttccctgaatacactgatcgtcagtctgagggtcttttgcatgctcacctctctctatgggcacacttttgagtctcacagtctgagttgctgttaagtggtcaccctggagcttgccttatactggagtgagaaaaaagctgagcaccactgttcagcaaggctgggcatctgggaaatgctaacggtctatctgccggtcctaagttgggtattttgatagtggcaagggggagtcaatgtagctgtaacactaattaggctgttaactgatttgaactggtttcttcatgagccactgaattctttgtccataggcttgagtccctggcatgctcagtgactgttgtcttagttagatcttaaaaataaaacaagacaaaactaaaaaccactctttgtactagatttggtttatgaacagttagagattggttgatgtgctgaagagcaagtggtaaggagtagaaatggtagtgttgtctcttccctttgtggagcggggtactcttctaaatgctggtacacggttgcatttctgccttcagtagccttgggagagagaagcttgcgtttgctatcacttacatttttaaagaaattggggccagaggtccagtgactttttctttttcttttttttggagatggagtcttgctctgtcgcccaaactggagtacaatggtgcgatcttggctcactgcagcctccgcctcccgggttcaagctattctcctacctcagcctcccaartagctgggattacaggcatgcgccactacgcctagctaatgtttttgtattttcagtagggatggggtttcaccatgttggccaggctggtctcgaactcctgatccgcccaccttggttttccaaagtgctgggattacaggcgtgagccactgtgcccatgccagaggtccagtgacttctgagccacactgtgagttgatttgtggtgttggacctggttacactagcccagtgatcttttccagttggttctaataaactcgtctttaggcacaggaaagacagcaaagattttccttcaagattcttttaaagataaagttctgtttcttttaggttggtacccaaccctttaatcgagccatgcttttcaacgttggctttcaagargcaatgaaagacttggattgggactgtttgatttttcatgatgtagatcacataccggaaagtgatcgcaactattatggatgtggacagatgccgaggcattttgcaaccaaattggataagtatatgtatctgtgagtatcatttcttcttaattaaagaggttaaatctgaaaggatggtgagcgatgtgaaaaggaaatctaattagctgcaacctagatgcccatcaactgatggatggataaacaaaatgtgtgtatccatacaattggagcactgtttggcaggagaaagcaatgaaatactgatacgtgccaaaacacggatgaacttcgaaaacrttacgttaaagaagccagacacaaaggttgtgtatcatatgattccaggtgtctgaaatgtccagaataagcaaatctatagtgacagaaagtagataaatggttataaggggctaaggaggataggaggagcagggggtgattgctaatgggtgcaaggctttgcgggggacagtgatgaaacatgttaatatagattgtggtcatggttgcacaattcagtgaataaactaaaaccattgaatgatatactctaaatgggccaattgtgtatgggtatgtcaattatatctcactaaagctattaaaaatcagtttgcaaaaattaattttgctaatttgatacattcatatggttcaggtcaggagcacagagagcactgtttttagtcctcaaatgagaaccttctagggaaaacagttaccctgtaacacacagatgattgatgtcccacatctcctcctaggcttccttataccgagttctttggyggagtgagtggcttaacagtggaacaatttcggaaaatcaatggctttcctaatgctttctggggttggggtggagaagatgacgacctctggaacaggtacctctgccgttctttcggtgtcttctagaaatgctaccttagactgcagaccaatactatcygataggaatataatgcaagccatgtgtgtaatttaacatgttctagtagctacagtttaaaaggttaaggaaaaaaatgaaattgaccagctgtgatggctcacacctgtaatcccagcactttggaaggccgaggtgggaggatcacttgagcccgggagttcgaggccacagagagctgtgccactgcactctagcttgggtgacagagtgagacctgtcttaaaaaatmcacacacacacacacacacaccacacacatccaagtttttagaaaatatctttaatcttaatttaaaaatatcttaatatcttaaaaaacaaactgtatatcccaacaaagcagctattttcatttttctcctttgacatgcgaaaatcaacaaattataatttagcaattttttcttctaataaataatacgttcattataaaatacaaatgagtataaaaataaattacccacaacaataagtaacatgttaccatttcattgagtttattttgtgtttaaaaagtggcaagtgaacagtaatttaaaatctctgtgtgtcagtttttaaaatcacaaatctcaggattgtgaggattaaatgatgtaatgtgtatagagctctggcatatctgatatgtgataagctctcaataggtgttactgtttttattatatcaacattaaatactctgtaaacaggatcttaagtggctccatttaattcggttatatagatgtactgtaatttatgtaactatttcctggtgtatatttagaatcttttccattttccactatttagagtgtgatatagtagataattcttttgcctgttattcctatttaggaaaaattcctataagcgaatgtagtcattttaaggctctttttttttttaagctctgtcctttaatggatgcaaatagggtttttaaggcatattataactaagtgcccctcctgctaaaggttctaacaaaacttttcacttcaccagtgttctctgtactaaatgcccatttcattggaaccactccaaactgaagggtggaatattagtgatatgtctacatagatttasstgcgccatcacataaggcttgtactgtacaagcttgggtgaacaatcctgtgtgtgagtggaataaagtaatatttttatggagtaagtaaacagtaacctcataaggaacaaatgcaaaatactacctggtatctgtttcctttgtagcttggcttttgaaaagtatgtgtttgttgttaattacaaggactattttgctaataaaaattcaaatgataggctgagcactgtggctcacacctgtaatcccacctcttcacaaggcctaggcttgaggatcacttgagcccaggagttcaagaccagyctgggcaacagtgagaccttgtctctacaaaaaataaaaaaaattagcctgttgtggtggcacacgcctgtagtcccagctactcaggaggctgagatgggaggactaattgagcctgggagattgaggctgcactgaaccatgatcacctcactgtactccagcctgggcaacacagtggaccctgtctcttaaaaaaaaaaaaattagatgatacaagtgtctaagtattaatccccattttgattctattttattccctggaagtaaccatttmtttccgtacttttcttttcttttttgagacagattttctttctgttacccaagctggtgcaattttgctcactgcaacctttgcctcccgggttcaagtgattctcctgtctcagcctcctgagtagctgggattacagacctgcaccaccacgcctggctaatttttttttttttttttaagtagagatggggtttcaccattttggccaggctggtctcgaactcctgacctcaaatgatctgcccacctcggcctcccaaagtgctgggattacaggcacgagccacctagcccagcctattttttccgttcacataaaaactttaattcagttaaaattgagttttaactcagtttttaagaaatgacacaatgagtcagttaagcgggtgagagcttttgctgtgtgtgatttccagggtaagcttgtaacatgtcttgtaggctttggtcactcctgggctattaccgttgtatctaaaagcctgttmtcttggtcttggacagagtacagaatgcaggctattctgtgagccggccagagggtgacacaggaaagtacaagtccattcctcatcaccatcgaggagaagtccagtttcttggaaggttggtggaatttatctctgtctcttagaagtatcccctatactttcatgtccggatatcttagagcatattacagccccttctcctactccccaccccgaggccctgttctgacagctgtttgacagctgttgcatgtattctaactctgaggcagaacagtgtggggatcagaccgttggtgaacattttcaatagtaagattcttcgaaggaaatcacttgtcctatgtcttcagccttgtggtctccacagtagcctttggggaatttgggaagaaacagcttggrtgaaggtccctgaggtgacagagcagtggcgccctttccgcaggctcccgttccgaatggtgtcctgagcttctgtctgggtggctgcagttgctgtgttaccttttctttctttgtgtgtgtgtgtgtgtgtgtgtgtgtgtgtgtgtgtgtcttttctaaattgtggggaagactgtgctctagacaaccaattctaattgctgaaattctgttttcatgggagtaaaatggcactgaatacagagtatgaactttctcatctgttgtatttttaatgctttacctcccacttccccactctctgaccttgggcaagttacctcacattattaagccttggcttcctcatttgctagcaggggctggcgtgagcattaaatgaaataattaagtgaagcacctggcatgaaacacaggmggtgtttctgaccacagcactcagcctggcatagcagaattggccgtgcgcccaccttgtgctgcagaagtgctgccatgggttgcgtcctctgctgtgggacgccctgctccatcctctggctgcagaggcatggatcctcactcagagccacctcttctctgttccctccctaaacaggtatgctctgctgaggaagtcaaaagaacggcaagggctggatggcctcaacaacctgaactactttgcaaacatcacatacracgccttgkataaaaacataactgtcaacctgacacccgagctggctcaggtgaacgagtactgagaggagagaatgtacgtttgctttacccaccgccaccaagaaagcagtccgatgagatttttttttggaggggggagggtctacacagcaagagaacagaaatactgtgtctcatgaaggatcacagagttcagggggaaaatgtgacagcacacgcacaaacgccttcactggatcagccgctggaactgagggagtgagcttggggacttccttcgtcagcactggctttctgttttcacaagacagacgtctgtcccgctgctctctccccatctcctaccccacatcctgtcttagccgcagtctccagaacccatgatgaactgtgatctgccgtggtcctgccgtggtcctgccgtggagcctgtccctacacatgaccttggagcctcttggccttcagagcagaggcaaacccaccacagggcagctgcgttttaggaagagcaaatgaaactccacaccattcttctagatctctggtgttctctttggtttcatttttttwaaaaattaccttctttgggtggggattgagggtggaggggagggtgtttgggaaagataaatagacataaatatataacaatcacttcttgaagaagtataattgtaaataagccatgtaaaatgcctttttaaaatttaattttctagctggctccaattcaaattgaggatttatgtattaggccacttacttggttggcaagtgcaggaactcagttaaaatgcagttgaagaatgtcatctccmgaattgctgtcactttggcgagggagtggatatagggcatgtcacaaaagaacaaaataacccgacctttattgctgggagctggcttctgtccctttcttccccccccccacgagtcttgcccttgacttctgctctggattcactcttccctgtcggccgcgcatgtgctcatcccactctccgctaagcgggaggctgctgttagagcaggctgcttcctgcctaaagcaggcccttcggggctcgctgcacacacatctctggctctccaggcttcgtgttctgtcttttcatcagcatggcggggcggggggcggggggcgggggtgtgtatgggaatccctccccctcttactttttctcttgtggaacttggccacagtttctgaacaatgtgcctacattaccagctggcttcagtgattcctctgtgtccctttttggtttctggaaagattctttgtcaacattagtaactgatacatagaaccaaggagcactcaaatagggagccaggagccagggagctggtgacacttgtgtgctgtggggcagctgggatccaggtaagaccggattgaagctttgaaattagactaacaaagctccagacagcaagagcccaggtgcactgctcacacccccacctgcattttgaagtcatattattttttgttttgttttttaagacggtctggctctgtcgcctaagctggagtgtggtggcacgatcacagctcactgcagcctccatctcctaggctcaagccattttcccacctcagcctcccgagtagctgggactacaggtgcacaccaccacacctggctaattttttgtatttttagtagagacrggggtttcttccatgttgcccaggstggtctcgaactcctggactcaagcaatccgcccaccttgacttcccaaagtgctgggattatgggcgggtgtgagccattgcgcccagccttgaagtcatgttctaaattgtatttgaatttgtgcctctttgtttttccccaaaccaaagccctcaaattgtagtctctgtcggcttctgcagaattctggaaaatgccagttttcctcccccgcccttgttttccataaaacatatttatatattgtgatgaggagtactttctgaagagtacttcgtatttttttttaattgccttgtttgccttcaacttccttgattttcatagtttacatgggtgtgtgtaggggtgtgtgtgtgtatgtgtgtgggttagggcttttttcgttgcatgtgatggttctgtggacatatgatccccacaaactgtgggagtgattggccaggccttgttttktttgtttgtttgtttgtgtttttgttyttttgaagaatagagtggtatttagaaaataaattgcattgcaaagctcttatcggctcatatgagagagcaggttcctgcccttgaaaatgccggtaagctatagcatatgttttttaagacttaagcatttcatgctttaaaataccttcacaagtgaacattacacacagaagttcatttggttttcctttgttttatggtgcatatagcaataaagacccccctccaccctgcaacccccatcccccaccgggcctttgtccctgccttggcttttctccccttctcattctcctctcccctttcctcactgaaggctgtgagttgctttcaatgtgacaacactatgatgtcatttggaaggatttgccaggacagactgattctgagtcctgggtgccgtatgtgtatgcggcagtgttgtcaggcgatcttktttgaagctctatgttgccataattaccatcaagtacacactgttggcaaaaggctaacacctgactttagaaaatgctgatttgagaacaaaaggaaaggtcttttttcactgcttaaagtggggtcrctttgatacctttgcggtcatgtctgtgtctgatgagtgtagaatctctggatgtgcactgtcagtcatgtgtccaccaggcctcgaatatcatatgggaaatgtcatagttaaaaacgtacagccaggcccgtgtgctgttaatagtgtgaaattgtcatgttaaaaaaaaaaamaaaacaggaaccaaatgtgaccttgtgcatatattggtagctgaaaatcttcaaggctactgatgggtggccccttaatcttgtctttgattgctgtgtgcagggaaaggtgtccccgtttgttcatgctgttttggggggtgggggggtatttgcaagaatactcattttgacataataggtcctcttgtcagagatcctctaccacagacattaatagctgagcaggagccacatggattgattgtatccactcaccattgacgatggcattgagcgtagctagcttatttccatcactacgtgtttttgagcttgctcttacrttttaagaggtgccaggggtacatttttgcactgaaatctaaagatgttttaaaaaacacttttcacaaaaatagtcctttgtcattacattatttactcatgtgtttgtacatttttgtatgttaatttatgaatgattttttcrgtaaaaaatacatattcaagaaccaaaccttggtggtcatttctctttgtgtaggacagtttgggtccttgggggtctttcctttttcctttcctttcctacaggagttcaacttaaggcagctcagctgagctctgggtcttgctggggtaaatactgcctgacccgtgctgcaggtgaacgggctgagtaaaaagctacgcagtgtaacagaagcagtcctccactgtgctgcccaggcatgcccacgcttgggttttctttcaagaatcacccaggtggtaccaagaaagttgcataagacacttgagtgaggggacttgggggtgaagggggtggtgagggttgatggagtttgattccagaaggttctctgggatcagtgtagggtttatatgccagattctgctcagagattgtcatcatggcttctatgtgttgaatgtttgccactcacagtattaatagtgtcagatgccggggacataataatagagaaaataagacaggatcagtggactcattaaacttacggtccactggggggtatgattaaaattgtatcctcaatacctggtccaaaaggggaagctgcaggtgacgagtgcatggtagggtgggcattccagttgggaatgtagggaaggtggaagcaagtgagctagggggagacaaggagcgtgtggcacacagctgcagggcagggaggaagccagcgtggctggagtagagggggcaggggggcgcacagggggaggagtttgcatttcatccttagagcagtggattcaagagttttcagcaggcagggctgcgtgatgcgattcggattccatagcaactttgagagatggctctggttgcagggagaacgagcgatggtacagaagcagaagagaagcaggggcgagtgagatgggtgcagggacgacggaggaggggagactgggagatactgaggtcgtgctcccaggacctgccaggggtgatggggatggaggactccacctaagctgctggcttcccacttgcacaggtaacagggccattccctgagatgggggcactagagtcagaccagattggcgggatagatacgagatcagttgtgactgctgagttcagggagttttgagacaacctggcagagacagcagggtgggggctacaggcagactggggrgtctttgggtggaggaggttagtaaggacccagcagcgggtgagattgctgggggattgagaacaggaagcatrgagtaagagaaggcagcagccttggcccagcctctgagaacctggttgagaaaaggaggatgagtgagcaggaggaggggtgggaggacaagcaggccaagagggagagtggtcagccgtgctgaaggcagcagagaagcgatacaagaggaagagggagaagcagtgagttggcagtggccaggtgttggaaatgtggcaggagccgttttgctgacctgatggggtggaaggaggagatagcagcagagtgggtgtctcttggatttcctgggaaggggtggaaagaggaggtcagggccacaggaagcgcgggaagctgggggtgggaggtgaggtggggttgggttttggttttcccacaagagaagcttgagtgtgtttcttctgaaccacagggaatgtctgagagagcacagctgaatacgtacaagagaccaggtgatctggtgggaatgtccctgaactactggcaggagatgagattcaaaccagaaaaaccaaacagaaggaacgaggagctctgtataggccatcccattggcagacacacaccccgtgaagactgttgttgctgtggaggtcagagatcccttccagccagctgctggaattgggattcagcagaactgattcctggcactaccacgtcctccatactctcaacattttttttttttagttttcagggaagtccagtaataaaaatagttcctatttattgagtacttgctatgtgccagggcctatgctaagtgcattgcacaccgtgagtcctcaacccttgagaggcgggcactgccccttgttctggagcacggcttctccacattgctcttgacaaatgggggagctgtcctgctcattgtcgggtgttcagcagcacccctggcctcctccctctaggtacaaacccaaatggaacagctactctagacaaactgaagccacagcttgcctgaggtcacaaagctagcagctgagccggctggggacatttttgccccagggaagacgctcttaacccctaggctgcttctgctgacccaactcttttgcatatgtgctctaaatagcttttgttcacagagttgaaaagtctattctaaaagtaacatgtgaatacgtgcttgctggaaaataagtgttaaaccactcctttaatattagcagtttgactgatgtctacattttttagtttttttgagacggagtctctgtcacccaggctggagtacagtggcacgattgtagctcaccacagcctcaacctcctgggctcaagtgatcctcccgcctcagcctcctaagtagctgggactacaagcccacaccaccacgctcagctaatttttataatttttgtatttcttgtagagatggggtttcaccatgttgtccagattggtctcgaactcctgggctccagccgtccttttgccttggcctcccaaagtgctgggattccaggtgtgagccaccatgtccagccattggctgatgtccagatctatacctgtatacctatatgcatgcttaggaaaacaaaggcatagtttaaaaaccataagttgtcctgtaattacttttgttttgttttgttttttcttaatgtttctggagacctcttttccgtgaatgaagagctccctcaaataaagcccagatgttacctccttggagaagatttgatgagcacccagtctgaaatgccacctccctgtccctgtccccccttaccctgttttattgattcacaatattctcactctgaatcgtactatatttttattgttctttgttcattggctgtcaaccccactaaaatataatccccatgaaggcagagactgttttgttttctgctctatccccagagctaagaactggtcttagcacatagtagttgctcaataaatatttgttgcatgaatgactgaacctatcttattatttgaattgtgacacatggtaatctcttgtgtggatgtatgtaatttagccattcccctcctaatggacatggaggtagtttccagttttccactatcacattatatgcaccacagtgaacacagatgcacatcaatccatgtgcacatatatgtgtaggccaacttgagagagtccaagaaatgaaattgttggagcaagggatacacacccacaccacacacacacacacacacacatatatatgcacacatgcacacacaaatacatacatatatttatttgtttatgatataaggtctcactccgtcaccccaggctggagtgcagtggtgcgatcatgggtcactgcagcctcaacctcctgggctcaagctatcttcccaactcagcttcctgagtagctgagaccacaggcacacacaccacacctggctaattagtgtattttttgtagagacagggtcttactatgttacccacactggtctcaaattcctgggatcaagtgatccacccgccttgtcctcccaaagtgttgggattacaggcgtcagccatcacgccccacctgcacattttaaatgttgaaggagcctaccaagttgtcctacaaaaaggcagtatgaattaatccttctaccatcagtgaatgatcatgctatttatatctttaacccctggaattaaaggggattttgtgtatgatatggtcaggaggggcggtctataatttattttttccaaatggattgctaattgtctcaacagtatttattgaacaatcaataatttccccatgtcttacacattaaattctgtagcaagattcttccatttcattgagctatttgtcttattatgccttacagttttaattatgatagccctgtagtatgtttttataagacaagtttatctctactttctatatcctaccccaaattttgtaaacatttatagaagtgtaatatacatacagaaaagtccataaatccaaagcaaacagctcttttgtcagggtgaacatacttacacaaccccattctcatcaaaattttcagccaggcataggcaggagggtcacttgaggccaggagttcaagaccagcctgggcaacatagtgaaaccctgtctctacaaaaatttaagaaaaaattagccaggtgcagtggtgtgtgcctgtagtcccagctaccgacgaggctgaggctggaggatcacttgagcccaggagagtgaggctacagtgagccatgattgcaccattgcactccagcctgggtgacacagaatgagactctgattcaaaaaaattgtttttcttggctatgtttatgtattttctcaatccggtgagatttattttgtcaagttatatttaaaaatctatttaagggccaggcatggtggctcatgcctgtaatcccagtactttggaggccaaggcaggaggatcacttgaagccaggagtttgagaccagcctgggcaacaaagagaccctgtctctatattttaaaaaattgctttttaaaatctaggatcatgactgacattgcactaaattaatgatctgggaagacagcatctttagcatctttacagtattaagctttacctctagacttaccaaattcttttgctgaggtcaggcgctgtggctcacgcctgtaatcccagcactttgggcggatcacctgaggtcaggagtttgagaccagcctggccaacatggagaaaccccgtctctactaaaaatacacaaaaaaatagccaggcatggcggcaggcgcctgcaatcccagctacttgggaggctgaggcaggagaatcacttgaacccgggaggtggaggttgcagtgagctgagatagtgccattgcactccagcctgggcaacgagagcgagactctgtctaaaaaaaaaaaaatgctagtttcctcctaacctggtaccctcgatgccacagtaccttgcaggtgggctgttcttaataaatacagtcactgagtaacaattcagatttaccatcacatgcaaactagctgtaagggcaaacggttaaggaggatttatgccgcttgtgaaatgcaacctgctagatgctggcagaaaactttccaggcaggctacatgccatgagactccttgaggaagcacagccctgagtacttttctcactgctccaagacacaccttttctctgccaccacgcccgccccacwcagcaccctgctacgactagatgtgggactgacaaatgccactgtttgacttatttctaggacaatggtgggtggcagtcatgtaggagagaggtctctgctgtgtagggaggctcggaggtaaggaataggtgggagtagggtatacatcttccactgtgaattctaggaagagcagggcccaggagagatgatctgctggttgcacttctacagccaacaactccatggcctggggaagtcacttcacttccctgcaacttcatttccttgcagtcagatggagagacagcactttgggaggctgaagcaggtggatcatttgaggtcaggagttcgagaccagcctgaccaacatggggaaaccccttctctactaaaaatacaaacattagctgtacgtggtggcacatgcctgtaatctcagctcactcaggaggctgaggcaggagaatcgcttgaacccttgaggcagaggttgcagtgagccgagatcgcaccactgcactccagcctgggtgacagagcaagaccctgtctcaaaaaaaaaaaaaaaaaaaaaagccaagaggacagggctcagagagcttccagatagctgaacacacggaggtttgtaagaaggtgaacaagaactcatccacgtgctgggagggtggcatggggacaggctcaggacccttccagacctcactgtgtgtgtctcatctggctgtttaactgcgtcctttaaaagaacctttgtcataaaccagtagacataaaagtaagtttgcctgagttctgtgagctgctttagcaaataaattaaacccaaagagcgggtttggagctgatcggtcagaagttctggaagcctggacttgtgactggtgggaaggaggggacagtcttggggactgagccctcaacctgtgtgacccgaggctatcttcaggtagacagcatcggagtggaattgggggatgccccgctggtgtccactgcttggtgcttggggaaaaacagacacacatttggtcatggagatgttctgtggccaggtgcactggctcacacctataatcccagcactttgggaggctgaggtgggcagatcacctgagatcaggagttcgagaccagcctggccaacatggtgaaaacccatattgactgaaaatacaaaaattagccaggcgtggtggtgggtgcctgtaatcccagctactctggcggctgaggtgggagaatcacttgaacccggaggcggaggttgcagtgagctgagattgygccactgcactccagcctgggtgatagagtgagactatgtctcaaaaaaaaagtctttagtgttgattgctgtagtgtgagagcagaggaaaaacagttgttttttccaccgtcacaggggccgtatgcagtctctgtcactcagctattcaacttctcaattctgccctcatagctcaagcagccccagacaatatgtaaacaaacaggcttggctgcattccaataaaactttatttacaaaaacaggtgggtggccgtaatttgccaacccccgagtttggctgaaaatcaatagaaatgtgaacggtgacggaggattacgaacagggaggcaaaccaggggaaaaataacaatgtgtcctggctagttcatcgctatgtaacacataatagcaataacatggaaggaaatcaaaccccctgaggacacaagagtggctaaacaagccaggctctgtcaacacagaggaaaaggaagtgccacaaagtgacagattacacaggaacaagaaatggcagggctgtgagtgaagactgcaagtgaagaaaggacacaccacaagaaggacgcgctcattacaacagaaccctgggctgggcggcacggtggctcacgcctgtaatcccagcactttgagattccgaggtgggaggatcgcttgaagccaggagttcaagaccaacttgggcaacatggcaaggccctgtctctacaaatatatatatatataattagctgggcatgatggtgttacgtttgtacttccaactattcgggaggctgaggtgggaggatccaccactgcactctagcctaggcaacagagtgacaccctgtctcaaaaacaaataaattttacattccttggtcctcggacatggctaaagagatctagggcaatagagacactacatttttgtgtctgtcaatccgcctgatgacagaaatagaatagagtctgggtgcagagggtcatgcacgtaatcccagcactttgggagactgaggcagaggatcacctgaggttgggaggtcgagaccagcctggccaacatggtgaaatcccgtctttactaaaaacacaaaaattagctaggtgtggtggcgggcacctctaaccccagctactcaggaggctgaggcaggagaatcgcttgaacccgagaggtggaggttgcagtgagctgagatcgcgacactgcactccatcctgagcaacagagtgagactccatctcaaaaaaagaaaaaaagaaaaaagaaaagaaacagaatagaagtaaaacagtttagtactgaaatgaactgttgagaatcttagctgcc

SEQ ID NO: 95714 - DNA, 91347 bp, Homo sapiens
  misc_feature (1)...(91347): n = A,T,C or G
cttacatttcaaatgacgtgtcatttgcagaaaaaaatattaaaaatacaaataagcaaaaggaaaaacaatatccatgacccacaattgagaaataaccattatcgaaacaatatttcaatatgttactcctgtccttttttgtttcttggtttaaattttatttgtattgaggtcatacatgcacataagttgaagagtcaaattttctaaaaataggaatccccacttcactctctcctctcatttctgcctccccaaagataatcactttgagctgattttttgggtatttaactccatgtcttggaataacatgcttctatcaccacttcttagtttttctgttttcagtaaaatctgctttcccactctgggcaataagggttctgccctctttccctctcctcacctgcccagcccatgcagagacccttcccatcctttattctctcaatatagttatatggttattcttgtgagattgacatttacagtatacattattgtgactatgtaaatgccattcacagctgagctccgtggtaaactatgatgacctttacttttctccttttctgcaacttttcatttttcttttccttttttttttcttttgagatggagtcgccctctgtcgcccaggctggagtgcagtggtgcgatctaggctcaaggcaacctccacctcccaggttcaagtgattcttctgcctcagcctcccaagtagttgagattacaggtgtgtgccaccacgcccggccaaaactatgatttttttttaaagggagaaagaaaaaaagtaagccaaggaagcaagtgtttctatcggtcaccaagtcttagggtggggacagtggggaggacacaaggcaggtgagggtgaagaaggttttgaactcctgacctcgggtgatctacccacctcggcctcccaaagtgctgggattacagctgtgagtcaccatgcatggcctggaatctggatttttttcacaaactttctcagagaattacacctgactccactgaattctacaagcccagattttctatttttgcttagtaattctagtgcctgttacgtgctaagtggccagggccagattaaaatgttagcatccaaaggtattaaagaaattatgccccactcgttcccatgtataaatcaatatgaaatgataataaatagcaaaaatacatgaagagggctgggtgtggtggctcacgcctgtagtcccagcactacgggaggccaaggcgagcagatcacctgaggtcgggagttcgagaccagcctgaccaatgtggagaaaccccatctgtactaaaaatacaaaattagccgggtgtggtggcacatgcctgtaatcccagctactcgggaggctgaggcaggagaatcacttgaacccaggaggtggaggttgcagtgagccgagattgtgccattgcactccagcctgggcaacaagagtgaaactccgtctcaaaaaaagaaaaaaaaaaatacatgaggagaagtccaacagatcttatttttcctatggcgtggtgggtaggataatggccctccaaagatggccacrtgctaattgctggtccctgtgaatatgttacagggcaaggacgaattaagattgcagatggaaatagggtgctaatcagctgactttgagacgggcagattattctgattatgtaggtgggtccaatgtagtcagaagggtcctaataagagaaagaggggctgggcacagtggctcatgcctgtaatccaagcactttgggaggccaaggtgggtggatcacctgaggtcaggagttcaagaccagcctggccaacatggtgaaaccccatctctactaaaactacaaaaatgagctggtgtggtggcgggcacctgtaaccccatctacttgggaggctgagatgggaatcgcttgaaccccggaggcggaggttgtagtgagccgagatcatgccactgcacttgagcatgggcgacagagcaagactcagtctcaaaaaaaaaaaagggggggggtggaggggaagaggaagaggaagacaagagagtcagaatcagaagcagagcatggggtgaggcagtccttggctttaaaaatagcgagtggaccatgagacatgggatgcaagcagactctaggagctggaaaaggcaagaaagtttattctcccgtagggcctccagaatgaatgtgaccctgccaacaccttgattttagcccagtgaaaatctttatcttctaacctacagaactataagataattcatttgtgttgttttaagccaattccttgccataaagctcttaaaatatatccccttttggttctgcttctctgattgaatcctgactgatatacatggtaaccaatttgattccctgtttaataaaagcattaaagatcaaattcttagccaggcacagtggctcatgcctgttatcccagcactttgggaggctgaggcaggtggatcacttgaggtcaggagtttgagaccagcctggccaatatggcgaaaccccgtctctactaaaaatacaaaaattagctgggcatggtggcacacgcctgtaattccagctacttgggaggctgaagcaggaatcgcttgaacccaggaggcagaggttgcagtaagccgagatcgtgccactgcactccagcctgagtgacagagtgagactccatcttaaaatacaacaacaggccaggcctggtggctcatgcctgtaatcccagcacttggggaggccaaggcaggcggatcacgagatcaagagattgagaccatgctggccaacatggtgaaaccctatctccactaaaaatacaaaaattagcagggcatggtggcacatacctgtagtctcagctacttgggaggctgaggcaggagaattgcttgaacctgggaggtgcaggttgtaatgagccgagatcgtgccattgcactccagcctgggtgacagacactccatctcaaaaaaaaaaaaaaaaaaaaatccaaagaagaatggtatttcatgacatgtgaaagtaatgcaaaattcaaatttcagtatccataaagttttgttggaacacagctatgcctatttatattatttatgctgcatgcaaactacagagttgatttgttgctacagagatagtaaggcccacaaagccttcagtatttactgtctgactctttacagagactggtcagggagggcttccctgaggaggggacatttaagctgagacatgaataacaagaagactggagatagcgggcagagctgtctaggcagagacaatggagagcaaaggcagttttctctctaatcttgtaacagtcttctaaagagaagcgttattaaagaaaaaaagaaaaaaaaattgagggggccctgaggctctgagggtgctgtagcctctcagggtcacggagactgtaggtcctgaggaggggttgggaaccagcactgtctggcaccagaatttgtggtgccttatgctgcctccttctcggcctgacacagcattggagcccagaaactgcatgttgaatggctttattcaccttcctcggggaaggaccagggattttagattcattctcaggaataggtgagaagagccaaagactcacccatgggcatgagagmatgttctctgcagcctcatggttagtggtaggcccagaggaggccaagggcagtaggcaagacaacggatagagaagagtagtgaattccagctatgtggagtttccagcttggcgaattccagccatgtggggtttattggtgctggtagaaaatggtagcctcaagccctcagttgacaagtgtggccagagagaaccccactctcaatcctttgtagaccaggtcattccygccaggctctgtgctaacggaggagagtaggttattagtcccatttaagagccagagaaattaaggcagtggagagtagcagggctactggtttaaaaacactggctctgtgcctgaatcccagccttgtcatttgctagctgtgggaccgcaggcaagtgccttgatttctctatgtctgtggataatgatggtatctacctcaaagctatgtaaagaattaaggaaacaatagcccaacaccacacctgcaggaaggaagcaagtttattattactcaataaacattggtggatcctgatgacattctctcagtcagctttagcagtcttaagagactgcagaggatggagaacccaaggttagagccagatttcttctctacccagttcctcggggccaaaaccctgacaccatgcttaactcctcttttatacgccatagtccgtcagcaaaccttgtcttcagtatgcgtccaggagtccaaccattcctgccacctccaccgtattactttcatccagactgccatcagctgtcacctagattattgcaaaagcctccttgctggctttggggcttccatcctctctctctcgccaatccccagtcaactcccaacaggcagcaaagcttaggttacttctcagttcaaaacccttctaggtgtgctagaattaactgatttatttactcaatgattatttattattgagtgtctactatgtgccaggtactgttgtaggcattgcagataaaatggagaacaaaacagacaaaaatttctgcattcatgaagcttccgttctcatggagggagatggttaacaaacaagtgtatgagtaaaacatatggtaggttaggtgtcatgtggaaaaatagtttagggaaggcggggggccttggattttaagtagggtggtcaaggaggtctaacacacaagataagggttaaataaaaggccaaacgtaggagaggtgggagccaaagagctacccagaagaagagcattctagataaaggctcagtaagtgcaacggtggaagtattcctggtgagtctgggacaatagtggaaagtcaaagtgtgtgggaggggagatatagagccccatgcccccctcccacacacttcagaggggaaaagggggcaggattgagtcctgtacattccccacgttttttttttctctggagattggaagccattggagggtctaagcagaggagtgatgagttaagctgctgtgtggaagtccgtaaggaacaggggtgagtcagagaccctgaatggagccgttgcaattatccagatgagatagagtgccttggatcaggaagggaggtagcaacagaagcggccaataaagttcaaagtcctcagccccagtcctcccgatgggggtctcacctacccctctcacctcaccttgttcctccctgcatccccaccccaccggtcactgctaggcacatagaagcatctactaagcatgtggtgaatcaatgaaccccttaatgaatggtccacccctagatcatcagcatcctttttaacgctaggcatatagtctgaactcaacacatgtttacagatggaatgctgcacagtcctgccaagtccaggcggttattcctctccacagccgaaggaaactaaggctcgggtggggaagtgtccccctggggtctctccgcttaggctgcaggctgggcatcctttttcaaactcttttagcacagcgaagtcgagggcactgggtggagggtgcttgcttgccctcagggtgagtcacagtgacctcagaggagyttccccaaaacgtccccgccctgtgatggggaaaagccggaatctctcggtcccaggtggtcatgtggcccaggccggacaagcgtcccgaaagccccgggagagactaagaagcaatcctcccacgcgctttctcccaccctcgggccactgagacggagggacagagggccgccctcgcgcggccgaggccccgcctcccgctcgcccgcccgcgcctccagcggaagccggaagcaaaagcgggtcctgctagccccgcggctccgaactcggtggtcctggaagctccgcaggatgggggagaagatggcggaagaggmgtgagtgggctttttcccgggcggcggaggcggcggggctgggccccggcgggtgacagcgagcgcctcaggccgccctccggccccggaaggcggagcttcttttgctggttggccaggactgaccaagccggtgcctacgaggagggcgggatgggcgggcctgggcccaggtgggccttgctttcccctggagrtcggtccctcgagctgggaatctmctgcccagcgcaggcccggagagcygtcttgcggaaaatmcaaaccatatttactttcccagttttcggtaatctcatggttactgagccctcttccgcctcctccaggaagtcgtccgggttctccacacccacctcctacgtagccagtcgcctcctgtataacgatcagttttcatgtctttctccttcactaagtttcatttagtcattaactgttagccatctactcaattccaggccctgggcaggtggtaggaaaggaggccgaccaggagccgctctctgggagcttccattctagtgggaaaagaagaccataattagtcaaggtggtttcagatcgtgattaattaacgttatttgtgcctagtgttccattattggaacgctaagcatgtgggagttatttatatcctactgctcaaggtcatcgccaaggtctgatttttctcacgtctgcagttctaaaaattgcaacctctggcatgaatgggttaagtgttctgaaggaagcaaaatagagttaaggttggggagtccactcaggaaaaagtgacattcagcagaaacttgaatgaccagaatgagggataggagaaataacatcaggttcaaaaggcctggctcaagaaagagtttagtgcttttgagtgacaggcagcatggctggtgtgtagagaggaagggggttagctggacaaggggagatggggaaggacgggctgtgtcctccaggtacttttgggcaagtccaaaagtcatctccatacctgcagggcagagtctgttgcagattgtagatgccctatcactgtttgtggaatgagtatgtgaagatgaataaggaaccccttcattgatactggagtccttcacctgataacttttcaaatatatttcttggccatgtgggggtcatttcatgtaatcagttatttattgagcagctgctccatcccagacactaaacagcctcagcagcacaaaataaaagaggcaatatagcccagcgatttcaagtttgggttttcagcttgattctgccactaactgagatgttggtgaagttttgcaacctccctgagccttagttatgcatgagtaaaaaacggaaagtaatcatacccaatcagacatgttatacctattaaatgagaggtagtgtgttacctagttcctggaataaagcagtgctcagaaaataataacttttgtagtcacagtaacagttattatagcaatattgtactagttcacaatcccagcacagtgtgaaagagctgtgggaacatacgcagtggagtgggtaaattcgggtgtggtaagatggggtaataggaggtgacatttgagccgtttgaaatctgagagggattttgtaaagtagggtagggcatgcccagatcaacaactgggcaaattgaggtggcttcttcaacttgcagaaataatgccaggaaaataatgtaaattggagaaacaaaggtgctaagtaaacagtgttggaccttggaaagtgatgagactccagtttgcctccctttaaatcccccagtatttgccaaagagcaggcagcatttcatttctatactagctctgattccctaccgttcttgtcctctaagtggctgtattcaaaagcaccagaggccactggtacccttgtgctgtgcaggcagggattttcttagtaagtttctctcgaaggcctgcctgttaaagacttctgaatcccataaagttcttggacagcttctctttctggtgtgaggtgtgtgaattgatgttttgggacccttttccattatctaattatgctttctatgtcctccaggaggttccccaatacaactcatgagggtttcaatgtcaccctccacaccaccctggttgtcacgacgaaactggtgctcccgacccctggcaagcccatcctccccgtgcagacaggggagcaggcccagcaagaggagcagtccagcggcatgaccattttcttcagcctccttgtcctaggtgaatatggacactgtcatccccatcatctgccatcccgtgtctgtgtgctcggtctgtgtgtttaaccctgtcactcctcttgactgtcaagtcttcctcccatttggttttcatatcaaacactgagggaacatgatcagtttataacatcattaacaggaaactctcttctttataaaatcatggtgcttagcaagttctgaagagctgttgatgtaatatcttggcctttgaaagaaggattaaaaaaattttggcctagaaagaatcttgaggcctggcgcggtggctcaagcctgacatctcagcactttgggagacttgggtggatcacttgaggttaggagttcaagaccagcctggccaacatggtgaaactctgtcttcactaaaaatacaaaaattagctaggcgtagtggtgtatgcctgtaatcacagctactcaggaggctgaggcacgagaatcacttgaacctgagaggcagaggttgcagtgagccgagatcacgccgctgcactccagcctggatgacagagtaagactgtctggaaaaaaaaaaaagaatcttgaacatctagtttaatggatttcaagttctactcaaaggagtatgcacctgtgcaggggatgaaggagcagggggtggggtggcaggaggtgggaggagtcagatgggagaatatctgaccccctgctcctggcttcaatcagagcagcattttgtgttcatatttatttgacttccatgtgaattttatttaatggttttgctgctgattgaaagagcagaaacccttgccccagcaccctgttttccttaacctctgtcattctcattaaccatggtcatgacttttgccatatctatgtaccacctgtattgttaatttagttatgtactatttttgattaaatgcattcactctctgaaaacctcattttgggccgagtttggtggctcatgctggtaataccaacactttgggaggccaaggcagatggatcacttgaggtcaggagttccagaccagcctggccaacatggtgaaaccctgtctctactgaaattacaaaaattagctgggcgtggtggtatgtgcctgtaatccccgctactcaggaggctgaggcaggagaattgcttgaacctgggaggcggaggctgcggtgagccaagatcgtgccactgtactgtagcctgggcgacagagtgagacactgtcttaaaaaaaaaaaacaaaaaaaaccaaaaaactaattttgttcaaccttctcttttagtgtgtgaggaaatttcagcatagagaagtcaggtggttgtcataccaggctgatataagactagagactgataaccaggttaccagataccagtcgagaggtttagataaaagacaaaaacttaaatgcctcccagtgtgcctccatctcaaaaaacaaacaaacaaacagacaaaaaagaaatccagttgaaactacacaaccacttttgattagctaaggaataaatagctttgagtttgacccaagttcaaattcttttttttttcttgagatggagtcttgctctgtcgcccaggctggagtgcagtggcattatctcggctcactgcaagctctgcctcccgggttcacgccgttctcctgcctcagcctcccaagtagctgggactacaggtgcctgccaccatgcccagctaattttttgtatttttagtagagttggcatttcattctgttggccaggatggtctcaatctcctgacctcgtgatccacctgcctcggcctcccaaagtgctgggattacaggcgtgagccaccacgcccagccaagtccaaattcttgtttggccgggcgccgtggctcacacctataatcccagcactttcgcgtggatcatctaaggtcaggagttcgagaccagcctggccaacacgatgactccatctctactaaaaatacaaaaaattttagccagacgtggtggcgggcacctgtaatctcagctactcgggaggctgaagcaggagaatcacttgaacccgggaggcagaggttgcagtaagccgagatcgcgccactgcactccagcctgagtgacaagagggaaactccataccccacccccccaaaaaaacaaaaacaaattcttgtttgaaagtgaaacaagcatttcatttgctgcttttctttaatgataccaaagtcatactcctaatgagattaggtcttttcagaaagttaaaaggtgcaactgtttttttttttttttttatttctctgatgtgtattaggactgtttattaaggaaaagtataacttctcttacatttatattctgtctctggtgagtggacaaagaattttaataatacacttgaggccagcgatttgagaccagcctgggcaacatagtgagactctgtctccacaaaaaataaaagattttaataatacggtctttttatttgaaatcctaggactcatccttgtctgtcatagttttagaaacttataaaccgatactgaaaaagtacacagaccagaagtatacaatgtctcatatagatttaatacaccctggtaattttttaccctgtaaatgtagttgaattctatttctaggggattacttcaacaatgaaggactctcttttgttttattttctttttcttttgtgatagtagtcgaagacaaagaagaaaagcatttcttttcttgattaagaaatctttagtagctgaagtcttccttcaggattaaggagtattattaatctatttacactgctgtcaatttgatatgttagacaatataaaaggcgggcctggaaaaaaaaaacttttgtaatcactttttttttaagggaaattgaaaagtataatatgacttttaaagtaacttccagggcgtggagcatttaagattagctgaacaaaagaccacaaaacaggtttctataatgtactttttaaaccaggcaaaatcctgcccagtgttaatacatctttggggccagaaaggctgaacttgctgtatatttctcttggattgccctctccaaacagattataaacctagactctagagtcacaccaatgttagatggctttcattttcacctaatcagattcttgatagtttatgagttagtgtctctgcttatgtggaggttagcatgtattaccaaaacagaatgatgctttctttttaagtaaatttaaggcattgtttgcctgttgcatrttattttatttctgattagatatccaaacattgaatttttttttttttttttttttttccccctgagatggaatcttgttctgttgcccaggctggagtgcagtggcatgatctcacctcactgcaacttctgcctcccgggttcaagtgattctcctgcctcagcctcccaagtagctggggttacaggtgcctgccaccacacccagctaatttttgtatttttagtagagatggggtttcgccatgttggccaggctrgtcttgaactcttgacctcagatgatccacctgcctcagcctcccaaagtgctgggattataggcatgagccaccacacccagttcaaacaatgtaaatctgatggtgttttaaaaattgctgttattaggtaacttgctaattcatgaataaatgaactcaagtraattaagggaaattagcccatagtttattctagacctcagaactcctgacctggaattcatttgccactttttgttactcttttagttaattcaaatgaaatggtaacttttgtgtcctgtaagcacatgacaggattacagtgtgttcctctttgttgagaagggatgacaaaactctgtagttacttttgatttttagaagcttgaaatcagttgacttgcatttaaccgttgttgatctttgactccacaagaaaaaatggggaatcattgttatttacttacactagattaacaattaacattatttgacacatacattttatgggccttgaaacttaatggagttattatgattgatatgtgttttatatattttccatagtcattactccaggcatgaaaaattgaaagcacaccctccataccacacagaagtgtttgccctttcttgctcggtttttttccaagtgtacttgaaaacgtgcttgtttttgcatatacagatgtatattcgtaagtacatgcagaaacacaaataatacatgtttggagttgcaaatttgttttgacataaatggggtcccataacttgccttttcatctcacagaatgtcttggagatcattgtattggtgttttttctgtctacctcattcttttttttttgtagtaaatacataacatacatttacaattttaaccactttaaaatgtacagttcagcagcatctagtacattcacaatgttgtgcagctatcactactatctagtttcagaacattttcatcaccccaaaagaaaaccattaaaagcagtcattccccatccctcccttttctagtccttggcaaccactattctgctttctgtctctaggaatttgcctatttagaatatttcatataaatgaaaccatataatacgtggccttttgtgtctggtttctattacttagcataatgttctcaagattcatgttatagcatatgttagaattgcattcctttttatggctgagtaatattccactgtatggatatgccacatgatgtttattcattcatcagtgaacatttggattgtttctaccttttggctgttgtgaatactgctgctgtgaacatttgtgtataggcttttgtgtggataaatgtttttatttcttttggatatatacctgcaagtggaattgccgagtcaaacggttactgtatgtttaactttctcagaaactgacaaatgttttccacaggggctgcaccattttacaagggttccggtttctccatgttcttgcgaacacttgttttctggttttaaaaaaatgatagactgggcgtggtggctcatacctgcaatctcagcactttgggaggctgaggcgggaagatcacttgaggccaggagttcgagaccagcctggcaatatggcgaaaccctgtctctcctaaaaatacaaaaaaattagctgggtgtgggcgtggtggcatacacctataatcccagctattcgggaggctgaggcactagaatcatttgaacctgggaggtggaggtttcagtgagctgagattgcaccactgcactccagcctgggtgacagagtgagactctgtctcggggaaaaaaaaaattatagctatcctagtggatatgaaattgtatttttgttttgttttgttttttttgagatggaatcttgctctgtctcccaggctagagtgcagtggcatgatcttggctcactgcaacctctacctcctgggttcaagtgattctcctgtctcagcctcccatatagctgggattcaggtgcgcaccaccacaccctgctaatttttgtatttttagtagagacggcgtttcaccatgttggccaggctggtcttgaactccgacctcaggtgatctgcttgcctcagcctcccaaagtgctgggattccaggtgtgagccaccgcaccaggccctcactgtattttttaaaaaatcttacatgtccttccagtgaatcattgtattttgattttagtttcccttgtgactattgatgttgaacatcttttgtctattcatgtcctatgcccgtttaaaagctgtggtgtttgtctcttggctgttgagtttaagagttctttatatattgtggatagtacacctttatcagatatatgatttgcaaatattttctccccttctatggattgtcttttctgactttattctttttaatggctgaaggctgttacctggcattgatgagccttatattaactctttctgttaatagtttccccttttgctcttaaagccgcaaagagttgtttgatctatttatgagaataacttaaatttttaaaaatctagcttggtacaaaggaagagcagaaactggttcaactctcttggtctattttctgtccacttatgtgcttatttgccgttttttgttttgtctagacattgggcatgttcattagtcacatgttatgtttatgcactggaacttttttcttgccattagtatttaatgtaggatttctaactaggttaaatatttatataaaaataacaccacagattgatagtttaaagcacagaatgaaaagaggacaaaatgtctacatttacaacactctggccacctggtgttttttggtgggattaaagaaacctaatttgtcagtgcagcctctgagggtgaccagttaacaggcatgtggattgtttaaacatttccttgaaaaaaataacaaaattaatgttagtcctgttaatactgtggttgatgagctggtataccatctaggtgcccagtaaaagaaagacatgcacgctaacatttggattaggaaattacattcaggaataatttttgtgaagtacccattttttttgccggggggttggtgggggcagaaatatccctttcaaatcgttttattttacatcttcttattttctttcataacaacacctctgtgaggaaagttagacattattctgttttggagattgaggaatgaaggcatccagccaagtgggaggtggtggggtatgctgtggttaagagcacagatttggaatctgactcaatactgcagcacctaccagtggtgtgacaggggctgtgatgtctagaagcctcagttttctgatytgtaatcagagaagatagtggtaatgacagctaattccgagggaagttggaggattaaatgagagagtatttggggtgttcagcctagttcatggctcatgggaagtcctcagccgatgggaatggcaggacacagctgcacccagctggggagcaggagtgttccatattcagatctctgatgttcttgtcaccaaaccatttactttttcctgtttgtaaaacccttacttccctctatgttaagagccagtcacatgatggcaaaataatttgtgtcaatgcaatctgttgcagttacatttatgtaaaagtgattgatttcattgacttcctcttcaccatatagtgttccagttgataatcacttccaaaaagttgaagaccatttctcagaatcagaaaaatttgaataattttaaataattttataaggtttaacagcttatataaaaaaataggtttctggctgatcaccgtggctcacgcctgtaatcccagcactttgggaggccaaggtgagtggattgcttgagcccaagagttggagaccagcctgtgcaatgtggcgaaaccccatctctactaaaaatacaaaaaaattagttgggtgtggtgtcatgtgtctctagtcccagctacttgggaggctgagatgggagaatcacctgagcctgggaagttgagactgcagtgaccctagatcataccactgcactctagcctggatgacacagtgagaccctgtctcaaaaaagttagatttctgttcctcttccaataactactgggaaacaaactagttcaggcagacaaagaagtatagagaaaatataataaacattgtaaatgtacctccagtttaagaaatgagacacgaaaaacaccgctgaagttcactgtgttattccaattgtccatttctgtgaggacccccccagaaataaccactgacttgaacttggtgtttatcattcagaattgagtgttttttttaaaacattgtattatttttttttccacagctatctgcatcatattggtgcatttactgatccgatacagattacatttcttgccagagagtgttgctgttgtttctttaggtaagtgtgtattggtgattccataataaaagcagtaacaataactaccattttttgagtgcctctttagtgccaggaaccacaagagatgcatcacatccctgatctcatttgatcctcactgcaacctgccctaagggtgctatgatcccattttacagatgaggacactggggctcaagaagggtagtgacctcctaaaggtcatgtagaagcccaaaggccatacagctctgtacagctcaaaggccctttcttagccttttgcttctggtagaactacccttggggaacattgacctctactgctaggctaggctgacatccaactcaactaaggtaagyaatgacacttcatagaatcactcaattttatagacagaagggactctgactttacagtttaggaggaagaaatggctcacttaatgccagagtcaggtctaaagtcttcagagagcattgtgctctaccccacttacatttctgttttgtttcctgtgccaattaactgttgagatctagttgcagtgaatgaacccgtgtaataacaggtgtgaatgcacacacaagttcattgaagtggttagtgaaggaagaagtggggaatttccgtaagtgtaagttcaaggctaaaatgtgggtggagacatgtaaggcacagtaaataaagtcttactaaggtcagccaaagctttttatcagtttattatattgcagtcacttttactagtttctacttgcctactgatggtatttaatttttcctgatcactgctgatgtttagaaattaactttcattgcctggtagatctttagtggagtagtaattctttcacaagatagttattgtttagattagctttggaaatgattgtttagactctgttcactagcctccccctcctcccatcaccccagcagtcctactaccttggttcagactctcctgtattttccctggacttcagtactaagtgccagatcctggcttgtgaggcttcacattgtcatctatctcatttatgccttatgacctccaggtgatgccgtattttaaggaatgggcaccactggatagtgttgacctcgagtacaggtttcaaaaccagttttactcaaaaagttcttgttctgtttttagcatgttttttagcaatatatcttggtagaktctaacaaccttagctagtaagatagtcatagagctctaagaataggagccttgctcattaacattcctttctgctattaggcatattgaaaagaacctatgtgactaatacccataattctgggacattcggtaaaggctctaagaactactccaaggaatttacagttgtgtggtcagttttatagcttcttacataaatttgttatcaaaattatagttggtgtgtatttagatattatacacatgaaaattaaaatgataattcttataatttcatttggaatttcaagctcctcatgtttcttgaatgtctgggtaactgcagcttgctgaacaccagtgcttctattaggacttagagcagacattgttggtggcttaccaaagagtcatttcccccttcttccttgaaaatagaaccccaaatttgatcaggtatcttgccacagtgtgctcaaggaagatgggcccctccaagtcaagattggtctttgccatcatgttaatttcactcttctctgccaatgattagttcagaggggtaggggcggcaaggcagtgtgaaacccagttctggccagtgacaccaaggggaagcgtgatgaggtagtgggtcctggaaaatgttttcctctcagatagtaatgagacatttccccttcatttctttgatgctgctgaatgagagtgtgatgcctagtggactggtagccatcttgcaactactgtggctcaaagacaaaagccagaatgctaaggattgccgaggggacagatgggaatcccagattattgatagcattgttgctttgttgagttgatagccctgaaacttcctatcttagtgctaccttttatatgagataataaacatctattagctgttgttgacttggaataaagaaaaaaaaccaaaaccaacatctattgtttaagccatttttagtctaggttcttttacttgcaactaaaagcatcttaactaacatagaactctttccattcaagggacaaaacccaattcaaaagaaaataaattggccaggcgcggtggcttatgcctgtaattctagcactttgggaggctgaggtgggtggatcgcctcaggccaggagttcaagaccagcctggccaacatggtgaaacccctgtctctactaaaaatagaaaaattagctgggcatggtggcaggtgcttgtaatcccagctactctggaggctgaagcaatagaaccacttgagtccaggaggcggaagttgcattgagctccagtcaacgccagggcactccagcctgggtgacagagcaagactctgtctcaaaacaaacaaacaaaaaaaattggtgggggtaggggcgctcacctcttgactcatgtaactggcaaaactacaggtagtattagcttgagacttagctgaatcaggtctcctggacccagttcttctccatgcctcagcagtgaatcccttttccccggcttcgctgtcaggcaggctctctccctgtggtactctgatccgttctcagacaggctcttggtgtggtaagcccttaaagcagtaactgcagtgggagagagaacctcctcttctttctggcaccaaaagttgcaggatgaactctgaccacctggcgacctcaactgggagtggggtggaatggtgttgggagtcagccagagctctccatctacaaggttcatttcttcactgatgttgcagaaataattgtagcctgaatagctaggtcttgggagaagtgatggaaaggcagtcttgctttcaatgcttacttgctaactcaggtgactggaaacccaagagcacttccagggagagtgctgaggtccagaaagtactttttaaaaattatgttagaggacatttggttagaatttgtaaatgctgacatagctatcaaagtaattctgtatttcataaagctaaagaaatggaaggaaaacgtttttctccagctggagcaaagtgtaacaaaatattgagatatctaccatttcaagaatttccaactttgtgccaaaaaagaatctagaagaagttgccagagaaagtatggttttcgttctttcagggataaattttcctctcctgccagaagttgctttgtagcttgcagtcatttcgagacattactggtcttttgctttatagttaggtgttcagcattcctaagaaattctcagtatagaaaaggaccatctgcactccaaaagcacatgtcccctccttctaccttactgtatttttaaatgagtgtctgtctggccacttttcattctttataaaaatatagtatcaacctgaagttctaaagagttccttggcccctgttcgaagctttcaggatactttccatactttatggaattctgtagtttgggccttttaaaaactaatttcttttgcacagttaaacaactactatatatagaaaaaagaaaaatcttgtttattgacaattatttttatcttgtttcattctcttccagtccatgtgtagacatgtccgtatgtattagatgcctttgtatagtttaatttgagtttatatcattttttctgttctttccatgtattagttgagttcacatatttatttatttatcttttttttttcagacagagtctccttctttcacccaggctggagtgcaatcacgatcttggcgcactgcaacctccgccccctgggttcaagcgattctcctgcctcagcctcctgagtagctgggattacaggcacataccaccatgcctggctaatttttgtatttttagtggagacagggtttcaccatgtcggccaggctggtctcgaactcctgaccgcaagtgatctgcctgcctcggcttcccaaagtgctgggattacaggcatgaaccactgtgcccggcccatatttatttttttactggctgtgtaatgctgattcatgtatatattttaggctaaaatttgtaaggaatgaaaatgaggctgggtgcagtggctcatgcctgtaatcccagcactttgggaggccgaggcgggcagatcacctgaggtcaagagttcgagaacaacctggccaacatggcgaaaccccatctctactaaaaataacaaaaattagtcaggcatggtggtgcacgcctatagtcccagctattcaggaggatggggcaggagaatcacttgaacttgggaggcagaggttgcagtgagctgagatcgtgccactgcattccagcctgggcaacagatagagactgcatctcgaaaaaaaaaaaaaaagaaaaagaaaatgaaatacttgtaagcgtatggccagcatcctctgttgaataataccaaagacaggagtttcccccaaccccaaaaatcatgctttattttagagtgagaaaaggccagattagggttataagtggagggctgaaagtttgactttcagttgccaaagtttagccttaatactgctgatgattagaaaaactgtgatctaacttacaaactagatttgattgaatcattgggtaaatagaatatacaaaagtgctcccctgtcataactttttaaaccatatttgtgctatttaattctattccttcttgttttctactaaaagattttaatttttttgttttttaaggatagtacttttggccagttacagctcttttagaatttgtcgagcaggctttccagtttttgttggaaagcccccgtacccccaccaaaaaaaaattttttttttttttttttttttttgagatagagtttcacttttgccgcccaggctggagtgcaatggcacgatctcggctcactgcaacctccgtctcccgggttcaagtgattctcctgcctcagcctcccgagtagctgggattataggtgcctgccaccacgcccagctaattttttgtatttttagtagaaacagggtttcaccatgttagccaggctggtcttgaactcctgacatcaggtaatccgcctgcctyggcctcccaaaatgctgggattacaggcgtgagctaatgcaccccgcctaattttatatatatattttttagtagagacggggtttcttcatgttggtcaggctggtcttgaactcccgacctcaggtgatccaccaccttggtctcccaaagtgttggaattacagccgtgagccactgtgcctggccaaaaaattgtttttaattaaaaaaaaaaaaaagggcctggcacagtggctcatgcctgtaatcccagcactttgggaggccgaggtggccggatcaccttgaggtcaggagtttgaaaccagcctggccaacatggcaaaacctcatctctattaaaaatacaaaaattacccaagcatggtggcatatatctgtaatcccagctactcaggaggctgaggcaggagaatcactttactccggtagacggaggttgcagtgagccaagattgtgccactgcactccagcctgggtgacagagtgagactctgtctcaaataaatagtaataataataataataataatgtattaatatattttacacattagcacagtgcatggcacacagtatagatgtgtgtgtgtgtgtatgtatgcatttatttctttttaacacagtgcaaatacataggtgtgtgtgtatgtgtgtatatatagatttttttttttttttgagagagagaraacttgtgctgggattctacactttgtaacctgattattaatacatttgaggatgttttcggtggcccatgcgtcggggatggttggatagtaagatgggggctgtgagttcgctgctcagcaacttgatgtgggggaaactcggctggtatcctccttcaccaggaaagatcgttaatccaccgaaggacttgaagaaacctcatggggctgggcgcggtggctcacgcctgtgatcacagcactttgggaggccaaggtgggcggatcacgaggtcaggagattgagaccatcctggctaacatggtgaaatcccgtctatactaaaaatacaaaaaaaaaaaattagccaggcgtggtggcgggcgtctagtcctagctcctcaggaggctgaggcaggagaatagcatgaacccgggaggtggagcttgcagtgagccgagatcgcaccactgcactccaacctgggcaacagagtgagactccatctcaaaaaaaaaaaagaacctcatggaaagaaatgcttctttgtgaaatttttttggaacataagatcatgcctggattaaagtgaaacagctgaagccatatcatgctcataaagaggaaatgataaagattcacaagggtaaactattccagcaagcggtggatgccgccaaagagtttctcaggagagcccaaagggaaagatcagacgtcatcccacaattctgctgatgacaagaatcggcttaattccagtgaggagagaagcaggccaaactcaggtgatgagaagtgcaaacagcctgtctgaaggaaaagtgaagaagatcatgggagatggaaagaagggggtgtcttcgggctcttcagagacaggctccaaatcccctctgaaaagaatccaagagcaaagtccccagaagcggggtcagcccccaaagaatgagaagaatgtcaccatcgtggagtccggtaccttgaagtggatgatggccggaccagtggctgcatttaaatggcagccgaccagaagcgagcctgttaaagatgcagatcctcatttccatcatttcctgctaagccaaacaagccatctctgtctgttaccaggcaatcacaaagaagttgaaaatatgtgaagaggaaactggttccacctccatccgggcagctgacagcacggccgtgaatggcagcatcacagacaaaaagatgggatttgggggccttggtctcatgagaagtggaatcgtctctaacttgctaaaaatgggtcacacagtgactgtctggaaccgcactgccaagaaacgtgatttgttcatctaggagggggcccgcctgggaagaacccctgctgaagtcctctcaacctgtgacatcactttcgcccgtgtgttggatcccaaggcggccaaggacctggtgctgggccccagtggtatgctgcaagggatctgccctggaaagtgctacgtggacatgtcaacggtggacgctgacatagtcacttagctggcctgggtgattgcgtccaggtcggggggtcgctttccagaagctcccatctcagggaatcagcagctttctaatcacrgaatgttggtgatcttagcagctggagacaggggcctataggaggactgcagcagctgcttccaggcgatagggaagacctcctccttcctaggtgaagttggcaacgcagccaagatgatgctgattgtaaacatagtccaagggagcttcatagccatgatcactgaggtgctgaccctggcctaggtgacagatcaggcccagcagacactcttggacatcctcaatcagggacagttggccagcatcttcctagaccagaagtgccaaaataccctgcaaggaaactttaagcctgatttctactgaaatacatgcagaaggatctctgcttagccattgcgctgggcaatgcggtcaactctctgactcccatggcagctgcagccaaccaggtgtacaaaagagccaaggcactggaccagtccaacaatatgtccgctgtgtcctgagcctgcatacactaagccgtcggaccccccacccccagccctctaatctctccgctaactccctcttcctcacatggggtcaggggcctgggactttgctctggaccagcccacctgtctccatttccttttacacagactttgagacttgccatcagcacagcacacagcagcacccttcctttgaggctggtatggaggggatgagtgtcagcaggattggctcatgggaaagctcttgagctgggcactggcctccacacgaggaggtggctgtgtgtgcaygcacacacacgaggaggtggctgtgtacacacacaaacacacacacactctctctctctctctctctctctctctcygtctctctctctctcaccccaggatagaaactgcccagaaacagctgcctggctttttttcttcttccaagcttgtcttatctcaaaccccttccagtcaaggaactagaatcagcaatgagagttggaagccttcccacagcttccccaagagcgaagaggctatagtcatgtccacgtcccccgctgaattctctgcagggagaggacttgggcccagatgagccagaccagactccagacagagggtcccgtggggcccccaaactcaggtgatgagctgagaaagagaaagatgttcatgtctaagtgtccagtgtgcacctagcactccttagacgcctttgtgaactgaaaagagactggcagagtcctgcgaaaatgaggccctggctttccagggagtatggtgagcatctggccttcgctgcctggaagtgacaccccagacaccactgccacagtgggcgcttgccccgccctgggctgttctagtatttggatttgcattccagtccttgggagggggtcctcagggtcattagtgaggagccaagaggagtggggttgggggacactccttcctgtttctgttaggccacagactcttcacctgcctctgaagagctgctctgaccttggtctcctccccgcagtcccacattctccagcctgccctgccaagccccttgcatgcccactgctctctgtcctcccttctccccaccttcctctcatggagacagtatttctttctgtctgtctgtcccttctttggcccagacccagcctgaccaacgataagcatttcttaggctcagctcttgatatggaaatgagtgtcttcactccagccagcatcatggtcttcggtgcttccaggcctggggtctgtcgggggtgaaaagaactggcctgacctacctgaactgactgaccctctggggtgggtctgggacatcctcgaggccctagcatttctccttggataggggaccagagggcgcttgggatgttgcataagaacaggaagtcacccaagggatgtcaatttcttatccctctacatgggttggattttccaaaatcataatttgcagaagaccagcacttatggtggaatgtatattataaggcagccacactggggcagggtccttcccctctccccactcacggctttggccctttcacagattagaacctgagttagaggattgcagaagacgaggtgggagggcagggaagatgcctgtcaggtttttagcacagtttatttcactgggattttgaaacatttctgtttgaacacaaagcctgttctagtcttggcaggacacattctgggggtgggggtggaggaagatgtggtaatgtaaccggttagtcagtgttgtcttaatattgttgacaattctgtaaagttcctttttataaatatttgttaagctgtttcacctttgttttgaaatcctttcctttttttttttggagacagagtctcactctatcacccaggctggagtgcaatggcatggtctcagctcactgcaaccttcccctcccgggtccaagcgattctcccacctcagcctcccaagtagctgggactacaggcaygtgccaccacactccgctaatttttgtatttttagcggagacggggtttcactatgttggccaggctggtctcgaactcctgacctcgtgatccgcccaccttggcctctgaaagtgctgggattacaggtgtgagccgccatgcctagcgtgtccttcccttttaagcagaaaatgtgacacttgtgaaaaagcttgtaagacagcacttccctttttttccctttaaacctttaaatggcaaatctaggtaattaaagttgtgaatttttatttttgctttgtttttaatgaacacttgtctttcagaataggattgtgtgataatgtctaaatggcaaaaacaaaacrtgattttgcacaattaacaaaactactgcaagaaaaataaaacatttcttggtaacaaaaaaaattaatacatttgaaacatttttcatgtaaccttactgaccaggaatacttatattttacagtcataatggtagccctgcagtgcactctgggagtgagcgagcgagcattggcagttcattgtagtagtgtaggcagcctgcagtagtgcagtctcctgtgtctttagcatgatgagatggtaggatgcacccgagccaacgggccagcatccttactggccctaagctctcagaaaagcttcttaaactctctgagcttccctacagtgttcttttgaggattagaagtaattgaaagtgacaaatcctgaaagaagcagctcaacaaataatcattaattgctcctgatcctctgaatgaattgaggggtgtccttaattaggtgtatgcacaaagatcaactaggagcaaaggaaaatgttagaacttgtgtttctatttatttttaacctcactcttttacaatttctatttttttgtgaatatttttaaatataagctgggcgcagtggctcacgcctgtaatcccagcactttgggaggctgagacaggcggatcacctgaggttgggagttcaagaccagcttggccaacatggtgaaactctgtctctgctaaaaatacaaaaattagccgggcgtggtggtgcacgcttgtaatattagcttgtctctctctctctctctctctctctctctctctctctctctctctatatatatatatatatatatatatatatatayacacacacacactatgtatatacacacactgtatatacgcactatatgcactatatatacacacagtatatgtatatacacacactatatatacagtgtgtatatatatatatactgtgtatatatatatatactgtatatatatatatactgtgtatatatatatatactgtatatatatatatactgtgtatatatatatactgtatatatatactgtatatatatatatatactgtatatatatatactgtgtatatatatatatactgtatatatacacacacacactatatatatgccatatataatatctggtggccagttgtgtgaaatacattcattttctctgttgggtagattgatttgacctaactwtgagcctcaatctcaagaggtaaagtggtagtttgccaatttaatgctgcacaaaggattatttaagtaataataacaataatatcacattgtattttacagcgcttcctagtacatcataaataataaaaagacgcaggcttgggcaatagaataattactgattttcaaatgtaactgcttcatgtgtgattataaacgaggtaatcatggcattaaggtttggtatacatttagaagggaaaaagaaagttgaggttttagtaaagcagaaaaacactaagctttaaaaatgaagcctgaaaccatggaaagaggtttaacttccctagtaatcaggatgattgctgaatgcaaattgaatcaaatacaaattgaaacattaaagtacaatttcttgcccactatgttggcagaaatgttaacatctgatgattatccagcgcgactgaggatgtgggacgctttcttgtggaagtgtaagtcggtacaaccactttggaggataatttggcaatattttcagagttaaaaatgcttatgctttgtaaacctgccatttgtagtctctggatctgccctagggagatagtctgggtttgtttttttttttgtgaatgtcttccacagggagatactcttaacacagagtggcatgtacaagcatgttcaatgcagcaccactgttaatagcaaacagctggaggcaaccatcagtggggcaatggttcaaaaggttgtgattttaaaaaaaaggtacaatataattcacatatcataaatttcaccatcttaaagtgcacaattcagagttttttagtatattcacagagttgtactaccatcacctctacctaattccagaacattttcattaccccaaaaagaaactcatacccattagcagtcactccccatttccacatttctcccttctcccatcccctggaaaccaccaatctactttctgtctgtgaatttgcctgtcctggacatttcgtataaagaaatagaatcatacaatcggtggtactttttatttggcaacagctttattgagatgtactttgtatgccacacaattcacttttttttttttttttttttttttgagatggagtcttgctctatcacccaggctggagtgcagtgctacaatctcagcttactgcaacctccgcctcctgggttcaagcgattttcctgcctcagcctccccagtagctgtaattacaggtgcccgccatcacgcccaactgctttttttgtatttttagtagagacggggtttcactatgttgaccaggctggtcttgaactcctgacctcagcctcccaaagtgctgggattacaggcatgagccaccaygcccagccaattcacccattttaaatgtacaacaatttttagtatgttcagagtcgtgcagccatcaccacagtcaattttaggacatttttatcacytcaaaaagaaaccacatgccctttagctctcctccctgtccctgggcaaccattactgtccctgtagatttgtctmttgtggacatttcatataaatggaatggtaaaatatatggtcttttgtgtctggcttctttcacttggtgtattttcaagattcttccatgttctggcaggtaccagtacttcattccttttcattgctgaataatattacattgtatggatataccacattttgtttactcactcattagttgatagacatttgggttcttcccactttttttttgaaatggagtctaactttgtcacccaggccggagtgcagtggcgcaatctcggcctactgcaaccgccgcctcccaggttccagcgattctcctgcctctcccaagtagctgggactgcaggtgcataccaccatgcgcagataatttttgtatttttagtagagacggggtttcaccatgttgttcaggctggtcttgaactgacctcaagcagtccacccacctgcgcctcccaaagtgctgggattacaggtgtgagccaccacacctggcctctttccaccctgtgactgtttgaaatactgctgttaggaatatctgtgtacaggtttttacatgaacatgttttcagtttctttgagtagaattgctgggtcataaggtaacttttgaggaattgccaaactgttttccatggtggttgccccattttacattcccatcagcaatgagtgcgtgttccaatttctctatatccttgccaacacttatttctcatctttaaaattataactgtgaaaggaagacaaatcttgggaccctaaaatcactaagctaaagggaaaggtcaatctgggagctgcttaggacaaacctgcctcccattctatttctaaaaagatagctactaagataaaaaagttaacatacctccctctcaatttgtacacaagaaaattccttgtggacaaaggacagaactcaaagtcacccctctctttgttgagataaatgcatatctgattgcttcctttggaaaggctaatcagaaactcaaaagaatgaaactgtttgtctcttatttatctgtgacctggaagccccctccctgcttctagttgtcccacctttccagaccaaaccaatgtacatcttacattgttgatagatgtctcatgtctccctaaaatgtataaaacgaagctgtgccccgaccaccttgggcacatgtcgtcaggacctcctgaggctgtgtcaagggtggtcatccttaatgttggcaaaataaacttcctaacttgactgagacttgtctcagatactctggtttacataaccatcctagtaggtatggagtggtatctcattgtagtttttatttgcatttccctaatgatttatgatgttgaacatcttttcatgtgtttctcagccatttgtatatcttcttttccaaaatatctattcaattttttttattatttttattttcattttattttatataatattttgagttggagtctcactctgtccaccaggctggagtgcagtggcatgatctcagctcactgcaacctctgcctcctgggttcaagtgattctcctgcctcagcctcctgaatagctaggattagaggcgcccgccatgcccggctaatttttgtatttttttagtagagactgtatttcactgtgttggccaggctggtctcgaactcctgacctcaggtcatctgcccgcttcagcctcctaacgtgctgggattacaggcatgagccaccacgcctggtcggttctgtgtggcatttttatactatcctgcccagctgttaaaaggaatgaagcaaatctatacataataatccctgactagatctctaagacttaatgttgaacaaaatagcaagtagtaggatgatacattatactaccataaattttatataaataaatacactcaggtgtgccatgcatacacttacacacacacacacaaacactcacaccctggtactgttgagttaaatatatgtaagaggatagagaagggcctgatrtaatatttcccaaactttccaagatagttggttaccttgggctaggaagagagagaacgaagatgggggtggaagtggggtatgatctaaaggggcttttgtcttatttatgacattttacatagtatccgcatactatttggccaataaaacatgtaaaagctccttaaaatgtaattacaacctgaaaaaataagaacatgggagctgttggggaactgtagcaggagatgggttcaaatccatgctccatgccctctggcaagggaatgtgtattcattgactccttttatagctcagctttattttgtcttgggtccttcctctttttcaaaatagttttattattttttaatactatataacaattcaaatagcatggaggtttataaagtgaaaatgaacttatctcccctcttcacctgaaactacccaccctgaggtagttttagtgcacgtccttttcctgctcagcttctgtgttctggtattgtctcctgcccacccagtaagctgtgcttccatcttctcgttgatggcgaaagctccttcctccatgggaaagtgaagtcttcgttttgaagcatccatggaatggcctgcaggcttgctttgtgtcacctcctacccgagattgtgattgtgtcacctcctaccgagactgtgaactcctaccctacaatgagtaggtctggagttctacttgrgcgtctttattttataaaaagttcccatggtgattctggtgaaccaacagagggttaagagtcgtttatctagggagtaacagagcaatcataaattgtgcccatgctgcttctttgagaattatttttggtggccactttataagagtgatgagcctgtcagctttatggaaacatgcctgaacttagatggtctgttttcttccaggaatttcacagaacttttactttaggttattttcagcatttgtgtttttctagctaaatattcaacatggaactgctatttgagtctgagaaagtgatcatggattcttttttgaaaatgatggaaataaacagtacacggcaaacttagcttgtaaactctgcatttcacattgaaaatgggtggatatggtaaaaatgataggcggtaaatcttcaccaggcagagtgtccttgggtcttgctttaaaatacttttcctcccccacagcctgacttttgtatttcattttagtgtgtttgcctgagatgtgagtgagaaattcatgtgatagatgtctcacgtctccctaaaatgtacaaaacgaagctgtgccccarccaccttgggcacatgtcgtcaggacctcctgaggctgtgtcatgtcttaaatttgagtaatctttctcatatcttaaatttatgttaaagtttacattttctcttgtaggtattctcatgggagcagttataaaaattatagagtttaaaaaactggcgaattggaaggtaggtttgccctttggttgttcttaattttagtaacattgatcattatgctggcttttttgtaattacttggctatcagtggagttatttatattattatnttatatrtcccattactttttaatttttttattagatacaggttgatgcctttacatctgagtttttgcaaaagcataagtctcatgctgtttcaagtgaacatgggcgccaatgtcatttttttttgttattatacttgcatttttgtaatcctagactaacctacttttttaggcaggaaaattctctaattagcattaaacattaaatactgtttattgctcccaattccattttgacaactgaggataataaaacatacttgtccagtactgtgagacacagtactttatatattgtagctcatgttattctcatgacagtcatgtgaggtggattgtctgggtattgtaatatcatcacctcgtttttacagatgaaaaaagtgacactcagggagattgggatgtattcagtgtcacagagctagaaagaaagtggccgagtggagtcttgtgtccaaaccctctggcctgaatatgcagtgttttctccaccataccaccccgtcctcagtttgctgatatatatacccttgtgttaaagaggttattagaatatgaacatcatcctggggtgcaagtactcattgaaactggaatttcaacataaacttgagcatccatgttgagtagggcgagattaacaagtatgctacaaaattgattttgtggagggaaataagattcatttcaaaatataaagaattatatggctaaaattgatcacatttaagcccttcctactttgatgaagctcctaggtgctaggattaattgacctgtgaaactgtagagtgtaaaattagcaagacaaaccttatagactaacgtaaaacacaatttgaagctgttataaatagtagtaatgaaatattttatatattaaataaattttgaaaatgtatattgagctctggagagtgataagacacacttctgctggggaggccccactggagcgcattgcatgtgggatctctgccttcctgctacttggttacatttaaccacccaagagtgggtcatgactgaagagcctttttctactcctaggctggatatagcctgatgtgtagattttgcccactaacccattttgtttgatctgatttaaaaatcatttgatcaaggctgggcgttggcggctcatgcctgtaatcccagcattttgagaggccaaggtgggtggatcacctgagctcaggagctcgagaccagcctgggcaacatggtgaaactccgtctctaaaaaaatacaaaaaaaaaaaaagatcaaaatttgaattgactttaaaacaattaaaaattgttagattttgggcgggtgcggtggctcatgcctgtaatcccagaattttgagaggctgagtcacgtggatcatctgaggtcaggagtttgagaccagcctggccaacatggtgaaacctcatctcttctaaaaatacgaaaaagtagctggacgtggtggcacgcacctgtagtcccagctacttgggaggctgaggcaggaggatcgcttgagcccaggaggatcgcttgaggctgcagtgagttataattgcaccactgcagtccagcctgggcaacagagcaagaccctgtctctaaaaaaaaaaaaaaaaaagttggggcaggcttcctggaggagactgcatttgtggagagtcagagtgagaagtaggattcctgcctggaaaccagatgtgcagggagcagtgggaagtcagaaaaacaagaggagctggtggtttctttccctgaagttctgattccaaactgacctgctgggtctgcccaggtagcaacctgtattatcatgtgcttaatatttttctatcaacttgctttttaattatatgtatatatatataaattatttatttatttcttattttctttttttgagacagagtctctcttggttgtccgggctagagtgcagtggcacgatctcggctcactgcaacctctgcctcccgggttcaagtgattctcctgtctcagcctcctgagtagctgggcaggagaacaggcatgtgccaccatgcccagctaatttttgtatttttagtagagacagggtctcaccatgttagccaggctggtctcgaactcctgacctcaagtaatccacccaccttgtcctcccaaagtgctgggagtacaggtgtgagccactgcgcctgggtgtggctaatttttaaaaaaattttttgtagagacacgatgtcactatgctacccaggctgttctcgagctcctgggctcaagtgatcctcccaccttggccttccaaagtgttaggattacaggattgagccacgtggcctatatatttattttattttattttatttttttttttttgctggggagtggtggggagcagagtctcactatgttatccaggctggagtgyaatggcgtggtctcagctcactgcaacctccgcctcccaggttcaagcagttctcctgcctcaacctcctgagtagctagaattacaggtgcctgccaccacgcccggctaatttttgtatttttagtagagatggggtttcaccaaattggccaggctggtctcgagctcctgacctcatgatccatccaccttggcctcccaaagtgctgggattacaggcatgagccaccacgcctggccatgtttattttcaaggcaacattacagtactatttcaattcagaaactaatattgttttgtaaacatgataaaaatgaagtagtacagatgcctgctgaagcatcagaggtcaagtctgctctctgtcaagggagatcagcacgttggagagagcccttagaagcggtattgccatcctaaggtgtcttggatttatttgggcctgaagaaataatcaaaaggggctgactctctcaatccatgaggtcagtggtatttgacacacactgctcaagtgccacctaaaatcacctcagaacattttgggggagccattgccaaaaggaactgtaacactatttccctgaaaggcagtgtgttcataagggctgcagtaacaaattatcacaaactaagtggcctaaaacaacagagatttgttttctcacaattctggaggccagaagtgagaagtcaaggtatcaacaggaccaggttccctcccaaagactctagaaaagaattcttcattgcatcttccagcttctggtggccccggttttccttggcttgtggccgcatcactcctgtctttgtctctgtgctcacatggcattcttctccacgtgtctatgtgccttgttctgtctcttacaagtcgatgtttgctgcctttggccttcccttatccagtgtaaggtcatctagatccttaccttcattagatcttcagagaccctatttccaaataaggtcacactctgaggttcctggtggccatgaattgtgattggggttgggggacactatataaccccactataggtagattctcctttttcctggggtggggggggctagtttttatacctccaaaaggctgtatatagtggtcctgctgcacagatcctgagaataggttgccccgtaaaacacagagctcggctcattttttttcacacagtcccagtctgaatcatgagcttgagcttgttgtacatgctgctattttaagacttaataaggcatttcagaagtcatcatttgcttctattttgagcsttttttgactttcttttagtctttatggtaacagctgtacatttgtaagaatacatttaggcattctttggaataggcattttgacaaaaaatcagactgtcaaaattgtgacatgggaaaatattcatatgaaaaagggcctgattttgcatttttaaatagactgtgtattacacataaccattttgggcttgaggaccaatatatatttccccaaaattctaccaacaactagagagatatattaataatatagaaaatgaaattgttattgtttcacccctccaaagatggctatattctagaaacacctttcgtagtggcacttaataatcaaatctggaagcatggtgctatggtttgggcatttgtctccccaaacctcatgctgaaatttgattccagtgttggaagtgtttgggtcatgggggtggaccctcatggatagactgatgcccttgctgggggagggaggtgaatgagttgttgctctgttcgttccctatacagctggttgttaaaaacagcctggtcccatccccgccccccctttcttcctctcttgccatggatctctgcacactctggctccccttctcttcccccatgagtggaagcagcctaaggttcttatcagatacccagtcttgaacttttccggacagcagaatcatgagccaaataaatgtttttcctttgtaaattacccagcctcaggtattcttttatagcaagacacatggtaaggggctgtctttgtatcaaagtctcaagtcgaaagagcatccagtgtggactgttttatcacatcagactttggaaaatggcagagttgtctgtgataagcagaaagaaggcagagctattttaaccatatataggatttactgttcctctgagtggattgttttagggcttgccattacctttttcctggaggattccaatttgtggagttgtttttgaaagtctgcaaccagaattgaaattttctgtattcagattaattttctttctgtactaaggaataaaaaacatactactgtgttgtgctgtttcttttcactgatcacctttaaaatccttgtyttggccacgcatggtggctcatgcctgtaatcccagcatttggggaagctgaggtgggaggattgcttgaggctaggagtttgagaccagcctgggcaacatagcgggaccctgtatcttaaaaaaaaaaaaaaaaaaaaaaaaaaaaattagcccggcatggtagcacgcacatgtagtcccagctactcaggaggctgaagtgagaggatcacttgagcccaggaggttgaggctacagggagctgtgattgcaccactgcacttcagcctggacaacagagcaagaaagactctgtctcaaaataataataataataataatgataaaaataataaaatacagtttcatttttttttttggtgggggaatctctcattctgcttgattttattatcaggtagttatttaaacattatatgtttccactaggccaggccctgagagaayaattattttggctctttattgattaatttatttcttaattacacaaattccatgcccttaagatactcattttctatttacaggaagaagaaatgtttcgtccaaacatgtttttcctcctcctgcttccccctattatctttgagtctggatattcattacacaaggtgagactcaggcacacattggtgctttggtctggacagtttctcatgtttgtaaggcaagttccttaaaagcttgggtataatttagcagcagcagcagcagcagctctgctccttcctggttgtgctcagtggaagctggactgcagtgcctgacttctggagaggagcagacatgatgaattggctgctttaatggtttcaggcagtatggctcactgagccagtgtttgccataaatgggtgctttgcccaggaagatggctgaagtgatgttaagtggctcacagatgatgcattgactcgtcttcctggacacagactgatagatgtaaagaggatagactgtgtcctgggacgacggggacatgtgccccaggacttttgtttctttcagctcccccactggggcctttctaaccttctcaggcccatccatccttccatgtctccctctcggtgccctcccctggcctcagaccccagcttgatattccccttcatccctcaacctctatcgctcctcgcccactccctggtccagcttctccttcccaggctggagccccatccttccctgcctagtcccacagttgcctgcccattctttcctccctgccttggtgagcagtggcactggcccctacccacttctctgctttggcttggccttgacggccattgccttgcaactcccagtgtgagwtrtttttttttttgttttgttttttttgagatggagtctcactctgtcacccaggctggagtcctgtggcatgatctcggctcactgcaacctccaccttgtgggttcaagtgattcttctgcctcagcctcctgagtagctgggattacaggcacacgccaccttgcccggctaatttttgtcgttttagtagagacggacggggttttaccatgttggccaggctggtctcgaactcctgacctcaagtgatccacccaccttggcttcccaaagtgctggggttacaggcatgagccaccacactcgtcccctagtgtgagtctttctgcctgagcaggagcttctcacttttaagcctgcttgtgtgcgtgcatggttttttccttgtctgtgagttttctttaaacataaatgtatttaagttttaaaataaagtgattcaacttaaaatactagtattaataatacagcagctattttgtgaatgtgatttttaaaaaaactgtgaagattggaaagtttaggccagtccttggagagaggaaagccagagacacaacacagatctaatcatgcgctgccccctacaggtttctttttggtaaagtagaaaccaaaaaccccaaaaccctacctcccagggtgctttgagagtcacactagatgaaagaacgtaggcaaagcaccacccrccacactaaataaatgaagtgctgctgcttgttattaatgataaaaatgtcatttattattaataacaatattaccaccagtagtaataataatttattaagcttaatatggtcgggcccagtggctcatgcctataatcccagcactttgagaggccgargtgggtggatcacttgaggccaggagttcaagaccagtctggccaacatggtgaaaccccatctctactaaacatacaaaaattagctggtcgtggtggtgcgtgcctgtaatcccagctactctggaggctgaagcatgagaatcatgagaatagcttgaactcgggaggtggagcttgcagtgagctgagatcacgccactgcactccagyctgagtgatagagggagactttgtctcaaaaataaataaataaaaataaacttaatttgttgttgacatggtataaaataaataaatacataattttaaaaaatgagttagatttgtctagaaatgtttggtaaaaacatagaaattaagtctttaattttcctgtactaaaacaaaagcatattaagatgttcagcccagatttttttttaagttattattttattgtgcatctatccaaagaaaaagtgaaaaggaaatttaatgtaaaaaatattcacaagtcttacaaactgttagtgacatcagataatttttaacaaggaaacataagttgaaggtcaccatgtctttcctttcactttgtaaacaaatcttaactgtaagcagatatgaaaatatttcaaaacatgctgaggaaattgacttgattttgacttaaaaacatgacattttgaatattagagcatgtaaagtttttcttttcttttttttttttttttttagaggggagagaaacttgttcaaaatttgaggaaagtaatagttttttagagaaacattttgttgaagatgactttccagcaggaaatgtgacaatttatatgaaagggactgataggattatgaaatgctacttctgaaacttctatccactttctaccctcgcccaaagatgataggaagtaaagtttgaatattttattttaatattatgatatctgctaatgtaaatttggatttagaatacagattacagtaagattatcatcagttgatatgcattagctaggcagcaactggttctttgaattgcaaatattacacaaatcacaggatgttaattatgtcagagagaaacagataaatttgctttatgtagcagagggaagttcttgtattatggtaactttaacttgggtaaatgttcaggatccagattaatattaaccaaatatataaattatatcaacattagatctctgcaaacaggtcaaaactgattaatctgtttttttttttttttttttttgagatggagttttgctcttgttgcccaggctggagtgcaatggcacgaactcggctcacygcgaactcggctcactgcaacctcggccccctgggttcaagcgattctcctgcctcagcctcccgagtagctgggattacaggcgtccataaccacaccagctaattttgtatttttagtagagatggggtttctccatgttggtcaggttggtctcgaactcctgaccttagatgatccacccgccttggcctcccaaagtgctgggattacaggtttgagccaccgagcccagtctaatctgtttttaaataacaaaagaaaacagcgawttgcaaagagcaactcatagattgaaagccctttgttttgaaaaaccaaatcattgtgttttaaaattctttgtgcagtaaagattgatatgccaaacaaaggaattgaatgtcagatgataggcagccaagtcaaaattgcagcttctaggaggtgggcttagtggggcagtcagtgttcagctgaggacactcttttcacaagtgggctttaaaatagcaggtcttgatgtccatggtttggtgatttctgagctaaaaacaagattcttgttcacaaccacaatcgggggtgatcaaagactcttggtagctcctaagtggagttcatagggttataataaatagcttaatttccttaattttatggaaatttgaaagatgctaccatgctgcttgaacttgaatattttatcttaaacgctgtgaagtatagatagaaacattttatctgacatagttaatgatgatactaatagagtgaagtaaaattgtttaaaagacctggccaggaaaaaggaatatctgatagtgtatcttggtatcctaatagtgtggactttggatgtgaaacacagttaattccttcagtgcctgtctgttgggcatcttccatctgacgggcattatgtcagggaccgtgttgtgcgaaagcaggtggggtcattgcccagaatgagcctgcagcctcatgggaaagtaagacatcagtacataaataagtgcaaaattgcagtcttgtcaaccgctacaagagagggtgactgtgcactgagagcacagactaggatctgggaagagttgaaatgtcctgagatcttgggatgatgaaagcttaacaagcaaagagggagcacaacctgctcgaagccaccagtgggactggaacccagagaacaaaggcgagcatggtgccagatgagcccakaggcctccccaggagtcgaatcattcagggtgggggctagctgcattttaagtggaaataggggtccaggtgaaggcagcacaatcagatttgtcttttgggaagatcattctggaaagacgggagagtggagggaaaggggccctggggggttgaggagacttgtgcgaagctatgcagtgtttcagatgaaagatggtgtgagtgacgggacactgcagtaagtgcgggggtgcaggaagactcycgggctcccagcttgccacacaggttgggcagtggtgccttttacagagaatcaagtctgcacggagggccaggtgtgcaggccgtgccttcactgacaggaatggcttttctaatcatttccctgatttctgctctttcaaacagggtaacttctttcaaaatattggttccatcaccctgtttgctgtttttggracggcaatctccgcttttgtagtaggtggaggaatttattttctgggtcaggtaagaaaatcatctttgaaacactttgaaagtcttacattcttagagctagtgcagggaggtgggaaggtgaaatggggccactttgtggggcctgggtttcacccttaaggtaaattccttctggaaggaaatcctagcttcatatgaggcacagtagaggcgtgctaaattgtttcaaagtgtcctccaagacctttggtatctggaattgagtaaawcttttccataatcccccccaaagtatttgagtttatttgcaaaccaatactgtcttaaattagaatacctaaaaatgaagccaaatatatgccatcaagaacttcaaactgtgttgtcaagtagactgaattggggttgaatgctgttttttgataaaaatttgtatttaaaaaatcaaagatgtgcttttctgctggcattggagaaataataaaatcaaaggtgatgctgaatctcttcactcaattctaagctgtctacctgtagaattatatactctggattttccacaattgctaaaccacttcccagtggcaccagttgggtggtctctactttagacttcaaattaatttagaccaaacatccctaggaaggtagtatctgtagttttgtattatgcatgtccatgcatgtcacattcttttcctttattgtcagttgcagaaagtttgcctgtctcagttctgaaaattaagttgagggtcaggtatctgagtgacgggcagatttctttaacacatcagctgctttcttctctcaatagccaaagcccattccattggattttcacctatattgcagctttgatggcaccagaataaatctgtctgtcatgcagctttcttcattgctcagcttctagtattaagtaagaataaacttaaggaaactacagttaattgggcttgaagaatgtagcattcttttccatactctcgttgcatgccgatggaatgcatgtttcaactaaggcttaggagcttttatttttcaagtggtttgggaactgaagattaatgtccttattagttttaataaagcactaatggacatttaaatcttggctgttctccagggttttttttttgtgtgtgtctgtgtgtttgtgtgttttattttacaggctgatgtaatctctaaactcaacatgacagacaggtaaatccttcatactgtaacacccatgcgactgcttttcagacaggggaaatgtttctccacattgcttcctgggtgtggtactgttctattctctctctgtgtatttatttttggtaaggatttctgccatagaatcttactctgagttaatttgtatctctgaaatgaatcaaaastatcctaaagacttttgaagatccctagtggggcattgctgattggaatgatttagtttaagcttgggagggagtaactctgctcagctaactgccctgcctgtgtgcacgcgtacactgtaccattgtcttcttatttacaagacttttcagtcrccgtaacaaaaagtcttcttgacagattagagatggagagggggagtgacggagaaactttcctctgggattcccacgaagcctgtggtgggggaagcagggccaagacctctattgtggttattgtagaaagcccctccatctgaagccactcccgtgagcacttcccatgagccccatccaggatttcccagaattgcatagtgagaagcaacctcactaggttgaggcagttgtctctcagaaggtaccagatctagtgctgaaaaagtgcccatgctgagcatagtctgggttcccccctctgagagcagacagccttgctcagtgtgtctgcatttggtcttgtgacatggctggggagctgggcagcagggtcacatgttcgtccccagatccttgccatggggccagtcagagctttcaggatttagcagcagtttagcaacttgggactagaatctgggaacccttttcatgggaactgtgtctctgataacaaatccaattctatttctacctccactcaccacccaccccagcccaggacaattttggagcttttgttgtaagacagttttgatacataaacaagtagtcctattccatgagagctggaaataaagcagaactgatgtcctgtgtttggtaggtattttgcaaataaaaagaaatgcccagtaaaggaaggtatcacagtattcaaaccttccacttgttttgggggcaactggttagagatacagacaatgctggataacttcctgtgaagttgaattgaatcagtggttgggatgttcaggtggaggacaggaaaggaattgccctgtagacacactgacttagagccgggtagtgttttcctctccgtgtgcagaagtttcctttgctgttagaaagtgacgatccctcagatggggactgctctggggtcgcaaacccacacagccgcagggcctggcagagcacttaacagagggaagctggccagctgtgagtctagacatggggcagcggccagtgggagaacacaccctgtatgaagggacagccacttctcagcgccaactcatgattaccatgtggaaatctgggcccagaattggtggctattttaaatacttttttttcaaaaagatgctgggtttctagatttttatagggaattttccagtttttcaatgttgacaacttgctcaatttttcacaaataccatgcagaccaaacatgagaggggaccacagactttttgcaacctctgcactgtagaaaacataaaaataacttcgttgcacacgttttgttttgttctagtgatatcttgttggagagagatttcactcttagagatcctgaattatttcgctgccttagttcatttctttttcattttgttaatgttgctatcttttggggctatgggataaagaaaatacatttttaagttgaacttctggcgtttaaaaggcgaggtcttaaagatgtgaagtggaacagctgacagccaggtgaaataaccgtctttccatacagacctctcaatgattcagcagtttgtatttcagacttctcatcttcactgtcagaaatactctgcctcaatttagattcccaagcaaactgtgtaacatgatttatacaaagcatttcccccagccttttgtttgttttgtttttttcagttaatttagaaagtttattttgccaaggttgagcatgcgcacccgtgacagcctcaggaggtcctgacgacatgtacccaagatgatcagagcacagtttggttttatacattttagggacacatgagacatcagtcaacttatgtaagatggacgttgccccaaccttttattatgaaaaattttaaacatacagaaaaggtgaagcattgtgaagtgaatacccataaacaaatttttaaaatataaaaggtgtatcctgcaggggtaggagaggcacaggacagggaacttgggagcctgtggtgggcctgcgcttcactgaggctggagtatagtggcatgatcacagctcgctgtagcctcaaactcctgagctcaagctgtcctcctgcctcagcctcctgagtagctcggactacaggtatgcggcaccacttccggctaatttttgtgtgtgtagagatagggttctctctatattgcccaggctggtcctgaactcctgagctcaagccatcctcccacctcagcctcctaaagtgttgggattacaggcgtgagccactgtgcccggcccaggatacactttttagacatcatcctccttccttcacggcctctggtgatggggctgtggttgatgagagtgaaaataaaagagcgaccagaagctctgtctgggttgtggtgcaagggcctggggaccagccaccaataaaataggatctcccagatgggcagttgtttagtggagttaccttccctttcttccttccctttcttcttcccacctgcctgcctgcttgccttctgcaagtgtctctgggccatgcccagtacagaccctgggaattcacccatgacgaaaattcagcatccactcccttggagctcacaggcctgtgatgacctctgtgaggacaggcgaagtctgggaactgaatcctcagcctgggatccggaggcactctgggttaatgcgcatgagtcacattcacaggcagctaccatggaaaccagaggccagatgattgacttctgaagagaactgtacctggcaaggcagccaggcatttcctcagtcagctctcctctccctgaccctgcagccaaaagatcacccattgaaggctgctcagccgagcatccttttccccctagacccaggcttggtgagggtgggaagctcagggcagtcgtctctggctgatgactgacacaggctggccattgggtctccatgttttggctggtgttgtggaagggggcagacccaccattctgctgccctggaaagaaagttgcaacaggcatggcacagaggcttgtgggaaaatcaccaaagggcagggagagtgaattgtccaggctcatgtggcacatgaggccccttgagggagctggtcctgcctccctcgccagcctcttatggctcctgccactcaccccacccccaccaccacatgcaccttccttctgttcctcaggcagcaggcttgctcccaccgcaggagtcgcttgctgtcacctcagcctgcagctcttggcctggccagctgcttcttaacatgtaggttcttgcttacatgtgtcatcccttcacagaggcctctccagaccgccccatctaagtggctcccacacccacacccccaccccaccttcccacgtcacctcaattgatttcctgggtcacgtggtattgtctgaatttgccttcatctctgggtattgctgtatctactgttgggggtaggagtaccgactctgggcagatagcctggctctgctacttgttagctgagtgaccttggacaagttacttcatcatcccgttgtccctcggttttctcctctgtcattggggcagtagtagcagtctcatacagtcactgtctggattgttgagtcaccgtatgtgaagtgcttagaacagtgccggccatggtagcctccattcctgaaacatgttagacaatcagcacatatctgctgggggtgataagatcttcacggggactgtcagtgaggtcactggcccagttgggagatggcctcagtgtttctctcggctgtctacgccactcacccccaaagcacactggggttgctgctgctttttgacactttcttagatcttgcaaatctgagtgcaggctggggtcggtcacggacagcattccaaggggctggtggcgaggggcagagcagaggtcagatgcaggagctcatgggccatttggctctagctgctctgacccgtggaactgggcggtgtatgataaatatatctaagcaaaagtctcccttccatcattggtcaaagtcaagtctccgtgctgacactagaaaaccaggccattmctaacaactcagtttagagtgggcctttcatactccacccacaaaacagcagataagtggggaaaaaatacgctaccttctgtaattaattcagctcyagcgtgtagtattgctttctgttaaatatggcctttgactttaatgctttaatatgtggaccaagtgacacacattacagaatctccccttccctctgtctcttacagttttgcgtttggctccctaatatctgctgtcgatccagtggccactattgccattttcaatgcacttcatgtggaccccgtgctcaacatgctggtctttggagaaagtattctcaacgatgcrgtctccattgttctgaccaagtragtacgggggcagagaacagacttttttcatgtgacagaactaaaggtccttgtaacaaaggggcagatatttccacacagcatgtgtacagttgcttgtcctctgggtgatcagttcacccactctctttctctgtatttctgtcctgacaagccttgatgtgctgcaagaatatggtcaggttccaggggtggttaaaagaggagagtccacctttttttttgagacagggtctcgctctgtcacccaagctggagtgcagtggctccatcacagctcactgcagcttcaacctcctgggttcaactgatctcccacctcagcctcccgagtagctgggacttacaggcacgtgccatcacgcccagctaattttttaagaagtttttgtagagatggggttcgccatgttgcccaggcttgtcttgaacccctgggctcaagcagtttgcccacctcagcctcccaaagtgctgggattacaggtgtaagccattgctcctggctttgcccacctttttcgacctgccttttagtagtggtttctgagcccagcttgtcaacatcactgagggtgcttattaagtgtgacattcctaggccccaccctcagagcttctgattcatttggtctggggtgagtcccaagaccatgggtttttaataagttccccagatatgatgaagcggcctgttcaggggtcagtgtttgggcaatattattggcaacaaaagcaatagacagaggccccactagctgatgcatgtcaccttccttttcacagctttaaaataaggtaggaatgctgataggtgccctgccttaagatgctattgtgtaaactctactttggacactacaatttgttttcaaatatttgttggtattactaccctaattgatgggatctgagaagttaaagatgaataataaaatgtcaagaagtcattgggggccaggcgcagtggctcagtcctgtaatcccagcactttggaaggccaaggcgggtggatcacctgaggtcaggagttcaagaccagcctggccaacatggtgaaaccctgtctctactgaaaatacaaaaattagctgggcttggtggcgggtgcctgtaatcccagctactccggaggctgaggcaggagaatcacttgaacctgggaggcggaggttgcagtgagccgagatcacaccactggattccagcctggtgacagagcgagactccgtctcaaaaaaaaaaaaaaaaaattttagctgggtgtcatatcacgtkcctgtattcctagctactagggatgcagtgagctgtgatggagccattgcactccaacctgggcaacagagcaagaccctgtctcaaaaacaaaacaaaacaaaatcactgggaaaagtaaatgcatttcagataatctcaaatawatttttctgatgcagggatatttccttgaactctgcattttatggtggtcattaacaggcaggcaacaaacccaaagatttttgccaaaacacagatgtttgagaccagtctggacaacatagcaagaccccattctcccaccttcccgcaaaaaactccaaagcacgtggagaaaagagccccrgataatgtatcaaaaatgagctaagagaatcttagaggccagtgtgtgttctgttagataatagaatttccatttacctgaatactgacttactgcctttgctaaagcataaccactctgtggtagctggcattttcttagaagtttttttatagactatattcagaattcttatgttggaataaaatgcctcagcctaggactagatttgaggactgaatagttaaataaggtactacagggctgggcgcggtggctcacgcctgtaatcccatcactttgggaggctgaggcggatggatcacttgaggccaggagttcaagaccagcctggccaacatggtgaaaccccatatctactaaaaatacaaagattagccaggtgtggtggcgcacgcctgtaatcccagctactcgagaggctgaggcaggagaatcgcttgaacctgggagacagaggttgaagtgrgccaaactcacatcactgcattccagcccgggcgtcagagtgagactctgttttaaaaaaaacaaacaaacaaaagggtactatgagaaaagcatccagcattgggtaatgtgacatcctttccttttctttccctgcccctagttgttgttttcamatttgcccagtttttgccctgtttttgcccttcctttgcaggaggagcttaccaaatactgcctgatggcaagaggtgctcaacaggccttaaaaaacaaccaaacttataagtatttttgttattctaaatgtagtacatatattcttaccaaatttaggaaatacacaagcaaaaaagagagaagtatcacacacattgctactacctagagataattatggttgataatttggtgtaaatatatatacattttatttcaataggcttataccccaaatattgtactctattttccattgaacacaattgataaaacagtcttctggaaaataattttactggttacggtgtattcctttttctgggtttactatgatctacttaaccagtttcctactattggcyttttcatgtttctcttggcagaaatttctatagctttattaggatattatscaacatcatgccacaagacctttaaaaaatccaatggcagtattttttcttatttaagatctactctgaaagctgcctagcattctggtttttacttttatctcgtatcctggctacacatattgaacatttgtgacaaggaattttgcctaacttggaggtgacatcatgagttatttttatgcattgggagctaaactcaattgctttgtctcttgatttttttaaagaaaaataatttttcagaggtaggatcttttctgagcttttccagttgtctctattataaaagccaaagataggagactttttctatttaagatgggaaatgatggagtcatcgttggtagccagaggttcttactggaaaagtgctttggaaacccaagatggggccaggcatggtggctcatgcctgtaatcccagcactttggaaggccaaggcaggtggatcacctgaggtcaggagtttgagaccagccttgccaacgtggtgaaaccctgtatctactaaaaatacaaaaattagcccggcatggtggtaggtccctgtaatcccatctacttgggaggctgaggcaggaggattgcttgaacctgggaggcggaggttgtagtgagccgagatcgcaccactgcactccagccagagcgacagagcaagactgtctcaaaaaaaaaaaaaagaaagaaaagaaaccaagatcgtctgtggtaacagttcccacagttggatctgtggagcatgcatgtatagtttccagtctcctcgtccaccagcagcagtgctactgctgaggccacggttggatctgtggagcatgcatatatagtttccagcctcttcctctaccagcagcactgccactgctgagacccaagctggcttgagaatcagcctcacaaactctccagccacggctggtcatctgccatcagcatttggtgagggacctctgtgtgccagacactgctgagagccaggtggatttgacagtcggtccatgatgggcaaaagatgcccgtagagaagtgaacatggtgccttaagcatgagggggctcaatgaccagaccatgaaggatatgaggaaggcttctcagaaggaacgtcttgtgagccaggcctgggaggcttattttcagacagaagatacagaaaaggggcatgtcagacttaccccygcctccccctccaccttttttttttttttagtacagaagaaaaatatgctcctgggagctgttgtcacctttccttggttatcagaatcatacctggttttgaagaggtatacttcataaacgatcatctccaaagtgagctgacacatttatctttgcaactgaatatgtaaatgagttaccccctttttgatgttgttaccttcatgaatgccagaaagcaaatgtcttctgtttcttcrgtaacttgaattcattttsagctttgatttgttgctatgatagtgtgttcttaaagtcactgctgtagaggaaaccttttgttttctccagctacagcttaagctcatgaaatggaccctgaagcaatactcccttttattctttaaggtatgagaaacatgaccttaagaaacaaaatgtagaaaattaccaggccagaaagagtccaaattctactttcattacctggagttcagaaaccattgccccagccctggatctgctgttaaccctttgtgtgaccttacccagtgactcactctctttgggcctcaggctactctgtataaaaagcagtgaaaccagcctgggtacctgctgtggtagtgatgtgggctgaggctgggcactgtatgtgtgtgacctgcagatccatttttgggaactatgggtgatcatggccttcaaaagcacttttccaatatgagcccttgttggctgccacattcctcaaggtgggatgttaacctgtgatctgctagaaagaagggggattggggagattgtttgttcagatgagtctgcaaagctttcacgtgaagaaagttagatttcttttttgcaagacttctcagacctttattatgttattttgggctgtgaatttcctcgaaaggctttctgagtttatttgaccaagctaccttttcatcttattctgctttaaaatgataccaatcctggggcctggcatggtggttcatgtctgtaatcccagcactttgggaggccaaggcaggtggatcacttgagggtaggagttccataccagcctggctaacatggtgaaaccccgtctctactaaaaatacaaaaaaaaattagctgggcacggtggtgcgcatctgtagtcccagctacttgggaggctgacgcaggagaattgcttgaaccctggagacagaggttgcagtgagctgagatcgcaccactgcactccagcctgagcaacagagcgagactccatctcaaaaataataataataataaaatgatatcgattcatgacatggtgattgatgaagctgaatattactgttgactattctttgtttcatttactgagtcaacaaaaaggtattgactgtcttttgtgtgggaggctctgctttaagccccggacataaggcagcgaacaagatggacacaggcttcatcctcatggamtgargcacgacagtttcccatgctgtgaaggagaagtcaagcaccatgacaacctttaaatgggcaggcctgcgtgaagggatcagggcaggtgtgcctgagggagtggcactgaccctgggttctgagggatgaataagggagttagctggggcaaggaaaagtgaatggtgaccacctgggaggtgccagtgacagtgtggcccagatgtttagatttggggagaggaggtaaggtcagagaggtatggcaggcaggagccaagtcaaactaagactgggcttcctgataacgtcgggaaactgtgagttctgaacaggctggtaacctgatcaggtgtgcctttgaaaaggatcagttagggcctgtatttctagcactttgggatgttgaggcaggcgaatcacttgagcccaggagttcgagaccagcctgggcaatatggtgaaatcccatctctacagaaaatacaaaaactaactgggtgtggtgatgtatgcttgtggtctcagctactctggggctgaggtgggaggatcacatgagcctgggaagcagaggttgcagtgagctgagatcatgccactgcacttctgcctgggtgacagagtgagaccctgtctcaaaaacaaaaagagggggatcatctaggccactgagtggacaacggggttggtctgtaggaaggcaaggatgtctagaaggagatcagtgagacttatccctgggagtaaagggcagtaggggagggaagaagggaatggatttgagagacacgaggaggatatttaatgagaataactcgatgttcatggtgtaatggttttatctttaaggacaaaaccaacaattgaatttaataacatctgacattttactttgttctgttacagtaaaaggaaagttctttctttcatttcttcctccttaatgtctcctaaatcctccctctcagcctgaaacctcggacatttcttctttgggtagctccattctaatctgacttgccatagcctcaatttcaggttttatcacaggatttctgtactgaaatccttcctatcgactccccaggccttcaagctgaaataccagcacctttcctgggctctttcctgtccctctgccactcttctcaccttgcctcctgccactgtcccacccccaccccaccgctgcgttttagctgcactaatctyggtacttgaaagttcctacaatgggttgcatatgcatgggctctcttcctttgcacatgctgttccctcactgggtgccttcccccatttcttcacctgggcaagtcgtctttatcccaaatctaaacccagcccccggccttttttattttttatttttttgagacagagtcttgctctgttgcccaggctggagtgtagttgtgcgatcttggcccactgcaacctctgcctcctgggttcaagcgattctcctgcctcagcctcccgagtagctgggattacaggcgtgcaccaccacacccagatagttttcgtatttttagtagagacggggtttcaccatgttggccaggctggtctgaactcctgccctcaagtgatctgctcacctcggcctcccaaagtgctgggattacaggtgtgagccaccacgcccggcatcagcccacattttctcaagcaccttccttgagcccggccagtctgagttagttacctacccaccctgcttttctacagccctctacccctcccgcggattgtcattagtgttcatcttgtttttctccctcattagcctgaggggaggagctccttaagggcagcagctttgctctcatctctgaaccccagaaaataacagtacctgggacaaagtaggtgaacaataaacgtttggctgactgaatgaatgatggtatgaatgaatgaatgagcgaataagcaagaaatgttttaagttaatttctaagaactttgtgtatataacattttaatttatttctgttttctttcatttcctagcacagctgaaggtttaacaagaaaaaatatgtcagatgtcagtgggtggcaaacatttttacaagcccttgactacttcctcaaaatgttctttggctctgcagcgctcggcactctcactggcttaatttctgcattaatatccttttaatgtgatgaacatgcagggttaaaattattcctgataacttctgtctctagccagtttctcctgttttttaagggggccaattttagatgaagattttgcttaaaggaggatttttttgcttagtttttgtttgagaaacactctaactcaaggattttttaatctaacgtgaaatttaggatgtcacttttcaaagtttaaaaaacatgtacactgttggatatcagatgtgattttggggacctctcagttcccagagtatgataaccacactccgatgattttcgttttctgccatcttacttttcacatttggaaaactggaaattaattttctttgaaaatgtcaaatagaccaggtgcagtggctcatgcctgtaatcccagcactttgagaggctaaggccagaggattgctttcgcccaggagttcaagaccagccttagcaatggaatatagtgagacctcatctctaaaaaatacataaataaaaataaaatgccaaatagagaaaatttttatcccactgaaagtgtttatccagaaggattgcaaaaggggctttcaaagtgtgttccattgagttatttgcactgattttgttgtttgacaaccaataagcttttccagctggagmtggaaagaggcttgttaaggccaatgtcacctttattgctgtagaaatttcattatgtttaaaatagtaacaggcagtagaccacttcggtgcgcacctaagcctacgtctcagggagatggccacctggcccgcctccacgagcagtttgtgtcacagatggccggaagagactcttttgcctggttacaggcatgtttttctgccatcctgttgaattttcccatcaactcctttgtccagaagtctaagggctctattgagttggctgacagcttctcatattgtaccaataaacagaatggaaaagaaaattttttccagttcagtattttcctctatatttatctttttctttaaaaaaaaaaagtatctatcaaaatgaagtggagcaaatgggtactgtgagctccagtataggcattgtgaatgatgtttcaatatatagaaggctctctcctttcacaggggcatgagtttggaaatctccaggaataggaaatactgtgcttcaacagggcctcgaacctcagtttgaacagcgattctcactagttgtctttgactcaaaactgatggggaaagcaagatgggtagcattagtgatctcatccgatgttgttggaggagtgggggtgatgccggccctgggaggaacctggccaagtgagctgtccttggtgtgtctgcagccccagctttgcgccatggcccggcacatccccagccctctaagtcagcgtttttaaatgagttgacttaggttgattttcatcttccaccaccatttatctccggaatttacatttcttagtgttttgtcagattccctttcttatagcaacagtctccctacaaaggaaaaaatccataatgacaaatttccatttgtaaccttgggacattctaaaatctatatctgttgtttacttcatatatttggaaagcagcagttttgtgacttctccacatctcccatcaactctccctcgattctccttccttgacagttgtcatttacgtgctgaagcatattgacttgaggaaaacgccttccttggagtttggcatgatgatcatttttgcttatctgccttatgggcttgcagaaggaatctcactctcaggtaagtgacagagagcctgaaagtgctgtggtgatggcatcttgtcctgcctggggaaagaggctttgtcagttgggtcacttttagtcacaagagacagtcacaactcagaagagcttaagtaataaaggaaatctattggttccctagaaacacatctggatttaggcctgcctggatccaggggctcaaacagtcacattggtgtcacggtcacattttctcttaacccgccttctctcatttagcccatcagtcctgtgaggctccctcagaggagggtagccttgtaggagggaggtactgtgaaggtccctgttttactgatgagaaaactgaggttgagtgagattaagtaaattactcaaggtcacagctgggattggtggaacaacgattcaaactagttgtcttggagtcaagaactagtgcttagaaccctctaatacaactccctccaaaacagatcatcatgaaaccatgtactcagtgctacatagagggacaagcaaagtgtggtggtggcgtaatgttgggcgtttattggacacactttaccagtattcagtttttttatgctgataccagccctgtgaagtaggtactaagaggttgtcattagcccaaagctgcactgcacaagcagtggtggtagtgagattgacagtggaggcccagagccttttccctgcaccccattggaggagggcacacagctctcagcagcagagacgactctgatgcggccctagaagatgatgctcaccagctggaggaggggtggccastcacagcgtaatgatcttggagccgtcacctggtaatcactcagcagcccaatcaggcttggcttagttgggctttctgcctacaagtggcagtcaagcttgcgtccacagcttgttacgttgtaaggatgttgacctgaaaatggagcgtgactcacccctgttcctgtgtgagggggcagccagttgggaagggctctgccctggaagtctgatcccatcctttgagtgaaggcccttcagaggccttgttctggaaaggaggcactattgcagggatgttttgatctgtgccacaagatggcagagattttcttttttattaacttcgttgaggtataatttacacacaatacatggacccgttctaagtatatagttccatgaatttttgcaaatgtggacagtcataactacccccacagtcgaggtgtggcatattcttatcgcccagtgtggctcccctgtgcccttctgcagtcagtccacctgcctgtcctgagccctggcacccactgatcctgcactgtcattgtagtttaaatgaaatcatgtggtacgtagtcttttgtgtctcctctctttcagttacgtttttgagagacatccgtgtttttgcgtgtggcagtagtttatcgttcttattgcaccacagtttgtctgttcatcatttgaagggcatttggggttttccagatttgggctaagaacagtgtgcatgtgttttcatttatcttgggtaaatacctaggattaaggctgctaggtcatatggtaagtacatttttacttttttagaaactgcctagtgtttttcgaagtractgtatcattttacattcctcagaatgtatgagagagtgccagttgcttcatattgccaccacacttattttaatttaaaaaagtttagctgtcctgataggtgtgtagcaactgcatttagatgtgctttggtgtggttatttttatattcgccttgggttcattgagttttttgggtttatagtttatatgagtttatagctttcatcaaatttggtaagcttttgcccatttctttatcaatatttttttgttccgccttcctcttccccttgagacttcagtttactccagttatgagaggtagcatgctattggcccacaatatgctttgcctttttttctttttttccctatgtgcttaattttggttatttcctgttgccgtatcttcaaagtcactgatcttctgccatgtggaatctcctgctaatcctacccagcgtatttctcatttacatattttataattcatctacagcagatccctttaggttattttcatttcttccatttctctcttcatcatgttcatgttttcttctatattctggagcatatgaaacatagaaatttctgatagctgttttaatgtccttgtttgctaattccgtcatctctgtcaactstaggtctgttttgttgttgatttttcttgtgcttataggtcacattttcttgctctttgcttgttattaagttttgattggatgtcagtcattgtgaagttttatgttgttgagcacaagattttattgtattcctttacggagttctggacttttcttttaaaaacaattttttttgtgtgtgtgtgttatttctggacttttcttctggcacgtatctaagtctcttgacatcagtttaatccttcttgaggcttacatttaaacttttttagggctggtgcagagtagcagggccctaactaaggtgtctcaggtaccgtgagctcactccactctggctggtgggaacgcaaactattcccacccatgtcagcttctggaattgttcagcctacttctttttaatggttctttccccagcttcttgtttcatccgacatatttactgatcagtatcagtcaaagactcaaggggactttacagtagatgtccaagagytctctttctgtgcagcttccccgactcaacaggacagccctcttaaagcctcagcctcaggcagtcagctcagcagggggcctagggaaagagtggccacctttgtctcccttccrgcaggaatcacagtcctaccctatcttttgtcccatgtcagaaaatagttttgtttcatatcttgtatcaggttttctagttatgtagagcaggacagtgttctgtgtagcagtaatttcttcagacgcaaagctgaaggcccagtggtctctagtgactcagttgacagaacttttctacccagtcgctatccggagtcacacttgggtgctgcatgagcagcacaaggaggaagcagagtggactcaccattttcagggttttgtttttcatcgcagaccagttcaccagggtaattccatcctggtgtctgccatgaggttccctttctttactgaatgttggcacttacaaaaacgttacctgtgagtcattcggctctagcctagctatttttacatctgtttttctaaattgttcctctacccccttgagaagatcattgagtacctgttggcaaagatgtgtttcatgcatctgtttggaatctgtgattaaaataagggagtgtttttcttaccttcttttcagactggcagtgtttcctgttgagaggggtttcatttccttagggaccttgctccacacacagcagtgcaagccaggaacaccagatctgcctctgggtgagggaacctgctctgtccgcactttgccttttgggtatttgtcacgcagggttttcagagaggggcaggatggccctgtgtggtgtgtggacgccccacattgcactgtgaaagcacagatggaaagggtggtttctgctgtcttcaccttcctttgtgtgctccccttttcctgactatcacaaaggactgatctcaagtggttcccaagaccatggagcaggacattctcttcctaggaagtgggaattatttacctaaatccacatgtagggaacacagttgctaaggactggggctggataacagacagacttggatttgaatcccagctccacctcttattggctgtgtaacctcagattacagacttaaccaccccatgctctacttcctcattataaaatagacaaaagggccagcctgacgcctttgctgaggagtggggagcgatgcaagtgagagtcctgatggggcatctgtgccactgctggggtggccagaagtcctggtttgccctctgtctcaatatgatgaattaataatatccccgtttattctaaaaaatgtcctggtatccacagcaaatcaaacagtctccctaattataactcagcaagcgttagctattctcagaatatttgttctgactgtatccatgttaactatttttattgttcagtcaagccagttttgagggccactttggcctctgacactaaagattcaaagatgaatagaccccacttaggcagagcagttagcgaacactgggcttgcaggggatgggagagagtgacactctgtcaaggtgagtcacagaggaggggactttgggcttgaaggatgagtttgcaagattaatcatgagataacactttctttctttctttctttctttttgaggcagagttttgctctgtagcccagtctggagtgcagtggtgccatctcggctcactgcgacctctgcctcccaggttcaagcaattctctgcctcagccttccgagtagctgggattacaggtgcccaccaccacgcccgactaattttttttttgtatttttagtagagacagggtttcaccatcttggccaggctgatcttgaactcctgacctcgtgatctgtccgcctcggcctcccaaagtgctgggattacaggcgtgagccaccgcgcccggccaacataacactttcttaagatgttggcatgggccaggcgcagtggctcacacctataatcccagcactttgggaggccaaggcaggtggatcacgaggtcaagagatcaaaaccattctggctaatatggtgaaaccccatctctactaaaaatacaaaatattatctgggcatggtggcacgtgctggtagtcccagctactcggcaggctgaggcaggagaattgcttgaaccagggaagcagaggttgcagtgagccgagatcctgccactgcactctagcctggcgacagagcaagactccatctcaaaaaaaaaataaaataaaaataaaaagatactggcatgaagttggccaaagatagaatgtatggtgcagtgctcttctgcacagatatctaaggaattccattgcagcactgcttgggagagaaaaactggaaggaactatatgttcatcagtaatggaaaagatcaaattccagtccatttgcactatggaatcctgtgcagctacttaaaaaatgaacttgacctgtctgtactgccatggaaagaatttgacatattgttaaattttttaaaagtaagttgaaaaatcaaactctcgcccattcaagaaatacttattaaatgtccaccctatgctgagaactatccttgctgttggggctacatttataaacaacacaagatcagtttccttttcttgcagaagaaagccagaatttaagcaaacccatacaacaattccaggtggcaagaaatgacaagaagagaaattaaagccatgtgacagagagtggcatgtggtagagaatggatgggatctcaggcagtcagggaggtctcccctggaggtggcactggagcccagacctgtgtggcgagaggagccagcccagggacgctctagggaaggagggttttggcagcaggaactgcaggagccaggggtctgaagatagatgtgcgggagtgtggcatgctccaggaagagaaggaagaccagtgtggccaggacgctgcctcacaggttctgcaggcctgagaaggagctgggtttctagtatatgcaccacgacaagagagttggaagcccttgaaaaaaaatcactctgctggtaataggcaccatatatgtgataggatcctgtttattactttagttttattttattttaattttattttttgagacaggatcatgctctgttacccaggctggagtgcagtggcacaatcacgtctcactgcagccttgacctccccaggtttaggtgatccttccacctcagcctcctgagtagctgggactataggcacgtgctaccacacccaactagttttgtattttttgtagagccagtctcactctgttgttcaggctggtctcaaactcctgggctcaagcaatccacccactttggcctcccaaagtcctgggattacaagtgtgagccaccatgccaagcctattactttaaagataaactttataatcacatggtaaaagaactggcagtctgcatattgaagtgttaatagtagttaagagtagttacgtctgagcgggcagtatgaatagattgtcttttactctgtacctcagtgagtctgaatgttttatggcaaaatatgtttattattgagtaattaacacagcgtactcattacggtttcactcagccctcaagaagtatgttatattttacatacagtaaggcacggtacagtgtaaattgtaccatgataccttttcactgccttttggacttgaatcccatactgtcttcytttattacatctagaacagtggatgtaaccataaacagaagtggatttcctctctccctttcttttctgccattcttccttcaggaggctgaacgcttttgctgcatttgctttcttaaacgattttgcctaattcttaaaggaaattcttccttaagcgtattttttcaaataccatgccttttacctcacttaaaaaagttatcctggtttgcaccaacccccgcttttgtgtttctgtagcctgctccactggccgcagatgagggtgatgtgggtggtggagagtcccctttgcttctggagggcatatgaggcagatacttgagccatccctctggcttttgtgcctgctgctgaccctctttcctttcgcctagaactcaaggtgccctgaccccacactagcccagggtaaagccctctgggattgtccagatggcccagtgccaacagtgggtcaggtgcacaggtggcagctgtggtccagtctcagcccccagacagggcttacttatccatatagaaaaatccaaaatgtttgaatttgttgccatccttaaagatggagatttcctgtaaggaaaaccagaaggaagactggtccatgttagatcctcartcccacagggctacygtcagcctttgtagacaggctgagccgagactgcgcctctaatcccagctgcttgggaggttgagacaggagaatcgcttgaacctgggaggcggaggttgcattgagctgagatggcaccattgcactccagcctgggtgacaagagtgaaactccatctcaaaggaaaacaacaacaaaaacactcttgmgcttcaaagagccctaaaggagcaggtaaagaagtctcctaccctctcattttccttcgcccaccatgtcaggtgtgtcttacaggaagcatggctggaatctccctgtaggggaaactgaagagcaaaggcatttgctgtttcctaagagggttaggagatcaaatgtccagctcctgctgtcactcagccagcccatacctgctggggcaatacaaaaaagtaggtttcctatattttgtagggtattgtgttacagtaagcttagcagttgacaagtctgtaatacagtgctgtgattttcaccctttttttttttttacagttttttgtttgtttgtttgtttgtttttgagacagagtcttgctctgtcacccaggctggagtgcagtgccgcaatctcggctcactgcatcctccacccctccaggtttaagcagttctctgcctcagcctccagagtagctgggattacaggcgtgtgccaccatgcccagctaattttttgtatttttagtagagacggggtttcaccatcttgaccaggctggtcttgaattcctgacctcgtgattcacccgcctcggcctcccaaagtgctgggattacaggcatgagccaccgcgcccggccgattttcacccttttatacrtggaaagtttgccagatagtcactgtttccacaaaatggcagaagtgaattaaaactttgcttttaaagtttgacttgsaattagtatatcttggcagcttatttgatgattttttaagacaatctcagcttccttacatgaaatagagacccctttcctgctccctatgcagggagatgctgagaagagacctgtgagttcctcaggagtgactgagggcagcggacgaatgtcgaggctcaaatcctgtgtaagcacagaaggttgtacacaccctcgtgcagggctctgaagaaaagatgcattacctttttaaataacagtagttcatgattatgggaaaattcaaagttaaggaaaagtattttaaaagtccatcaaaatccacacatttagctgggtgcagtggctcacacttataatcccagcactttgggaggccgaggcaggttggattgcttgagctcaggggtttgagaccagcctgggcaacatagtgaaaccccatctctacaaaaatacaaaaattagctgggcgtggtggtatgtgcctgtggtcccagctacttgggaggctgaggtgggaggattgcttgagcccaggagatggaggttgcagtgagctgataccacgccattgsactccagcctgggcgacaacgcgaaaccctgtctccaaaaaaaaaaaaaaaaaagaggccgggcatgttggcttacgcctgtaatcccagcacattggcacaatcctgaagtcaggagttcgagaccagcctgactaacatggagaaacctcgtctctaccaaaaatacaaaaatgagctgggcatggtggtgaacacttgtaatcccagctacttgggaggccgaagcaggagaattgcttgaacccaggagggggaggttgcagtgagtcgatttcacgctattgcactccagcctgggcaaaaagactgaaactccgtctcaaaaaaaaaaaaaaaaaaaaaaaagaatccacacattctccatacacagattcttaggctcctttctgccccccagagtggtttgcttgccacccttatatagtcatccctcagcatctgtggaggatcagctgtaggactccccacgtatagaaaattcataggtgctcaagttccttatacaaacggtgcagttggccaggtgcagtggctcacacctgtaatcccagcactttgggaggccgaggtgggcagatcacccgaggtcaggagtttgagaccagcctggccaacatggtgaaacctcttctctactaaaaatacaaaaaattagccaggcatggtgatgcgtgcctgtagtagtcccagctactcaggaggccgaggcaggaggatcacataaacctgggaggcagaggttgcartgagccaagatcgcavtattgcactccagcctgggtgacaagagcaaaactctgtcccccccccaaaaaaaagggtgggggggtagtgcagtgggccctcaatagccacaggttccacatctgccaaccctatccctggatgtcagtgatggtccacacctttttakctttggtgctgtgaaggggactttacatggcttattttcactcaccctcctaacagttctgtgagtggctactattagtcccactgtacagaagcggaaactgaggctctgatgggggatgtaatgtggctcaaggtcacccagctagtaatgaggctgccagagcgaagggacccatagtattttttctgaagcctctgggaggcttcaggaattcatttattttcctttttcttaaaccctctaatgctctaggccccagggccttgcaggcattgtgagatctgagttggggatcacacrgcagtgctttctgttctgttctctccctctctaggcatcatggccatcctkttctcaggcatcgtgatgtcccactacacgcaccataacctctccccagtcacccagatcctcatgcagcagaccctccgcaccgtggccttcttatgtggtgagttctgcttctgtgtggccgtgagcaggcccacccagagctgatcttgcttccttatcctgtttgagaagtcagttgagactttccctggcagcagggcagcagctcctcagagccagatccctcactcccttatcttttgtttgttcctctggctttgaaatttcataaagtaaaccaaacacctaataaatgaacatctggcgcctacaatttaaagaccaaaaatagtgagaaccaattatgaacatttgatacatgcatttttaatgtattaatgtgacatttccaaaaatgtattccttggaaataaaatattaatgatggtttggtgaaaatggctccatagtcaagcaaggcatggggctcacacctgtaatcccarctgcttgggagactgagaggatcacttgagcccaggagttcaaggctgcagtgggctatgatcttaaaaaaaaaaaaaaaaagaaagaaagaaaaacaaagcttttgtagtcaaacaagagtttaggaaatcctggttaaataaagtttaacatttatgaattgccagacttttcagcaaataatggattgtcaaatccttaacgggggatatagttatagaattttccaaacttgtccacagaatcctttattcacaagagcagcctgagggacatcactcggggacagttcgcagtagaggtgtcatttgttgggctgggataaaccacgatggctttgtctttaagcagtttgttcaagttcttgttcccccacgctccgacatacccatgtatctccccaccaactttatacttggaagtggttggagtcggggaacagctctcaccatgtccctttaagctggcccccaagtgactttgccctagctgtcatcaaaatcacccctggcattttgagggacttgtctctttttttttttgagatggagtcttgctgtgtcrcccaggctggggtgcagtggcgtgatctcagctcactgcaagctccgcctcccgggttcatgccattctcctacctcagcctccggagtagctgggactataggtgcccgccaccatgcctgactaattttgttttttgtatttttagtagagacagggtttcaccgtgttagccaggatggtctcgatctcctgaccttgtgatccacctgcctcggcctcccaaagtgctgggattacaggcgtgagccaccgcacccggccacttgtctcatttttaattgctacttccacactgttagcgtgctaggaggcaaaggcaacccaggcagaaacttcagcagataaggaggctcaggtgaggagtagtcacatgacttgcccatggtctcatggccaagaagtgggtatgcaggccaggtctctttattcctgggccagagggtattatttgtacagcacctctctcagaaagccaggctacagattctgaccctgagcctcccagttaaagacacataaagcaaatcgtccatccaaaaagattctattttgtacccagcagtttggcaaatgttaagtttgataatacccacttctggccttggcgtgtggaaaacaggcctactggaatcttttctggagagtcatttgccacgtctgtctgaatttaaaaggcacgtgctctttggcccaacagtccaaccctgtggaatttagcccatactggggtgtttgttgaacctctcagaaataaaaacagtctaaatatccatccatagaggattgggcattagaaaaattgtcgaattttgacaatttgtcaaatgtgacagaaaaactgtcaaatttctctgcaaataaacattatcccgccaagggaagatgataaacacaattctgcctgtttactgaacaccttcattagcaagggtcccaactgtggcaaagtggcagaaattcagagcaaatggataccrtgatgtatccagatcctggagttgatgctgccagggaaaagcatccactagatctgaatgtcttctaaatgtgctcatttggaaagatcacacaaatattagataagaaaaaaatttcagagagagaagggggggtaaattctccagcttgtggacttgttttaaacttgggtaccattcaaaggaaaaacattgttagaatgtaaaacagccttgctgtttgtgatcaactattttaaaatacagttttaggccaggcgcggtggcttatgcttgtaatcccagcactttgaggggggccaaggtgtgcggatcacaaggtcaggagtttgagaccagcctggccaacacagtgaaaccctgtctctactgaaaaaaaaaaaaaaaaaaatagctgggcgtggtggcgagcgcctgtaatcccagctgcttgggaggctgaggcaggagaattgcttgaacccaggaggcggaggttgcagtgagccgagatcgtgccactacattccagcttgggagacagagtgagactctgtctctaaaaaaatatatatacagttttaatctctttagtcattatgctgttctgagggccatcacagtttaagcagagagcctagtgttagaaatttatarggtgctttttcttaatatatacaagtttgtgtgacagagagtaaatattgggctctttttggctcrcagagtggagccaggagttagcaatgagtctcactctgcaaatcctgctgggtgtgagctgtgttctaaaccttgtggcagtgttaaatatattaagctaatcatgtggaagttaaccagaggccccttcacatttgtcatgtggcgtctgcagtcatttgctctgaatttttgccactttgccrcagttggggcccttgctaatgacagtgttcagcagattgacagattcttgtgtttatcatcttccctgggtgggatcgtgtttatttgcagaagtatttgacagttgactcattacattaagagatttctgaataccagggacatgtagcttatgtaatagaaaagaatgagagaatttaagcacaagtttgaccaagatattggctgcaggattttcaagaaaataaggaaagtgttgtattggattctgactgtgaatgtttgcttgcttaatagtttagtaccatattggaatgaaatcattggggttgaataatccattctttggtttgtttcagaaacatgtgtgtttgcatttcttggcctgtccatttttagttttcctcacaagtttgaaatttcctttgtcatctggtgcatagtaagtattttcctttttttttttaaatttaattacttatttgtagatcrataaacacatgttccggattcatttatgtaactgttaactgttcaaagtcaacagctacatagacactcttttgtttaaagtttcttttgttaaaaaaaaaaaatcacaaacatacagtaagggggcaggggtagaattaagtgaataaatatccccagaaaggacttttgcttgttttttaagatttttaatggccttgaatattatggtctttaaataaaagtacaggtttgtaagtttttgtgtgaggaggtaaaagcagatttcaaaattgaatatgtaattgatcataaccatgtaaaaatattatgcacagaaaaaagaaaatatgtaaagaaaatatagccacatgttcacagtggtcatagagttgggatttctttctcttttctgctttttctggataatttattatgtacttcttactgcagttttcttcaaatttgtctatttatatttgtctatttgtctgtttataagatattgttcctgcaacctgggtacttccatctctcagtcagcaagagctcattgctcttggtcactgttatttgtcctccaaactcaggtttcagggcaagagagaagcagcaaaagtcctttacagaaagtataatagcctaggctgggcgcggtggctcacacctgtaatctcagcactttgggaggccsaggctggcggatcatgaggtcaggagtttgagaccagcctggcaaacatggtgaaaccccatctctactaaaaatacaaaattagcygggcgtggtgatatgcgcctgtaattccagctactcaggaggctgaggcaggagaatcgcttgaacccgggaggcggaggttgcagtgcagtgagctgagatcatgccatttgcaccccagcctgggcaaaaagagcgaaagtccatctcaaaaaaaaaaagtataatagcctttagtgtggccactggggaaaagggacacatttgatcaaacctgaaacaagtgtaggcatggaagattggatttcagtgggtgaaacagggaggtgactatttcagccacaggttgggaggaaaatgaaaggatgccctggggtgacaactcagttttctctaagcagttaggcccaggctggccctgcagctagtggagatggcctattcaggtgggttacagttcctgccctgtaaactcaatttagtggtcaagagcatgggctttggggtctgaaccagatttgagacttggatccattacttcctgccttgtcaacttggaccaattacttcatctctctatacctcagtttccttgtctataaactggagacaacaatacctactttgtaagacctttgcaaggatttaaatttagcaggataatgcatgtaaaatgattagcatgttgtctggcatagaaatgtttgatgattggaaacatttactcttggccaggcatggtggctcacgcctataatcccagcactttgggaggctgaggcgggtggatcacttgaggtcagcagtttgagaccagcctggccaacttggcgaaaccccgtctctactaaaaatacaaaaattagccgggcatggtagcacacgcctgtaatcccagctactagggaggctgaggcaggacaattgcttgaacccgggaggcagaggttgcagtgagccaagatcacgccacagcactccatctcaaaaaaaaaaaaactctcaaattcatgcttgttaaaggaataaacttaaagcctaaagaatgtactgtacatgtctatatcatccttttcaagtagttatggtgagaaccaagatgaagaaaatgaaagtaaagtaataaatgtcctaagaatccacttagataagatttaaactttaggctgggtgcagtggctcacacctgtaatcctagcactttgggaggcaaaggcaggaggattgcttgagaccaggagtttgagaccagcctgggcaacatagcaagacctcatctttaactaaaaaattttaaaaagtagccaggcatggtggtgcatacctgtagttctagctacttgggaggttaaggtgggaggatcactggagcccaggaggttgaggttgcattgagccacaatcacaccactgcactccagcatgygagacagagtgagactttgtctcaaaaaaaaaaaaaaaaagatgtaaactttacataaagctgtactttgccaagactaacatgcctttggagatggagaggaaccaaaagccacagcaagcagctggcaggctaagccggggcatgtggcctcctgatagtccctacctctgcgttcctcttgctcagagagcagtgtttccatgcatgggaggtccttcatagctgccctcctttccctgagggagaggcagaaacaccttgtctgtccccctagtcctggtatgatcaatgcagccctgtcccaaggaggggcaccttgggagtcaggttgcccttaaactaatctgtgaatacttctgtacagcctcttggcattcagttttgttctgctgtcattactaaagcccttcctgatacctcgtccgtcctctcttttctggctactaagaaaggtaacgtacaaagctttatcctttcctagatgcatagaatcccgcagctgtggcagcacgcccatgctgggtctctgacgagcatggtgttgctcgtgtcttttgtggctgaggggaatactgcatttgtactggatgtgttacacagtctgcattagcttcatccaagaagcttcagcttgaagagccagatgttttcacctaagacttagtttgttsctatcaacaggtgcttgtactatttggcagagcggtaaacattttccctctttcctacctcctgaatttcttccgggatcataaaatcacaccgaagatgatgttcatcatgtggtttagtggtaagtcaaatcttggataaatggggtggggaagtacctgttaaaagcacgccccatacagggagagctgtggttctctgctagcgcccttggcaaaaccacaagtaatcaatactcccgtttaatggcacccactgcaatcaagatggtgcccctcaccatggtgctatgaagtgggtgaggcttggttggaagagggcaaacaacatgcccagggtcacgtgaccactggaggcagagccgggatttctgccactctcttctgaacaccatagtgcagtccgggatgcagctgggcgtgcttcagcgcctccctgggggtcttctaggctgaagtaataatggtctcaaggtagaaaaggtgaaagttgaaactgtttcataccttatgttagttttggatatttttccttttagtcacaaagttctagtagtttaatttgaatgtttcagttgctatttaatcactttttaaaggacggaaatgatttcatacatctttgcttctaaagaactggatccataggcatccttaaatttatttttgagcaatacatactgttctttatgctttcttgcttaaatattataatcaaagtattttccgtgtgggttgggttatagcaacacactataatgttctctatccaaaggcatatctgcaagtttgtctcagatttctcttctttcaaaaggccatgtttaaaaatgtatatgtttcatatatatgtacgtatgtgtatatatacatatacatttatatgtggtgagaaaaactcatttttttcctaatctcttttgccagtgaggcaaactactttgtaaatggttgcagaagtgtgtcagaggtttttgaagtgatgtgggctatttgggaaggggggcatgaggataagagagcgttatggggaaggttggagtgtatttgaaatggcgggggctgtcggctcctgttctctcccaggctccccgggctcttgctctgtgggtttccatccaggctttcctggatcctcaacgaggggcactgaacaagcctctgctaccggcccctcccatcatcatttaagcaatcagagcttctcctccttcccacaaaacaccagcaacttcagccagagttcctcctcaygtcccccgcagctgygtccgcacctcttttgccatggccagacccttgcgagtgagccgtgctcgctcattttctccacttcttcaccgcctgtccacggggctggaattggccttggcaggtcaccagtgacctcccgcagccagacctggaggggaggcgtccgcccccgtcctagcctacctccttcccactgcccctaccttctggcgaggaccacttcactctcttccccggcctctgggccatgctcctcctttctctcctttgacgtctccttgggctcgtcccccttcgctgacccctcaaatagtggcttcttcaggacttggccccagccccacttctgttcacgtgttctgcacttcactgagtgcgctyacccgtccactggccttcacttccacctagtcccaaagctgttcccgcgaacccagacctccctctgggatccgtactcctgtttccagctgcctgtttggatgccgtggggatgctgtcatccctatgcctttgcatcccccttgcccaagaaatcctactttgaattgcccsgtggcctggctagccsgtactaagcacttgctgggtacacaccctgttaaagcacattacatgtcccgtgtcactgaatcctctggcccgtgacaggtttagagaggctgagagtcccttgtcctcaccatgtctctgtattatgtgccctttgctcttgccctgccgtctccccatctgggtctggcctgcagcagcctggctgccctaccccatggtgatgtgagcctccccgctttcctgtctggggaaggtcctggtgctgtctgcaccatgcccccccccaccccccmcccccctccccccaccatctcttccaggtagcatttcacaccccttatttgctgtgyctcctcccagctgctctaggagctccccaagggtggggctaggactgcctgtcccctccgtatggcaccaaggaagccaggaaacttctaacagaggaatgtgctgttttccagctcagtccatgcccctcagttgtgccctagtagcgtcacagaggaccagccagcctgtcattaccacctaagcagcccacagccccatcagtgccaccaggggcctccacagggacagcatctcgagataggaggggtactggacacattgcatcttgtgctgttgtgggtattagttgagtggccctgggcgggccatgctgctcttggcctccatccctcatctgtgtgttgtggacaagagtagcgctgctcggtgaggattcctgtgaagatccagtgatgctctgcacactgagcacctgcccaggcctggcgcacacacagggagggctcagcccacagcagctgtcctgcagtttccaagacacgagcatcaggcttgctaagtcctcccgcacccgcatctggggctctgtagctggggcaggccatctcatttgatctgccaatgttggaatggaggtgagtctgtggtcccatctctgccacctgctctttacaccccaaagcctcacagggtgagcacacactcttcagcagggccattagaatagtcagctggtcgtggtgctgggccggctggatttccagggaagccagcccatgaagctgctgcctcttcactgtgtcctctcacactgtttgctgtcacccaggcctgcggggagccatcccctatgccctgagcctacacctggacctggagcccatggagaagcggcagctcatcggcaccaccaccatcgtcatcgtgctcttcaccatcctgctgctgggcggcagcaccatgcccctcattcgcctcatggacatcgaggacgccaaggcacaccgcaggaacaagaaggacgtcaacctcagcaagactgagaagatggttagtaccatgcgcctgtgggggtggggcagggggctggcctgctacgcagctggtggtccccactgtcaggaaatggggagatgagccttgctttcttgctttgaggatgcccagcacctccacacacacgacacacacacacacacacacacacacacacacacacacgacacacacacacacgacacacacacacacgacacacacgacacacacacacacacacacacacacacacacacacacacacacacacacacacacacacacacmcacaccccggtcatcccccctgagaaggaggtgacggaacttgagttctgaagcatggctcttggggtgggggtgtctggtggccttgtgacctgccgcagccatgggggctgtggacgaccccatctgctccctctctgaagctccatggggcaccacaggagtctggacctgtgccacaaccacagcagtgcctctgccctgccagcagctgagacacctgtcagggcccaggtttgagggtttcaaaatcctgtcattccccagtatggttttactaaaaaccacctgttgggggcctgaggaggggaggatgtcttgcggtggctgtgagggccgtgagaggggtactcccccaaggacagacatggtgtggggctggaggtacccaggccccagctgtagggagagctgaggttctgcagcctgcccacctcttcttcctacaagccaccgcccctgccaccaggctgccttccygccctgtcttcaccctcaggacccctgtgcaaagctaggccctctgaccgaagcagaggctgctgtaggctccagcccagagcatcccctgctgatcaccatgcatttctggacatgcatctctttctagttcccgtattctaggcctcagtaactttaatcagtcatcagaggcccaggagtcctcacgtggccatccacggctaacactggagtcagggctggcaagaccatggcctccaatctccatgctcrgctgggcccctcacccagtgcagtgctgctgggaggaaacttccagatggctgtgaggcctggctctgcagaacttccaccacactaagaggccctttgcccccaccccctatctaccaacttttttgtttttcacaaaagctctagcttaggcctttctgggtatcagaatcggtggggggcttgctacacacaggctgctgggtctcacaccagcatctcataggtatggtatggggtccgaaagaatttgtgtttcttcttatttatttttgagacagggtctcactctattgcacaggctgaagtgcagtggcgtgatcgtggcccactgcagcccagacctcttgggctyaagcgatcctcccacctcagcctctggagtagttgggactccagacaggcgtgaccccacccagttaattttttcttatttttagtagagatggggtctcaccatgtggtccaggctaagaatttgcgtttctaacaagttgccaggtggtgctgctgcagctgatcctgtgaacacgcttggcgaagcacagcactagcagaaacaggacagctcctctgaggatgaaccgctgagtttctggaatgttttctgtggcagtcagtgtgcttgcgttttccttggatgatctcagattgtccccatagcctgccagaaactggcgctttcattatacccactttgcagatgagaatgccgaggcaccaagagaatcagacagctgtgggcacagactcccgagcctgtcctctttactaccacgctgatcagcagtcctcaaaatgggctccccagactagcagcatcactggaaacctgttagatctgcagattcccaagcccattcagacctactgaattagcacctctgcaggtggctgcggtgggctcagtattttgtggtttcacaggccccccaggtagattctaatacagaccagtgtttgacaaccactgcttcacagcatctaaatgccctcccctccccggccatcctctgccctccctgcacctgccccgtccccctccccaccacctgcagtgaagctgcagagcacacttcactgtggccccactgagactcctccagcagagcaggcgctgcactcagagcctgtctgctttgctcctacctatgacccgagtcccgcctctttacctccgtctctcccctccacatggggtccttttcttcgtccctccccaattcctacaggatgtgttcctctcccctctcctctcttgacttgattggcaaaagcctgtccacggtggagtcctagctaatagagccacaggcaaagagacaaaaagcctccctgtgcgatttgctgctaatgaaaagcccagaacagcagttctggtcctggttgcatgatagaatcacccaaaagcttgaaaagcttaaagaccaagccccagcctggcccagtccttctgttttagctgtcctaggtggggtcctgggcatccattgtgccctgatggacgttcctgcctccctgcaggctcccaggaggccgtctgctgcccgtcaccctgcattgatggtcaagtggagttagggttggggacactggcggcctgggtggtgtgggggcttccaggaggtgccccccgatggtgccagctggtggccgtcgggccgcctttcctccctgctcagggcaacactgtggagtcggagcacctgtcggagctcacggaggaggagtacgaggcccactacatcaggcggcaggaccttaagggcttcgtgtggctggacgccaagtacctgaaccccttcttcactcggaggctgacgcaggaggtgggataccggccaggccacacttyctgggggtcccttgcctgcctccttcaggacctgcggtggcccagggtsgggtggaggaagagtggggaggcaggaaagctcacgtgggcccgccaggccgccgcctcccgatctggaggctggacgtgcttgtggaactcggcatctgctgtttttccttcgctgccacatttagtgcgaggttaataatagatttgttaacacagtttggttttcctggatgatagactcggggtattgatcagctactgaatcggagctgaggaatttcagacataccagggcctcaagctgtggcccaagtctgcccccagctcagggctctggttctgtccctcggggcactgctggcctctctttagttggaggccttgggtaggggtggggctcttcctgctgctgcccgctttgtttccgagcaggcccattttccactctccggcaggcctgagagctgccggtgtgtgcgctcttccaggagccaggcagctccagtgactgtgaccacgaccgcttccttctccagcatcctgtgcagtggatgcagctgtgtccctgacagctgaggagatggaggcctaagggggtgcagtaaccccgcaaggtcacagccaatatgggcataactgggagcagagctaactgtgtctgactccagagaccacatgttcagcctcaagccatgctccctcctcctttctgaatgacacctcccgtgacctccacccccacaaagaacaatcccagctcagtttgttcaactgaaactgaagttgcctgtggccatcaccctgcctcccacctcctccctagacaccccacacaaaacacccagtagcatcccctcccttccatggccctgcccctgacgccctgacggcttggttgtgtctctcgacccaggacctgcaccacgggcgcatccagatgaaaactctcaccaacaagtggtacgaggaggtacgccagggcccctccggctccgaggacgacgagcaggagctgctctgacgccaggtgccaaggcttcaggcaggcaggcccaggatgggcgtttgctgcgcacagacactcagcaggggcctcgcagagatgcgtgcatccagcagccccttcaagacataagagggcggggcgaggtactggctgcagagtcgccttagtccagaacctgacaggcctctggagccaggcgacttcttgggaaactgtcatctcccgactcctccctgagccagcctccgctcagtgtggctcctcagcccacagaggggagggagcatggggccaggtgccagtcatctgtgaagctagggcgcctacccccccacccggaggacccctgcggccccctgcctagaggagcaccatctacagttgtgccattccccagccactgccttcatgctgcccccgccggactggcagagccaggggtcagccacctgcctttgagtcatcaagatgcctctgcagccacaattctgacctaagtggcagggcccagaaatcctgaaaacctcccgctgccttttgtgatacttcctgtgctccctcagagagaaacggagtgaccttttgtcctttacctgattggcacttcgcagtctatctccctgggtagcagacggctgctgcccttctctgggcatgttctgaatgtttacactggtaccttctggtatcttctttagagccccctgcaagctgcaactctaggcttttatcttgcggggtcagagcgccctctagagggaaaagctagaggcacagggtttctgccggcccacaactgctgtcttgatttgcattttacagcaaagtgctgagagcctctagtcgcctcctgccatctgatctccctccccaccattcccgtactcagttgttcttttgtctaatcggaggccactgtgctgaggccctgcagtgtctgctcactgctgccatcttcgctgctagtcagggttccatcctctttcccctctcccagttccctaccaygttggatcccattcgtcacccatgctagggtccccaaagcactggggcaggggccagagcagcagcacccagtgctccctcctctactctgacctggggccccagcatcctggagcacacgctccacgcacacacaccccagccctgtcccaggggcctggccccctcagccatctcagggtgaggagctgccagtcatgtccagatggaatgactcccatcctctcctcatctcccctttgacgagcctcaaactgctcagctcatcaaagagccattgccaacttccgtatgtggttctgggtcccagggagccttggaacctggcaccctggggtggtttaattcatcattaagaagcattcctgcttctcaagggacacagtggcctgcatgggccagcatggaccctgggctgatcatgtgcattcctgcttctctggggacacagtgggcccacatgggccagcatggaccctgggctagagcaagcacatctccatctcttccacctcaggcagtgtggctccagatgtcaggagggactgacctcaggaccttccaggttcctctgtgccaggaatgagaggccaggcccgatcctaccacctcgccttgaccctgaagtcagagcaggccagccaagcaggaagcacactgtttactttttgcatgaaaagtaaatgtgtacttgatagagctaaaatatgatcttttttaattyctcaaccccataatttgagccattgccttgcttaattttggtttccaccatttccttttagtggagaagagaggaagtcagagggtagggacctttgcctgcccctgggcgagtgcgggcagggatctgagaccagattgttctcgcrcccctgccagaactcactctcccctgaagtttagggtcccatctcccagatgtaagttgttttgcaaactcagtttgccaggatttctttctttcctaatcttaaattcacagataaagcaatgaaaagagtcagatcccatttccgtctgccccctcgtcaccaggtgtgatagccccagccaggtcacacctggcctcacactttgagctgagacttgaaaacgatgctgtggcggaagagcatgtggggcttggtggaggggccccaggatttgttgggggcaaagggggtggcgggaccgttcccaggaggtaccagcacctgcctcgatctcctctgagcctcttctgccccctgtcggccaggtgaggtcagcagcctgggagagtgcccccaagagatgagggcaccccgtgttccttggcaatcttggctcaccttggtaacaaaaggccatagaagtctgtttttctgggtcagttttttttgcctgagaataacaaattgctgctgtctacctttagcacacccaataattctatttggggcagtgaatgcatagaagatataaaaatacgcagcttaactatatcttcctgcgtgtgtatttattttcttctgggtctaggccatggtacaggagaactgtggcgtgtaggaggaatacttcaggatgagtgaaggctggagccagggagcgctggaggaaaccagccctttagccagcagcccctccaccacaggcactgctgtgtggaacgagttcttggaatgaatcccatgctttctgcagcctgtagttgttatgacccctcggaacaaccaccccgtggcttgtgtggggtctcgcagggaaaagggctggcttctaggtccccgagataagtgtgcagggggatgggccagggccaggctaagggtggctcagttccatcatctggaggtcagacacactgtccagaggcagaactgaagccctctcggcccctaccctaagccagccacccctcttcacagtgggtgagctgggctgggctggctggcatraggccaaggggtaggcctgagcgccagagtcgcccaggttagcccacaggattcctttgtgtgccatggaatgctgaaagatgggtgactggggacccttcttaaaacctttggcaaaggtgccatcggcagggcttggcctcatgaagtctcaggtccgtgttcccgcagggcgcacatgcttggagagtcctcagcagggtagccgaggccaggccacttctgctgaggatggggcaggctggggtgtgggtgtggcctggggtggctcagggctggaactgctgcctgattcctgtgtggggagaagctcagtggccgtttgctgccactgacaaggatttcacatgcagaagagaaaaggcccccctccaccccccgcattccctgccgagtgagagccagtgtttgctgcccttgctgggggcgggtaggaaaccctgagcttcctgatgcggagtcatgaagcagagtcctcgggaaggcatctccacagccccgggtcctctgtctaacgccctccatttcacgccctccatctcacagtcaagataaaggcctcgagaataaagagccagcccccttccatttagtctcctgccgtttcccaaacagttgtccaacagttagacattgaggggcttcactgttaccaggcatgtaacagaaggaggaagactaacacacaccccctgccccatcccatccccctctcccgagctattttcttgctgtggcctctggtgcccttgagttggtctccccggctgctctgcgggggcttcactggcttcggagtgagcgcgaagtgctggtgagcagtgggcctgtgattggatgggaagatgtgcatccgtggtcaaaagtcagctgccagccctgcggaaccagagcctcaggctgggatggggaggcctccctgcttccacctgcatggtgggcatggcctggcttacaccaaaggctttgacggtttctccaagtaaggatctgcaaatcttgaatcgtcctcaaaatgacgaagcttgaattgtcctcaagatggatgtgaatcttacattccttttcatcatttcctttgtaaaaatgacgagtgctgggtttttgttttaagaagcattatgaaggccagacttactcatttttctcccccaagtgagctgcaagaggcccctgttaggcccctgtttcctgagcagtgatgtgctgctcttcttggtggggctttgggctgggaggggaaggcgggtcagagatgggggacctgtggctgccatgcaggagcccctgcgtcatctcgttggactctttaagggagtcaggaatagatgtatgaacagtcgtgtcactggatgcctatttagaaataaagtgtatgctgctgaattggagccagtgtctgtgttcatgttcaggtggctttgcagatgcacaggtcacacctcctagactgggctctgtggcacacagctacccagcccctgggccggtggcagccatgtcaccaggaagtacagtgcttaggagcagggctgggtcaggctggcctgcgtctggttcctacctttggccctcagtgaggagcatgtgaagctcagcccccagccaggctcagcttctcctcacgatgctgggagcccttcctccctgggttcgctggctgttcgcccaggctgcagggccgcctgacctcctgctcggggcttacagatcagtcccccacaggcctttgcctgatggtgaaatggggaaattctgtcactgaacctgccctgccgcaggagcgggggcatccatagcctctgatcagaagtggtggcatgtggggcaagaagggtcgtgagttcatctatacccccacgtacttccaaaggcatccaagctgctgaaggtaacaggcacgaaccaaaaatgcatgtgatgtaaaatgaaaccagtcaggagaagctgtcctggccccagccagggggcaagagctgagtttcctggttccttcccacactgtgcttcagcccaccccaggggagactcccgaggccacagtgggctccccgtggcccgcttttggtggaaacccagattcagagaaatatttctccaccataataaaaactgcaagtgtgatgacaagtggtagctgacacttggcctcagtgtcagggaggcaccacgagagtgataaggactctggctaacagcagaattttccaggccagccctgcctgcgagggcggctgggaagtggagctgcgctgtgctgagcagagtgtcagctgggacggaacggagtgctggcagcaaaggtggggggtggtcctgagtgggcacctcgttcccacggaacagggtatgtttcatttgtatttcaaccttctcaactcctaaaaaaagctctcagggtagaggggagcaatcgaggcaagaaatattttccttagaggctagaaagctggcggggggttggagggtcacrcacaaagttgagggtcctgtaacccccgcttattattccacagggcactaggggaatgaagctggcctggagcggggccccactgcctcttggaggcaacccccccaccccaagcaagggacaacacagccctctggctctagccagagaagatgtgagacatgaagggcagtgggggtcaggggccaggggccagtacagtcatctcaaggccctgggtgacagtaagtgccccgtaaatgagggtcctctttgtgaatatttatggacctgcaggagagcaggcaggcatcagccacactccccctgcctggggaggccgcctggcagacctggggggtcttagcatcagttgggaccagtctggtgctggggacagaaggaacctctgcgcatacaggcagctgccagctaataccctgatgtaaatggggaagaaaataagtctttgcttacagaaaaaaaagggcacaaaaatgtagttggttcattttgtggcgaagatgagccatacgctcctatctgctggtgggagggcagctggctcacactctccagaggacactgtggtgacagctctccaaagcctgaaaacggcccagcagttccactcatggggcaaaaggaaagtgcatgaaaaccgcactccaagaatggtcatcccggcaatatctgaatgaggataaatggaaaacaacttccttgtccatgaatgagggactggtgagataaatgatgatagaatatttaccaacagctcaagattctaaggatgtggaaaaatgtttagaatgttatcagaccagcattttaccacctttagggagagagaaacatttcaccctctccttaaatgctgtttgagattttaaaatgactaaaaacgaaagtagaaattttagtacatccttttatacaaatacacatactggcactccagcgcgcacccattcatccctaatatggaagacctggtggttcctttcaaccaccacttcttccccgagccctgttgtctttgctaagagaacccatgtggttcgtgtaatgggtgactgtatgcttcaaggggaaacagagccagttctcggttcaggttgttcctggtcattccctctacttgtctgagattggctgaggaatgggtctgtgaccttatttggcaggagaatgaagcgattaaaaaaaacaaaacaaaacaaaacaaaacaaaaaaaaacgaagtctcgctctgtcgcccaggctggagtgcagtggcaccatctcagctcacggccactgcaatcttcgcctcgtgggttcaagcgattctcctgtctcagcctcctgagtagctgggattacaggtgcccgtcaccatgcccagctaatttttgtatttttagtagtgatggggttttgccctgttggccaggctggtctcgaactcctgaccccaggtgatccgcccacctcggcctcccaaagtgctgggattacaggtgtgagccaccgcgcctggcctgaagcaatcttttgaggaatttctaaaactttccttactctcaaaaagacactcaaggaagggacatgttctcttcccattgtctgacctttgcctcccattacttgaggatgtaatgcctccacctgctgcagccatttggagaccaggagggaacaccttgccaccatgctgaggatggcagagcagaaagacagaaggcttgtatgttgtcaaggacactgctggagcagttaattaaccagtcctggaactgacctccctctggatctcatgacrtggggcaatacatgttctgtatctgccatttctggttgggtattttgttacaacagaaataatgctgttataacttcatgaactgagaaaagcagatttcagaaccatatcaatagatgtggctctataaattaaattagcagtatgtgtatacaggaaaaaaatcttaaaggatagacatagagttttaacttaactttggttctctccaagtggaaggattataggtaaatttttttttttttttgagatggagttttgctcttgttgcccaggctagagtgcagtggcacgatcttcgctcactgcaacctccatctcccaggttcaagagattctcctgcctcagcctcccaagtagctgggactacaggcccctgccaccacgcctggctaattttgtattttcagtagagacggggtttcaccatgttgttcaggctggtcttaaactcctgacctcaagtgatccacctacctcagcctcctaaagtgctgggattataagcatgagccaccgcatctggccgattataggtaacttttaaaatcttgctgtttgcatatactttctatttctctcataaagaatatttattaagtcaataataaggaacacacatgttctttgaccagaactagaggagcagtgcattagatggagtgacttgaaggcccctagggaaacaggtgagggtccaaactgatgcagtcaccacggagaggcctgtggcccttccacccacgattcctcttctagccctggggcaaagattggcaaattactgcctgtggcccaaatccagcccgcctcctgtgtctgtactacctaagagctaaaaatggttttaacattttttaaaggttggggaaaaaaacagaagagtaaggccaggtgtggtggctcacacctgtaatcccaacactttggaaggccaaggtgggaagactgcttgagcccaggagtttgagaccagcctgggcaacatagggagaccctgtctctctatatataattaaaaaaaactagccagcatgttggtgtacacctgtggtcccagttactcagaaggctgaacccaggaggtcaaggctaaagtgagctgtgatcgtgccactgcactgtagcctgggtgatagaatgagaccctgtctcaagaaaaaaaaatcacagattcacaagaagttgcaaaaaagatagtacagaaaggtcccatgtacccttccccccgttaccctcagtggtaacatcttgcacaactacagaatagtttcacaaccaagaaactggcattgccacagtccacagatcttgttccaacttcattagttttacaggcactcgtgtgtgtgtgtgtttagttctacgcaattttatatcgtgtagattcgcataaccaccatcacagggaagttgccttttatagaagtattccagctgccaaacaaagaagaaatcattgaattggaatatctctattttgtaacttccagtgaaataatggatctaagtgggaagtaacagccttaatagctgctaattccccaaagggagagaactcgacataatatgcctcctgatgagagaataygcatcaagtattcttaccacagagatcagacccaaatccaagcaaaccccaacagccagctaccatgcaatacatgcacacattcaacaccctttcacgatcaaaacactcaaccacctaggaatagagggaaactactgcaacacaatacaggccatctaggataacagctgacagcatactcaatggtgaatgactggaagcttatcctctaagatcaggaacaaggcaaggatacctacattcaccacttcaattcgacgtagtactggaagttctagccagagcaattaagcaagaaaaccaaagaaaagataccctggttggtaagaaagaagctaaaattatctcatggatgacatgatcttatatgtagataaccctgaagattccacaagaaaaaaactgttcaaactaataaataaattcagcaaagttgcaggatacaaagtcaacacacaaaagtcagctgcatttccataaacagtggacaatcagaaaaggaaattaagaaaaaaatcccatttataatagcatcaaaaagaattaaataggaataaatttaaccaagcagcaagaaagacttgtacactgaacactataaaacatgctgaaagaaattttaaaagacacaaatagggccaggcatggtgtctcacgcctgtaatcccagcactttgggaggccaagacctcccaaatcacttgaggccagaattcaagaccagcctgggcaacacagtgaaaccctgtttcaacaaaaaaaaattaagaattagccatgcgtggcacatgcctgtggtgccagttacttgggaggttgaggtgggaggatctcttgaaccaagagttcaaggctgcaatgagccatgactgcaccactgcactccagcctgggtgacagagcgagaccctgtctcaaaaaaacaacaacaaaatgatctatactgcccaaagtggatctacagattcaatgcaatccctataaatggcattttttacagaaatagagaaataaaaccatcctaaaattcatatgggatctcaagggaccctgaatagccaaaacaatctttaaaaagaacaaaggtggaggcgttacacttcatgatttcaaagtatattacagagctacagtaatcaaactagtgtggtactggcatgaaaacaggtatacactcatagaccaatggaatggaatagagagcccaaaaataaaccctcacatatatggtcaaatgatgttcgacaggagtaccaaaactcctgtctcttcacaggaaaggactgtctcttcaccagatagtgttgggaaaactggacattcataaggaaaggaatgaagttagacccctaccttattctgtatacaaaaattacctcaaaatagataaaagacctaaatgtatgacccaaaactataaagacaacttaaggggaaacttcatgacattggatttggcaatgatttcttagatattataccaaaagcataggcagtaaaagcgaaaatagacaaatgggattacatcaaacttttttttttt

SEQ ID NO: 95715 - DNA, 76265 bp, Homo sapiens
tgtctaattctgatacagggagtgggtaaaaattggagactatgatctaatctactgcagcacagttccaggggtggctaattaattgtgtgacttagcaaagattctcctcaggctccaaggtggctgccacagctctgacccaatctctggccactcacacgctacgctgaggtgtggtgatagcgtgaccaaccttcctggtttacccaggaccgagaggtttcccaggatgcagggctctcagtgctaaaactgggaaagtctgggcaaaccaggatgcgttggtcacttgacgtgtgtagcagattgtttctgaacgtttgggggtaactggggcaacatgtgagtgtgtatgtgagagtagtgcatgtgtgtgtgtgcgtgtgtatgtatatgagtgtatgtgtggtgttattccacagcccaagacagcaaacaactaaacactcagtatgacacatcaccaatagaaatggtcatttattggctcctaattccacagaggatgtcacactgggacaggcccccaatctgtgctcatgtcggcctggtctttgccccctctttcaggctgccccctaaaactctgttgtccttccttaattctacagagcaattttgttcaacatcccaactccaaacctattttacataccccaaatgtttaaaccactggcccttggcacaactagactgcagggctaaaaatctgggggcaggtgtgtgctgttggtctatgcagcgttttaaaataattggagccattatttctggcttctcttgagtctaaagatctggccacactaggcatgtatttctacgtggctttagttggctggtactgccagaagctgcttccttttggatggggcagccctctctagttttccattgttcccatccctccctgttgccttcctgatatgactggctcacttcattcatttgcaatacttgctcgaagacttgagtttaccactctctctttagcagcacaaaaacaccagaaacgttgcggtttgggtctctccttcccctccacctctcaacctcgtttagcttctgtaagtggaagaatttattcttgcattgttccagttttagacggcagctgtgcttcctttcgtagctgcagcagccatgaaaacacacctctgggacctcccttggtggagcctgattgacagatatgccatgcttcccagggtttgctcctagccaatcactgggggaagcagacttgttcttgggagacatagggctcctcaggaggctcaaggacaacctgttagccttgaactaacttacttactttctttttctttctttcttttttctttttgacagagtcgctctgtcacccaggctggagtgcagtggtgcggtctcggctcactctaatctctgcctcctaggttcaagcaattctcctgcctcagcctcccaagtagctgggattataggtgccagccaccactcctggctaattttttgtatttttaatagagacggggttttcaccttgttgcccaggctggtcttgaacttctgacctcaactgatccacccacctcagcctcccaaagtgctgggattacagacatgagccactgtgcccggccagacttgacctttctaagaatgcactgcagcccacggtcccttctttcctctgtcccttccttccatttgtcctcctttctgtccctttctcccagccctctctggctccctcttcattttactccctggcactccctcaataagcctttagtatatctcatctcatcttggctctcctggagaacctgctcctaaccgatttggaaaaatcaaaaggtagagaaagagagggcttccaggcaggtaaacagcatgagcaaaggtgtggaggtgggaaggcccagggtgtgtttgcagcaccagggagtaagttagcttgtcctaagaagccatcaaattcccatgctctagcttatcaaaggaagtactacgtgaccttgggtgaagtgactctttctggaccttgatttcaccatctgtgaattcggaataattttactacccattttataggttctttgtggggaataaataaattattatgaaaaagtgtttcagatggcttcagttactaactaaagttagaactattgttacaaaaaaatatttaaaactgcccctctctgttgagactggtttttagccttgaagaaggcaatacacataatattttcctttccggacacagtttatttgtagcctttaggatgcagacatgaatcagacctgatccttggaagagagaaagcaggggtgtagggtagaagggctccctttcccaggcaaaattccctgtgttctaattgggttgggtcttgacattactctcacaaccccacagtggccacagaagagagcagaggcttggtgagatgggagagttgcctagatgtcttgtttctactggacagtgaacatctgaacacactgaggctcctacagggaaatgtctggatgttcgtccctgggagaataaattttcccgggggtccagtttcccttccccagaggagcttcccttccccagaggagggcttagatggcacacttggaagctctctcggtggctccctgctatcaccactaccagcaacatgcccattgcacaagtaaagtagttgaggctcacagattaagcgacttgcttaggtttatatggaaagcaaaacttgcttttcaaatccttgcgtattccagcccttttgccatgggctagaggggtcttccttgggatggtcttccctcatctttattctgaggccatatcagctctgtcctcagcagggtcctttgagtcctcccggggcaggggaattcggaatttctgctattttcaaggcctgcctgttcctccaagatgccatagccagagggttggatgtcctgtcagcctgataaacatagaaagcttacacagtaagcaaagtaaaaataataaaacaaagcaacacttttgaattctcgcatgggccagtcctgcagaggtgctccggatgcatcattgcctcatttggtcctcccttcagccatatctagaaggcgtctcagttgggaatgtctttggctgcaagtattagaaaaatctgactcatggtgtcctagcacagacgtgtggttagctcattaaatgagaaatctataggcaggtggttccagggatggtgattccgcagctctggtttggggctctgcagttttcttggccttccctcataacactacagcccccctcagctcccccactaatcacattcccacacgattgcccccaaagcagaagagaaggcaaataggaaggaaacacatttttctagaagcccgcaacagatatctggaaggtgcccacctcaggacaaatcactagcaaaggtggatttcctggaccagctcagacccatggtgggtcattctctgggaagggggcctggccaccttcctaaacatatgccgactcctgaacaaatccaggaagaaccagaggctcacattcatctccctttggtgtgtgagcagctgcctctccttccctgggaggattttgtctatgggtcgagaagggaagagagtatctggaagagatatttgtattgaggtgatattggtctgcactgaagccaggggtggggagtagaagaactaatatttattgagtacctattgtataccagaccctgtgctgggtgatttcattctcttttcatttaattcagttctcaaagcagccccatgaggaaggaactgttcttcccatttttcagatgggaaaattgagaccaagcctgatcacagataatggagaggagcggaactggtataagcgctaattgcggttaactttccctgatgctcatggtgtgacaggcactcacataggtgtgccccatggaccaggtcgtttgttcctgacctcaactccatgaggttctcttttccccattctgtcaatgaggaacctcagcttagggaggtggagcagtctgcttggggtcacaaagctgaggatcggccaagcccagctgtgaaccccactgctagcagacagccctttggagctccccaaatttggagaaaatcctctggacccgttctatggccttcttgggattgttggcttctctggcagataagctggaaaaataaacaagaggatcagaaaactccttttgcctcctgctgttctgaatctgctgaggccacaagggggtcatccagctgcctcgacagccaacattaagcaggcaaatgaatgaatcttgagtatgatagcaggacatgtgaagtactgccagaaaaaaaaactatcaaaaaaacaaagaaacaaaaatcagtaagaggagatgactgttttagaccaggtggccaaagacagcttctctgcagtgacagctgagcagagatagaggcaccggggaggtggtggaaagagcaggctgtgcgaagaatgctccgaacagagggaacagcacgtgcaaaggccctgcagtgggacctctagggaaagatggggagatcagtgtggctggagcagagtgggtgagggagagagtcgggggcatagggtcaggcaggtaaaggtgagaaggggcggatcatgctggttctcgaagggccttgtcaggaccctggctgataaggatggaagccaggagaccaggaggagcaacagcttctccagagctctgctgggactatggaatgaaacgtgcctaagctcacccggcactgaatgggtggatacaggactagaacaagacctcctgggtcttacctccaggttcagcccatggtttcataaaacttagtgtgccaagcactcaacagtttgtgattccttttagtgtcaagctctcatcacttcctcacaacagccccagaggtaagcacaactctgccctccctgtttccagataatgaggtgagctcagagaggttgagctacctgcccaacgcttcccagggtgggaatggggatggtgggggcaggggcgtggagtgaggctggattgacccccagttctcatcagcaccctggggtggtacattgcagagccgcgggcacagggggctggcaccccaagcaccaggtagcgatgacaatggccaccacatccggaggccctaacgtgcaccaggtagagggtgcatacttcacgggcactatctgtccccaaagcaggtgaggatgaggggactccctgagacacccttgtaccccctgcccagtagttactgaagatactatagggtgcgatataatccagaccagccctcccagcccagaccacagaatggaaaactccaggtccccagcacgcctggggtgggggatggggtgaggaggagccttggggggtttcctctgtctaggtggaatgtggaatgtggtgggaaagctcctcctgacccccttacactcctcctccatgttcgtcccctcccaccacattttctcctcccactgtgccccctcctccccatacctccttggctgtttccccatcgtcccgccgtcttcccacattccctcctcttcccttccccaaaagtcctctcccatcttccccatccctcttccctccccgcatataatctcttccttcctgtaaatcctctccctctcccctcccttccatcaccccccagtccaccacatccccctcagtcccccatctatctcctttccccttgatcactccccagcccaccacatcccttccgccccctccccctccccctccttctcccctcccctccctcccacattttcccccaggcctgagctgcggggagcagggtttctcccagagcgccccggtccgacccctgcggacctcggagggccccatcccccaccccccccaccccgccccaaagcgggctggggtgggcggagtgggaggggcgcggcgggtgggggcggggaactttacctgggagtgggccaggccgccagccccgycagccccgccagccccgccagccccgcgatggcttgggccgcgctcctcggcctcctggccgcactgttgctgctgytgctactgagccgccgccgcacgcggtgagtgtcctgctccgctcggccccgccagacaaagggggcggctcccgcccgggctgcagcccaagggtctcggagcccgcggccggcccggcccgagtcccgctccagtatccygggcaaggcgagaccctcggaggtgggagtcccggggccccgcacgtgggtgagggggccaggccgtgctccccctgccaagaaggtgcaaggtgggaaggtgcggggtccggtaggtcccccggggcgaatcgcccaccgcgacaagtccgagtctggcccttagcgcgacggcagggacctaggagggggtttcaggtgaggaccgagggtttgtgggtggggagccgtgcggggacagcctctgcgtggcccgggtggaagaagcgctctccactctccagcctctgcctgcacctggcacccacctacgcgctgtcaaaccctgccttgctttcggcagtcctatagggatagcctcgctcctcaacccattacacagatgggagtgttgagccagcggagtgtagagcccctgggggatgtcttgatcatgccctggaaccacccaccccgggattccccgtctggaagacgggggtcggtgggcttagtaatttcatttgccagggagaaactgaggcctatgaagtctctaccttcccctgaggtcccacagcctggacagaacggagccagggtcagatgtcacagcctcctggtcccaaaggttttccagctccattgagcatctgtgatttaggagaaaaagtaaagacagcctcaaatcaaggagatagctgtagctctccttttcataaaatattttttaagttaacttgaattgcataaggaatagctgaatacattcgacttaacacaaatatttatcctgttataggtaagaccgaagccccttaaccctcccccagcccctgaagtctagtcctctctccctctctgggcctctcctgttgctgagtctgggtagaaccttccatatttaaaaaaatatactttttatttgagactagtttgggatttacagaaagttgcaaagatagtacaaaaagttcctgtatttctctcaccccgttttccctattgttaacatcttacattgttatgggacatttgtcgccactaaaaaccaacactggtccgttactcttaactaaacttcaaacttcacgggattttatccagtttcccattactgtcctcttttgttccaggatccggccccaagttaccacattgcctttagttttcatacctcctcagtctcccagatgttttaaaaattactcttacataaaaattactcttacatacatagacatgagcttgtagctaatacagagccaygtaagagagagttagtttacattcgtgtctgaaaattccggaaaccttgggaactttttgatttttaaacaatatggtagttgarttttcaaacaataagctcactgtatttttcttcaacctccagacatcttttcagctgaaatttacaactgtgtagtcaatcatttgccttaaaacaagaaaagaaaaagacagtgaataaatgtctcagggaagaaatgaattatttttcctgtcaggctttctcaatacactgtatagaaatgttttcagacattatgttgcttgctcttttcactccagattttagttttgacatctgttctttttgctacaagcagatctttttgctacaaggagatcgaatccattcttttgatcctctctggagtcttccatcatgtgaatacgttatgggctctttttttgtttgtttgtttgtttgagatggatcttccctcttgttgcccaggctggagtgcaatggcacgatctcggctcaccgcaacctctgcctcctgggttcaagtgattctcctgcctcagcctccccagtagctgggattacaggcatgtgccaccatgcccagctaatttttgtatttttagtagagacaggatttctccatgttggccaggctggtctcgaactcctgacctcaggtgatctgcctgcctcggcctcccaaggtgctgagattacaggcgtgagtcaccgcgccctgctgagcctttgatttttatacctgtgggcaccttggaagggtcaacagtgggtagtggggagaagtgtgggaatgagggtcactggcagcttgagggtaggtgcatggaccctggggaccccagtttagatccccaatctcactttctccttccagttcagctagggacactctggttatctccattttacagaggaggaaacaggctcagaaaggctaagcaacttgctcaaggtctgtctggattaaaactctgggctgtaagaatttttagcttttacttttagtgataggatctcacactgtggcccaggctggagtgcagtgtacaattatagcttactggagccttgaactcctgggctcaggtgatcctctcatcttagcctcctgagtaggtgggactacaggtgtgtgccaccatgcccagttaattttaaaaattttgtagagatggcatcttgcyatgttgtccaggatggtctcaaactcagctcaagcratcctcccaccgcagcctcccaaagtgctggaattaccggtgtgaaccaccacgcctggctttgcaagaatttttaattcacaggaagaatgaattctcagtcttcccacacattatactggtaatctgaacactcaaaagtcttagaaccatgtgacttttagatactaagaaatgcaactacaagcaaaaaattcttaaagaaggacaatggccgggagggcggatcacgaggtcaggagatcgagaccattctggctaacacggtgaaacctcatcgctactaaaaaaaaaaaaatacaaaaaaaattagccgggcgtggtggcaggcgcctgtagtctcagctactcaggagactgaggcaggagaatggcatgaagccgggagatggaggttgcagtgagctgagatcctgccactgcactccagcctgggcgacagagcgactccatctcaaaaaaaaaaaaaaaaaagggcaaacaagtgaaacaagtgggtgaccctgatgccgtctgaatggtgatccagtttgggttaaaataagcaaggctctccagctcccttgtctcatttctttatcctgaccaagccttgaggtaatttccatcacccttatcatacagctgaggtttaaaaagatgaagtgactttcccaaggtcatacaaaaattatactccacatctaggcccctccaaaattcrtgcttatcccagtaagacaccactacttctgggagtgagcaactccgtctttacctttagaatttaatttaaaacttttaaattaggaaacatttcaactatacagaaaaagaaaaagaatacggtaagaagccccatgtacctataccttgatttgacagtcattaacattatttaaaaaatattagacataggctgggcacggtggctcacacctataattccagcactttgggaggctgaggygggccgatcaagaggtcaggagatcgagaccatcctggctaacacgatgaaaccccgtctctactaaaaatacagaaaattagccaggcgtggtggcaggcacctgtagtcccagctactcaggaggctgaggcaggagaatggcgtgaacccaggaggcggagcttgcagtgagcggagcttgcgccattgcactccagcctgggcaacagagcgagactccatctcaaaaaaaaaaaattagatgtcatgatattccacccttgaatatttcagaatgcatataaaactgacaactacaattctattttcttgcctgagaatataaaaagataattcttaatgtcatgtagttcccagttcaaattcaaatttctgcaattacagcaagaattttcgagccccattcggtgaacatgarggtggtgagctgagagttaggagtatggcttgtgggccccttgaaactaattgatttgccttgtgagtatcagaagcattcttcctgcttcccaggcctcagtttatctgtacttcgaggtggctcatggaggtggtctctcaagccccagccatatcaccaggctactgcatctcttcctttgggcttgtgtgaccaccacagggagcactgagagagatctcttggttgggaggctccttttctgggggtccggaaggcatagtggcatcaagcgagggtcactgtggcccagtggctggtctgggcccttgcaggatgcagaatttgtaggcacaaataaatctgtctcattctaacatgcactgaccagaggtcacccaacagtggtccgtgactggattcagccctggatgggctgggtttgtgctgtgtgggacatggggagaaaattgggggattccatacacaaaaatctagatttccaacttcttctgaaaaatgggaagatctagcaatactttcctgggactcagtggtagcaccctctctaaaycttgccacagtccccactactccctattgcctctccagcatgcagctattctagttaccactgtrcttcctctgctgttttttcctgtgttgagaaataattctgtgaatttgtgtctatttcaaaaaccagaaaacaaaaactagggcaaggccacgtgctttttatgcacagtggtagcagtgcggggcaggtatggaagagcatctgggaaaccctgttaatggcagactgaaaaccctggaggcctgtgggtgagccctgggggaagaatgggttaagcaggttaaacagaattttgggttgctccagctcacctgtgcaactaagcccccttttgttccccattaaatcctcccagagcttaaggccctgcattgagttgaaatgattgaacagagaggttgggcagtctacccaacattgcacagctgaaccatgccagcctctgctctggacaatctagaagatggactctgtgtcaagtgcttaacctgcattggctttcttaaccctctcagcaactctgggaggcaggtgctgcccattgagcaccgactgcatacatgattcattcagaccagccactgttctgagtgctggagtgaacaacacgccctcccttcatggctcttccatctagtgaagatgcgatacgtcagggggcatggaggcgggtgacatcccatccttgactcctttccctggttcacaaagggtcaagtgggagagagatccagggcaggcgacaggggtcagtgagtgaggaataggccgtttttagaggaacccatgtgatggggctccagtcggaaatcagaaaagatgccttgggatctgacccagggtgggcaggaaaccggctgtgtgggcaggagccggggatggaaaggtcagggcccaccgccctgcccgccagggcctggcagtacctaaaaaaaagtgagagtgtccgtgggtggggctagagcccacagtccccaaaacagagcctccttcgcccccgctggctgcaggctgagtcaccctggaatgtgaccacggcctgagttggattgagggcccaaggctggaggagccaacatcaggggtcaggcgcctgggctccgggcttcctgcctttgtctgcgcctccttgggacttttctggggaaagaggaaagctgccaggaataacacctggctcgctggggagctccggccacagccaggagaaaggcaggggaagaaagcctgctcccgcctgcaaagatgttttaggagaaaatttcagggcctgcatttgagtaggtctctggaatatctctgcaaaatggaggtgaaaatgcccacttagggtgactgggggccagggtagtgtcaagagggtgggcactgcagccagacctgtctggattagaaacccaagtcctctatgttggaccctctggcatgtgacttagccctctgcacctcagtttcctcctctgtaaaatgggcctggcagtaataattgcttcctcataaggttagggggaggattcattgagtcactgggataaagtcctcagtgtggtgtctcccacaccatcagcgttcattaaatgttagccattatttccaaacaaggaaacgtttggaaaatgccaagtatagctcctgatgtgtagttggcactaggtaaatggtgcccaggaatcttactgctcctgcttctcagctgcttcccagctactaggtgccaggtgctctgtaactcccctcatccttggcacagcccaatgcagtcagtagcattattgcttccattttacagatgaggaaatagaggcatggagaagctaagtcacacagccagcaagaagygtggctgggatttgaagccaggaagtatggtgctaaagtttgggctcatcgtgaccatgccctcctgcctcttatgcaaaaatcactgcttctgggtccagtctgccaggctctgacctgggctggaagggggctgccatgaaccagttattccaaggctacttgggcagcacgacacgtggagacttcaggagaagtggccttagcccaggggctcacaaaaagatgaggcacaaggmaaggccctgcacctccttagactcacagagctcaaatttgcaagtctcctctttgactagagaagccgggatgggctggggagaggagggaatggttgggagaggcacttcctaggccctcaaatttcatctttgsttctgctcccatccttcccagccttggccctcaaatctggccatttgctcctgyccacgagctgtcccaccctttgggttatactgggggcagccaggtagagggaaaaagggagcaggagacaggggcagagggaggtagagagggagggggaaaggaggaagagaagtggctgcttccctgaactgctgggtgtggaacaaaaggccctgtgctgaaagtgggagactcagatgttaggtctggctccccggggaccatggccattgcttccaccacattgctctcctgggggggtcacggtagttccctgacacatctccttccttcctcttgtctttctctggtatgaccctttaaaggtgtggtcacatcacttactggctcctgctgcaaaccctccagtggatccctgccacrcgtggcataggagccggactcccaccttggccttggccctcgtggtccacaaagtcatctccagcatcatcgcctacgtctcgtccccacattctccactccagccacgctggctcctgctgtctcgaaaacctcaccgagcatgctcccaccccagtacctttgcacttgctgttgcctctgcctgtaacactcttctccctgcccctcccagagcactcccttcacatccttctggtctttgctcacgtggcatctcctgaggaggccctccttgaccaccttttgtaaaccagcccccctcactgtctcacaccaccctgttttcttttttctttaatggaatataattcatatcccatttagttcacccttttgggctgggcatagtggctcatgcctgtaatcccagcactatgggaggctgagacagggagtgcttgagcccaagagttaagatcaacctaggcaacacatcaagaccctgtctctataaaaaaatagaaaaacaaagtcaggtgtgatggcatgtgcctatatatagtgccagctactcgggaggctgaggctggaggattgcgtgagtccaaacgtttgaggttatagtcaactatgatcatgccacggccctccagctccccttttaaagtgtataattcggccgggcatggtggctcacgcctgtaatcccagcactttgggaggctgaggcagatggatcacaaggtcaggagttcaagaccagcctggccaagatggtgaaacccatctctactaaaaatacaaaaaattggccgggcgtggtggcgggtgcctgtaatcccagctactcggcaggctgaggcagagaattgcttgaacccgggaggtgcaggttgcagtgagccaagatcgcgccattgcactccagccttggcgacagaccaagattccgtctcaaaaaaaaaaaaaaaagtgtataattcaatagtttctagtatatccaccgggttgtgcaatcatcaccatcatctaattccagaatattttcatcacccctaaaagaaaccatgtacccattagcagtcactccccatttccccctcctccagccctgggcaaccactaatgtactttctatctctattgatttcccaattctggacagttcatataaatgaattaatacaatatgtggccttttgtgtctggcttctttcactgggcttaatgtttttaaggttcacccacatcgtagcatgaatcagtacttcattcctttttgtggctgagtaacgtttcgtggcattgatacaccacattctgtttatccgttcgtcactcaacgaacacttgagttgttttcacttttcagctattacgaataatgctgctgtcacccgaaagcggtcctgatccagaccccaagagagggttcttggatctcaggcaagaaataatttagagtgagttcacagagtaacgtgaaagcaagtttattaagaaggtaaaggaacgaaagagtggccacaccatagacagaccagggcgtttccgaaggcaagaggaggaatgtgtctgccttagttacaattcttcttgtttatatagaagataaaaatcatgggagaggtgtgctcttctaccacaagggctggggacaaaagattgttacctaacaatcttccataagaatctatattattatctttaaagcaaaacttattcttaaactaagaaggcttttgttcataaaatatygggacagcaggatgtttcctgggtctgttaagtcctggatctgttaagtcttgggtctgttgggtaagcatgatttaacrtgttcccttgatcgtaaacatcctgcgcttaagaatgcctagcttcctggcccagcatggtggttcacrcctctaatcccagcacttggtgaagcggaggcaggtggatcacctgagatcaggagttcgagaccagcctgaccaacatgatgaaatcctgtctctactaaaaatacaaaactagccgggcatggttgttcattcctgtaatcccagctacttgggaggctgaggcaggagaatcacttgaacctgggaggcggaggttgcagtgagctgagatcgcgccattgcactccagcctgggcaataagagcaaaactccatctcaaaaaaaaaaaaaaaattgtctaacttcttcttgggattgcagcccagcaagtctcagcctcattttacccagctcctattcaacatggagtcactctggtttgaacacctctgacactgcttacgaataatagtgtatacatttgtataagatccaacgttttcaattctttagggtacattgctgggtcttgtagtaagtctatgcttgacgttttgaggaactgccagactgcattccaaagcagctgcacgattttacattcccaccagcaatgtatgagggttctcacttctccacatccttgctaacacttattttcttcccttttttggtggtgggaacagggtctcgttctcttgcttaggttgtagtccagtggcacagtcacagctcattatagcttccacctcccaggctcaagtgatcccccaaactcagcctcctgagtagctgggactacaggtgcacaccaccacacctggctaatttttgtattttttgtagagacagggtctcaccatgttgcccaggctggtcttgaactcctaggatcaagagatcctcccactttggcctcccagagtgttgggattataggcatgagacaccatgcccagccttattttccttttttaaaatttttgtttttattatggccatcctggtgggtgaagtggtacctgtaaaccaaaaagtgtctgagacaggtctcaatcaatttagatgtttctttttccaaggttaaggacatgcccagtagagaggtctgtgcctttctccaaagacgactttgagggtttcaatacttaaagsgggggaaaggtgggctgtaagagaaagagggaaggtatggtaatccccatgtcacaagagaaaaggaacgggtagggcgatagtcaatgatgtatttctctcatgcacagtaaatcagcactttacataaaataaggtgaacatagagtagctgcctatggagatactgaaacttttatctgtagctatctgcttaggaatagtaggaaaggcagcttcttgcatgactcagctttcagtttaattttttcctcatggcagagtgaattggtgtcctgagtttttattttcctttctccccggttttcttttctccctggttttcttttcttttcttcttttttttttcttttctttcttcctgcacgttttttgctctgcagcctcaaccttccagactcaagcgatcttcctgtctcagcctccctagtagctgggactacagacatgtgctaccatgctgggctaatttttttaatttttagtagagacggggtctcactctgtttcccaggctggtcttgaactcctaggctcaagtgatcctcctgtctcagcctcccaaagtgctgggattacaggcatgaaccaccatgtatgcctgccccccttttctatttaagatcttttggagaaagcattttagaagaaaatgaatctccggtctcaggttttgtctgatctctcatgtctaggatggtttatttctagacgaataggtcccacattgttaggaaagctcagttttagtaggttgtgaagtctcacatcacacaaagaaaataagagagaaagaaaacaggaaaaaaggaggaagtaagcagataaacaaaaaagaaagaacgaacctggaaaactgatagaggccatattactctcaagtccgtatatcagtaggcaggtatgaaaatgatttstgcatataaagagattgcttttattttcttccaaagtttaagttcagtttatagggctttaagaaaagcacagcttaacttttagtgatttcacatcaggaaaaatgaggggaggaaaaaaaaaagaagggaaaacattgaaaacattcttttggagacttggagccaggagaatttttagaattcagtccaaattgtggaaaataataaaaayggaaaaacattagacaagtctagactctaataacaggtgtactatagttaattttgaaacatgacttttctctctccaattccccaattttattaaagacaaaatcatagtaggaccaacttatttgtaaaataagttttagttatattatacttggcttgattattttcataaaatgcagcaagactgatcatttgccatatgagctctctcttctttttaaaattggctttgctggaagcttttccataaggaatctgagtctagacctttttaaaagcctcacacccagccaaggatttagctgtgcctgcagatacctgtatgaattgagtgaattcaaaaagtgacattctttgctttccacaggtcaggaccctgtaaacracagggtatatgaagccagtttttccaaggtgcttttattagctctatagttcagccttattttctcaaagtagtctgaaaatatgtcattccagttaaagccttggtaaaataaccagtgtctccaattatgccctgttataaaagaaaaaagatacttaggcaaataactacattgccataaattaagaatactcacaaatagtttccaagttttggaaaaaataggtaaagagaaagaaattctgttttaaatttttctcatgagagtatactttactgaattgttaaaagctataaatagcttaaaagaagagaaagttttcttgactctgtaaaacaaaacaaaaagaatcaacaaatgttttaaacaaaaactcataaaagattatttcaatctcctgttagttcagttcatgcaattaactcctgttctgctcaagatgggattagcagtcctcatgaatacatcagttctccatgacagtcctggaagtttttctccctattccaatggcacaatctctaaggttgtcagaagcccatgtttaagagtactcctcagagttctatagctgattataaatcacctataaaaagatcaaactaaaacaactgtggatgacaaaagtcttagaacagccatagttaaagacacaattgacaaggaaatttggttacgtctgtggtattcaatagttttacataataatcataattactactgatgatgtatactaagtcatatcagaatcacaggaatctcatacaattttggaacacatactcatttatataagcaactcatttatataaatataatccaaagaagattaaacaccatttcatatttgacaatgcttcctgtatgattttattttaccaaataagccgaatatgtctcttttggacttcagaggacctaatgccaaaaaattaatgaggtcaaaaggactgaattgactattttattttggaaagtttgtcaaatatagaaagtttaaaacacttgacatcacaaaatagaatcacaggttattgtaaaataagtcattcatttagccaaaggtataactcagagatttcagaaaaaaggcaaaaacctttattcttttttttttcgagacactctcactttgtcgcccaggttggagtgcagtggtgcaatcttggctcactgcaacctccacctcccaggttcaagcaattcttgtgcctcagactcccgactagctgggattataggcacctgccaccacacccagccaatttttttgtatttttagtagaaacggggtttcaccatgttggccaggctggtcttgaactcctgacctcaagtgatccacccgcttcagcttcccaaagtgctgggattacaggcatgagccaccacacctggcctaaaaacctttattctttgagagaggagacttaattttccaaataataagctctaataaatacagcatgaggccaattaaatcctgtttctcaaatcttataaacaaatctattaaattttaatcatcttgaccctaagatgtaatttccataaaccattttctaaacttttataattttttaaagggtgggataatgcttcaagaaaaccttgttaatctgacacaggagcccagatgctggtcttgcatcagtgtgcctttgatgttaatgtttaattaatagagaaactctgaactaatttaatctctcagaatcagcccttacaatctcatatgcccacctcttccatgatagtccctgggcctagagaggttgaatagttttcatttctggctccatgtctcacaaatgcagcttattttgaatgtcatctcctcctaggtctgaagatgatgctttaactgctgtcagtgtttaagatttagcaggactcagtgtcctttttagacccaggagtcaaagccctgtaactaaacagcaccaggactttaaaaacattacagaaagttacaaggatgtaataaccttcattaaaaatttttttatatcagctttcctaggcaaatcaaaacacagaacaatttagacatattaagaaatgccaggagcacagaatgttatattggatgaaaacatttcctttagacctttatgataaagcatttttagcatcaggctacaacagttaggacctgagggaaaaaatttatatgagctgacgaaaatgttgatggagagaattattctctcagtccttctcaaagaggagagaaagctgaaaatagcaagatgcaataaaagttgaacttttgagttaaaaaaattaaaatctcatgtaatgttattaacagtaaaataayaccttaagaaaattttgttctaaccaattctttagtgtattagtgcatttttaatatcaaaacccaatctctagaaagactattataaataatttccttttaattatagtcaacttgttcacataaaatgtttttcataaattctctttttataaaccttattatgacttacacaaaccatttacaacatgcttcctgttttatcctaaacatctctctttcgtaaatgatcaatcattttattttaggacaaaaaatttttacgggattctttccatatacaattatttttcttttaacctttcttgccaaagatacccctttataattttctttacatgcttcttatttacttattctttttacgttgtttaataaacaacctttgaattagacaaaactatttccttttaataagaacacttttttaagaaaaatgtttttctgtaactttttaaggaaaaattggaaatgacccagacatttaatgggtatctattatttaatttaatatcactttagattctgaattatatgacatttatttataagcatttatttcattacatttacctaattaattttttaaaatagtttacctagattacttatgaaaactgtgatagtcactatttaaagttatttccctgttaatcatttttatagctgtgaatttcagatgtttacttaagtaagaactttaaagttaaatacatgtgtgttttttgttttttgccaataactcaggatttaactgttttcattaaatgaacaatattaaatgccttatttatcaaaaagttacacaatgataattctcttttgggctggatttatagcttcataatcctcatgccaaattttgtcaccttataatatctagcagagataaatatataaccccttgactaatacatataaaacaataatgtatattgacaattctgaaaccatttctaattttattttaccaataattttaaaaccagcttatttgttaaagatttacttaagtcatgtgagcttgaaaaaccatttgggcttaaagtttctatttttctgataaagtatttgatttttttctttaagccaatttattagacctcttatgtatttttttgtagtgaaacattatatacaggacatataaatacatagacagacaggcagcagtagatctgataagattcataagacccctttttttctcctgttataaagctcctggcttttcttaatatgtctaagttgttttatgtttttatttgcctaggaaagctgatataaaacaattttaaataaaagttattacatccatgtgactttctgtatcgtttttaagtcctggtgctgttaagttatagtgtttgactcctgggtctaaaaaggacaactatcttagacttccaatttcttgataacctgtttcattaccctaggcaattgtcagccaaacttgcatactaaaggaacaactcttgggtgaaaatcagatagggaaatgtatatctctaaagagagagagagacagacagagagagagagagaaagaaagagggagagagagactgggtgtgttagagggagattaaaaatggatgccaagccacaagccaaacataaaattatagaaatcttctgtaggattttatgaggagacaaactttatttagataggtagatttaaatttagtctctgtcttttaactggacctctgagctctgggcagagtccacactgaatcctgggtctctaaaaggagagagatatcatgagactaagccatgtaatgcttttacagtgcactttgttacaaaagcatttctctaagtattttaaccactccctctcttaaacacacaagagtagttcctgtagtaatagctattttagttaataaaaaaaaaagaaatcagataacgcaatacaaaaacaatcagtttaagatctgagaggaacttgtctttttacactcttagggtttcataaggaaaaacagaggtttctccccagaaggagtctggcaccttctctgttttctttaaggaatcccaggctgttagaaattattttaggtcccttatgcagcagagggcggcaagaggaaggagagacaggcagaagtaaatggagaaaacagaattcagtcgactgggaagaaaaaatctttttctcaaaaaacaagaacctaggagagaaaaaagaaagcataaaggcatacacacacacacacacacacacacayacacacacacacamacacatacacatgcatacacacacatacacaygcatacacacacacataaacacacacacatacataaacactgctgacaaaaagagttaaactctgtaaaatatttgaggagatttattctgagccaaatatgagtgaccatggcctacaacacagcctcaggagatcctgatgacatgtgcccaacgtggtcaaggcacagctcggtttgtacattttagggagacaggagatatcaatcaaatacattgacaatatacatttgtccagtccagaaagacaggacaacttgatgtggggggtgcttccaggttataggtggattttaaaactttctgattggcaattggttgcaagagttattgtcaatagaaataaatgtctgggttataataagaggttgtgaagaccaaagttttctcatgcagatgaagcctccaggtagcaggcttcagagcgaatagatgtaaaggtttcttatcagacttaaggtctgtgttgatatgaatgctggagggtataatgagtcatgtctgacccccacttcccaccacggcctgaaccagtctttcaggttaaattttattttattttttttgagacggagtcttgctttgtcgccctggctggagtgcaatggagcaatctcagctcactgcaacctccycctcctgggttcaagcgattctcctgcctcagcctcccgagtaactgggactacaggcatgcaccacgaccatgcctggctaatttttgtattttcagtagagatgacgtttcatcatgatggccgggccggtcttcaactcctggcctcaagtgatccacctgccttggcctcccaaagtgctgggattacaggcatcagccactgtgcctggcctgcactttaccatctacaaagcaggaaaaaaaacttcaaacttgccttccttgttggaagtgagttgaaactccagaagggagttacgtgctctccatcgtcatggaagcaggaaaacttgccttccttgttggaagcaagtaatactccagaaaaggagttgtacaacaaaataaaacttagctctcaaattgtagctctcttagatctcaaattttcagagattcgggattctctgcagcagggagctcccagmcctactggtttgaccaatgaagacagataccaagctgttaccaaacaccaacaggagatttgtcaaaggccagggccacctacatggagtcccttcatggtcgccaatttgtaaactaaaaagtatctaagctaggtctcaatcaatttagatgtttattttaccaaggttaaggacaatgccagggagaagaaaaaccacagaatcacagaaacagtctgtggtctgtgcctttcttcaaagatgactctgagggtttcagtatttaaagggggaaaagtgggctggaggggaaagagggagggtgtggtcatccacatgttacaagagaaaaggagcaggtgaggcaatagtccccgagtgctccattcagattacctccccgactgctccattcaaaatcacactctgcaacctacactctttatgcccttccttgccttatcaaatggtgacaagtgccatggcttctgtaggcgacctggtgagcctcccctggacctgggcagcatcccctggttggggtatgccttggactttggaaaagatgctgccagcttcctcacgaggatgaaggagaagcacggtgacatctttactgtaagtgcctcttgtgcctcgggagggatggggatgagcagctgggcctcatatctggtttctgttgattccttcaacatatgtccctatgccaacccccccaccccaccatccaacatccatctgagtggtcgagccaactttctatccagctgcctgtccagctgcactctcaatgctgacctaacatcatcccttcagtctccctcttgctcttcccagcgtggagttatgcagtcactcaatatctatccaatacttgtatatccatgcagctgacctccatctatccattccatttccatccgttcaacatccatcttcccatcccattcttctgcctgtccacctggtgtctactaagcgtccttccatccttatatctactcagcattcattcgtcaacctccgtctatccactcacccatcagtttttccatagattcacccgacatctgtcaattcatttatccatcttctatcccttcatgtgtctgcccagatctacccagagttcttccactcatggatccaatgttcatccaactttcatctgtatacagttggccccctgtatccatgggtgggttccatatctctggattcaaccggccacgaattgaaaatatttgggggaaaatgtgttggtactaaacttttttagacttttttgttgtaattcttccctaaaaatatagtttaacaactatttatttagcatttacattgtgttaggtattataagtaatctagagatgacttaaagtatatgggaggatgcatgtaggttatttgcaaatattatgccattttaaatcaaggacttgagcatccatagattttggtatctgcaggaggtcctggaaccaatcctccatggatactgagggataactggtcagtttccaccaactttcatttttctgtttatctacgcatctttctgttcatctgccactatccacccaacactcagctatattcagtattcgatgtctccccactggatatacatctatttatatctcatccatccatccttacaacatctattcaaacgaccaccacccacccaccttccatgtatccttccaacttccatccaatcaacattcatccttcactttacccagtatctacctagcattctctcatccatgtacccaacatttattggtacatttggtttccaaccaacctctagctgcccttccatccatctttccatccaacatagattcattgatctatccttccatttatccatctatctaacattgtatccacaagtatttacccagcaatttccttccttccttccttccttcctccctcccttccttccttccttccattcatttacccattcaccaatccatccatctgcccatttactcttctacaatccacccactggaatttacccaacagcatccatccatccatccatctattcatccatgtatccattcattcttccttccatccatccatccattctttcatccatccatccatccacccatccattcatccatctacttatccatccatccttccttccatccatccatccatccattcttccatccaaccatccatccatctatccattcatccatccattcatccatccatccatgatgtgcacaggatccatctgccgccttctctcctggctactggagatatggcaataaccaagataatcatggcaggtgcttaagagtgaggtggtagagaacacagtctttgattttaaaaagcctcaatattcccaaattccagtcctagtcctgccacttctcagctatgagatcttgggcacatttcttctcctttctaagcctcactttttcagctataaatgggtgagtgatggtccctacctcacagggtggtaggtggtagtgaggcatagataagagaacatagtgtgttactgtccagtggggcagtgcctggcacacagtaaggccctgaccactgagagcggctgctgttcacagtgacactcctcactctatccctggcaacttcccacagatactggttgggggcaggtatgtcaccgttctcctggacccacactcctacgacgcggtkgtgtgggagcctcgcaccaggctcgacttccatgcctatgccatcttcctcatggagaggatttttgatgtgcagcttccacattacagccccagwgatgaaaaggccaggatgaaactgtgagtggctggagatggcacctgtgggagggccagggtgggcgactcatttctactcatgtggcccaagttattcttggttccaaagcaaatgttcggtaaagacattttgtcttgagaacacaaacagaaacaaaacaaaaaacaacccaaaagaattgggtggaagaagaactctttgtctctcatctctggcgggtttttttgtttgtttgtttgtttgtttgtttgtttggaggcagccctgattttagtaggaggagaccagggtttgggtcagccacacctaaattcaaatcccagccccatcactccctagctttgtgactttggacaaacctctttccctctctgagcctctgtttcctcctctgtaaaatgaaggagagaggtggaatgatgaatatttctgagtccatactctgccaggcagcatgcattatctcattagtcttcacaacaatgctggaggctaagtaacttacagccccatttcatagatgcagccactggatctcagagaagtgacttgtctcaggccacatagccagaagtggtacagctcctgaaacatatggaggaatcattttattttatttatttatttttgagacagagtctctctctgttgcccaggccagagtgcagtggcataatcttggctcactgtaacctccgcctcccgggttcaggcgattctcctgcctcagcctcccaggtagctgggattacaggcacgtgccaccacacctggctaatttttgtatttttagtagagacaggatttcatcatgttgtccaggcaggtctcgaactcctgacctcaggtggtctgcccgcctcagcttcccaaagtgctgggattacaggcatgagccaccatgcccagccacatatggagtcatcatatcaataagagaacagatgaacatgtttgctctgcattcattcagcagacatctgaggacccattgtaccctggtcattgccctggatgtagggtgtgcagaacggtgccaaccaccatttgaaggcagctattataggccaggtgtctgataggctcactttcatatctgtgcattagcctaaagaggtgggcatttttatccttattttacagatgaggacactgaggctcagagaggtgaagtgacttgctcaaagtctactgctagtaagtggcaggactgggatttgaacccaggtccactgacttcacagcgcattctcyttcatctaagataccaaggctgataagaccctgtgtccgcccctgcagagttcacacagtccaatggcgatcttcagtgatctgtctccaggaggaataccctctggaggttaggaagagcatctaggaaactgttttgcaagatagttaaggctgaagcaaggccagcatgatgaagtggatgttgatgagacatgatgcctcctctgaaccttggcctgggggcagctgcttggagcctgagtgtcctgggtcctgacattccagggggaccctgggggtcccattagcaataggaatccacagctcactgaatctgcccctgctacccagggaggatcccagtttccttcagtgtttgcctcaggaattttctggaatttcttacaagctggcgtgatgtcttctgggcacagcagccacatctgttgagggcttgtctctgctgaggaccagcgcttggagtggggtggggagaagagctgggtcagggtccattgaaggccagatcccatgtattgagcacttacaatgtgccaggcaccgtgcggaacccttcacatgcattgtcatacatgagtcatgagccatgtctgtcgtttttcccactatgttccaacttgaacatcccaaaccttttcatacccaggagttcatggacgccctgtgcaaaccctgccctggtggattacccaggcacttctggcttactcagtctaaaggtgtccatcctacttcccaaacagcaggcatgacagatcagggccctgattggcactctcccactgttcttgttgctgccactaggtgttgctgttgaccatgggctgtgcaccgcccatggacaccccacttcacttgctgtagggatatcctttttggtccagatcctacacaaggagcagagaggccttagacttagatgcaagatacccctttcttggcttctaatcatatcctcagtcatggctcagtgtagactccrtatcatggaggctcagtataggggagcttccagcttctgccacactcttccagacggggcctctcctcactctgtgcaggtccacacgatgggaccagatctccagcccacatccctttttccttgtgtcactctcatgtgaggtcatgtcttttttttttttcttttctttttttaagacacagagtctcactctgttgcctaggctggagtgcagtggtgtgatcatagctcactgcagcttcaaactcctggactcaagcaatcctccccacctcagcctcctgagtagctgggactacaggcacctactacacatctggctagtgattctttgtgtatttattctatttttgtaaaggcagaatctcactatgttgcccaggctggtcttgaactcttagactcaggcgatcctcccacctcagcttctcgagtagctgagactacaggtgtgagccaccacccctggctaatattttattttttgttgagatggagtctcactatgttgcccaggctggtcttgaactcatggacttaagtgattctcccaccttggcctcccagagtgctgggattacaggtgggagccaccatgcctggccagggtcacatcttattggcagtcctgagtcagggaacaccacagctattccaacagatcttcctatctttagatttcagggagagatgagttgcttttcagttccttctcttccagaacgctatgggtcccttatccaagctgtgtgccttagggagggaaagactctcctggttaagaattcagatgctggagttgggcagaccaggatttcagtcccgctttggctgtgtgaccttgggcaagtcactttcctctctgtttctgagtttctccatctgtaaaatgggtgtcataatagtaactcttattcccaggtttgtctgaagacgaaatgagattaggctcagtataacagatgggaactattgttgacgatgacagtcataataatatcctcttatttaagctactcttccgcaggacctctttgccaatggggagcttgagctctgggacccttaggtttggggagggaggtgcctgtaggtgtgtatttccctttggaagccaaattttcatgcttttgtttcctgcctcaggactcttctccacagagagctccaggcactcacagaagccatgtataccaacctccatgcagtgctgttgggcgatgctacagmagcaggcagtggctggcacgagatgggtctcctcgacttctcctacagcytcctgctcaggtgaggctgtgcagcccccaccctcctgctggggcccggcactttgacctgtgtcagccatgagcagtggccaagggaaccgtgaggactctgtgggtgggggaagcaatttgagacacccaaagcaaagactgtaggaaagacgccatgcaccagggccccggctgttcatctgacctagctcatgaactgtaaaaggagacactggctggaaatgggaccttacaggtcattcagagaggaagtcacagagcaagacttcagaggtcatcttgtcctgtggcttccagactttgggatttcacagaacagaaaacaaaatgtttgggagatcaacttgggaccttaaccttttatctggtcttgtaaatgtatgttaaaaactgcacaaccgaacgttccttccttcagcagtgccgggcactaatccaggctctggggatacagcagggaacaggacagatgaagtccccaaattcacacagctgacactccagtgggggaggccgaattgagttatgtcagagagtgataaacacgatgacagagatccacgggtggggtgacagcatctggggggctttcttaggccgactgacgaggcagggtcatgctctgggggtctggcttctgagccaagacctaactgcaaagtgcccaccacgccaacactctaggcaggggaaacagcaggtgcaaaggcccagaggtgggaggaagctcagagagacggccagtgtggctacagcataaagagccaaggagggaaggtggacaggaggtcagagaagtgggcagaagcaggcctcaggcagtcgggaggtcagggaaggctttggaaattatgctgagtaagatcgggtgacatcaggggtttgcacaggggcaggacatgatctaacttagtttgaaagccccctctggctgctggatggaggatggactgtaggggtaaggaggggtggagagggaggcaggaggacctagcaggaggctgccaggtgtcaccaaggtgagagaatggtggtggcccagggaggtggtgagaatttgggtagcttttggagatagagttcactggctctgccggaagatttgactggggcagcggtggggatgggggagcgtgggcgtgagtgagagggatagagtggtgttaaggacagctccctgattttagtgatgcccttaaccaaccagaatttaatttaatttaaatttaatttaaaaaaggacatttcaacccctccaagaaattagagcaacatagttctaggataaagggcagtcattcgttgacacatatgggcatgtgggtatatttatgatatgtgtgtgcatatgtgtagactcggcgtgtctcagctcttttaatgctcacaatcgctctaggaggctaggactttacmtattccatttgacagatgagaaaactgagacctggagagcctgagtcatttgcccagaggcctgtgttggggtcaggacagggctggtcccagagtctgcactctcagccacagctctcagcacacgaacagtccccattctttttgttttgccctggggtggtgcaaacagtgtcaagggctgtaattggtgtgggtgatgctggtctggtccaccctgcattgtatgatggggactgaggtccagagagggccagctgaaaccacccagcaagttcacagtagtgatcctcccaggtctcctggctcctgggtccctgtgcagacaaagaagtcagagagagataggctggggagaggcaggctcaggggcagctgggtctggctaggctccatggtacagcggcaggcacaggggaatcagctcagggggaatcagacgtaaatccatacctgtaacccggtaactgtgtcttcagggcctgaggcctgggctggagctcctgccccctggcttggcagctgtaggcctttccactgccatcaatcagcagcccctgaaatacaaagagaatgggccagttggatgggagggacacagaggtgaaaggggtgccggttcaggcagcccgaactgtgaggtgccacctcttacacccaccagcctggcctgtgttggccctggcctcactgagtcacacccaaagttctcctctgtcctcaccttgtagccctggcctcccctcctcccacctacctctctgctgccccttgagcaggtcaggcacgctctctctttgtggcctttgctatttctgttcccttgcctgggaatgctgttccccacaggtctgcgtggctcccaccccacttcgtttaagccttatcgcgagcgccacctgctcagagaggtctttcttgagtcccattttcgtgatggctccctcctgtgacccagcttggttcagctttatttttctttgtggctctagcgccgcctgtgggtcgtgtgtgtatttacatatgggattatcctgtcttcagccgtgctcttttgatatggagctgccggcttcgcttccacagagcaaaaccttgtggtcctctgggtttactttttctttttgttttcttttccttcattttattttattttattttaaagacaaagtttcgctctttcgcccaggctggagtgcaataatggcgcgatctctgctcgctgcaacctccgcctcccagattcaagcgattctctcgcctcagcctcctgagtagctgggactacaggtgccgccaccatgcccagctaatttttgtatttttagtagagagggggtttcaccatgttggccaagctggtctcgaactcctgacctcaggtgatataaccacctcggcatcccaaagtgctaggattacaggcgtgagccacctctcccggccggtttacttttttggtttatttttcattgcctgttttggtagaaatatatgtaccgggaaatggttctctgagttagcaaaaaacaacagtgcaagtgtgatgataaatgatgaccagtgtcaactgcagtgtcaccgagaccacagggccttgggagtaccgcagtggcctggcaagcacgtgtctgtctaaaaggggcggctgcaactctgctcctgctaggtttccaggtgggaccgcaggtcagccagattcctttttcaagatgagatgagcaggaaatccggattttgtgtgagtttccccaaatgtttgaaggaagctttagtttgtttttaggaactcccttgataaaacacatttgtggactgaatccagtgtgtgggctgcacctttacaacttctgccaccactgtgcaggtgagggacagagcagggaccacgcaggcctctctcggcccccacctaccctcattcctgcttccattctctcttcatctgggaaaacccctctcctgagagatcctggtctctggtctttgtctgcacagggatccaggagctcaaggggagggtgagagggtgaggccccggggctttggttgcgtctctttgttgtgactctctgctgaggcagagatgacaaaatgaaagcctgcagtttccctcccaggactgaggtcagcccgctgggctggggctggactcctggggcatttaaagggggctggaggtgaaggcgcgtcctctgagcgtggtcctgtgtgtgtgcgtgtgcgtgtgcgtaagtgtgcctcagtgagagcacatgagagctcatgctagctcccatgtcttaccctttttcacacttgaccaggccctgacctccttctcgggcctcccagagcccctcagatcaagcacaaccttctcactgctgcaaatgcctgccttgcgtggccagccctgacagcccaggccctcccatcctctgcctcacaccccggctccagtgcctgcaccagccacagctggcacctctcccaccaggcacggttgcactctcagctctgggcctttgcacaggctgtgcctgttgcctgaacacgttcctcttctgcttcccccgatcatcctgcagatctcagctcagaccctcccttctctaggaagtcttccctgaatccctccctgggagcaggcatctcctccccttctctgtgcccccatctcagcaccgtcccctcgagctctctgctgcagcctcatcagcctccttgctgctccccagcaccgggctccctcctgccccaggacatcacacctggtgcttgctctgcttcctacccctccctctgctctgcccatggctgactccttctcagccttcagctgtcagcttgacaccagcccctccctcacctggcacctgacaccacagcccccgccctcccatcctgctacccagctttgtgtctgacagtgccgcggggcaccagctggcgcattattcattttactcatcctctcgtctgttgtctgtctccctgtgctgagaggtcagctccttgaggacagggatttttgtttttttcactgccgactgttcagtgcccagaatggtctttggcgcacagtaggattagtagttgctcactgggtgtatgaatgaagctcttgtgagtagckgtggccacacatgagtgtcccaggaggacccctgacmctctgtctgccgcccccagagccggctayctgactctttacggaattgaggcgctgccacgcacccatgaaagccaggcccaggaccgygtccactcagctgatgtcttccacacctttcgccagctcgaccggctgctccccaaactggcccgtggctccctgtcagtgggtaagcaccatgggggccccagtgggtgggggggaggatggaaagacccagagggggagcccaattcaaggtagaggaccagaggcaacacaggcagaaagacatccaatgcccagggaggcagtaagatccccatcactgggggtatgcaagagcgcaatggtggggagccagggcttggaccagagcttgggttcctggtggaaattctgattcagcacatttagagtggggctggagaatctctgtgtgtgtgtgtgttcctttttgtgttttaaggtttgagttgctttaaaagtttttacaagtagttcgtgctgattataaaaaattcaagccrtatagaataatttacagggaagaataaaagagcgctccactttctccccagcctcagcccaccacttccctctacagaggcaaccaccatcactagcttggagtacatcctgggagcactttctctaaacagacacacagatgtgtgttatttttatttttattttatttttgaagcttttaacttcttgttttttactgaggtataatttatatacaggaaagcacacacatctaaacgcactgagaggccaggtgcagtggctcacacctgtaatcccagcactttgggaggctgaggtgggcggatcacttgaagtcaggcgtttgagatcagcctggtcaacatggtgaaaccccatctctactaaaaatacaaaaattagccaggcatggtggcgggtgcctgcattcctggctactcgggaagctgaggcagaatagcttgaacctgggagttggaggttgcagtgagctgtgatcacgccactgcactccagcctgagtgacagagccagactctgtcttaaataaataaataaataaataaataaataaataaataaatgcactgagaagtggatctaaacattttatgctctttcccagccagtattcacccctgcgaggtagccactggactggtttcttttacctccaattagttttgcctattcttcagcttcctagaaatggaatcacacagtatgtgcccttttatgcctggcttctttcactcaacttgatgttgggagattcatccaggttgttgtatggatcaatagtccagtttttatttattttttgttttttgtcttaaaaacaatttttttgagacggagtcttgctatgttacctatactggtcttgaactcctgggctcaagcgatcctcctgccttggcctcccaaagtgctgagattatgggagtgagccagcatgccttttttttttttttttttttttttttttttctgaaccagggtctcactctgtcacccaggctggagtgcagtggtgcgatctcggctcactgcagcctcaatctcctgggatcaagtgatccttccccctcagcttcttgagtagctgggactacaggcatatgccactaggcttggctaatttttaaatttttttgtagagatgaggtttcactatgtttcccagactggtctccaactcctgggctcaagcaatcctcccacgttggtctcccaaagtgttgggattacagacgtgagccactgtgcctggccaacagcttgttctttttattgccgtatagtatttcattaaagaaatatgccacaatttgtttatccattcctggttgatagacatttgagtagtcccccatttggagctgttaggaagaggttgttgtgaacattcttgtacgtatctttcagtgcacacgtgcatttcttttarctgttggcctgttttttgttttgtttttgtttttgtttttttgagacagagtcttgccctgttgcccaggctggaatgcagcggcacaatctcggctcgctgcaacctctgcttcccggggtcaagcaattctcctgcctcagcctcctgagtagctgggattacaggcacgcaccaccacgcctggttattttttgtatttttagtagagacagtgtttcgccatgttggccaggctggtcttaaactcctgayctcaggagatctgcctgcctcggcctcccaaagtgttgggattacaggcatgagccaccacgccctgcctagcctgtacttctataacttagatatatcacactagaagaattgttgtaccgcttacagctttcactcaactccctgtctacagcatttccacatcgatttgtaaaaatctacctcatctgtttttgtggctgcagagcgtacttagtgttggtagagtgtcctggctgattccgtgtgcaggggccgtaggaaccactgggcggcgccattccctgggccatgtgcccccaacttccctgatgagcagaatcctctcaggcccytcttcataacgtaggtccctcagccccatccaggtccataggaatccaggtctccaggggagagcttggaaaactgcatgtctgacaagtgtcctgagaaggctgggaagtgctgtgtgtgctgggctcagagacttgcagcagaggcctggatttgaattcctgcgctgctgcttccttgctggtgactcggagcaagttacttctacttgccccagttcctttctctggagggaccgtggaggggagtggctaagacagagtctgggctctgacggcttgaagagctttaccagctccccctcccagcatctgtgtgttttctctgtgcctcagcgatctcatctgcaaaatggggggaacagcaggatcttcctagagggcagctgttagaattggctgaggtaacaagaaaaagcactgtggccgggcgcggaggctcatgcctgtaatcccagcactttgggaggccgtgacgggtggatcacctaaggtgaggagttcaagaccagcctggacaacatggcggaaccctgtctctactaaaaatacaaaaaaattagctgggcgtggtggtgggcgcctgtaatctcagctacccgggaagctgaggtaggagaattgctagaaccctgcgggtggaggttgcactgagccgagattgtgccactgcactccagcctgggcgacagagtgagactccgtctcaaaaaaaaaaaaaaaaaaaagaaagaaagaaagaaagaaagaaaagaaaaaaagaaaaagcactgtttgctgagcacttactatgtgccagatacgaggttaagcattgtcatagtcagtgctcaaacacttcatcacccatttccttttgcttatatatttttaaaaagccaaactttaatgcattattgattttgtttacattatgagagaatcataatcttgtggttaacaattcagagttacaggttgtataaaatataataccccttcttccaagcccagcttcctgtgaagccaatgttagcatggtggtattatcccttcatggtattttgtatgttctcacaactagagacaaatatgcacatctacagtgtctctgtgtttacaaagaaaaattgtatctgttatttacaacctgtttttaacctaacaatatagctgtacattcttctctgttgatataaacatcttttagagatattagctgatgcaattaaacaagagaaaccaattatagacatcagaatgggtaaagaagtaaaactattcctatttgcagatgatctgatattgtacctggagaaccccagaaaatcaataataaaacaaactccagcaataaatgaatccagcaaagtagaaggatatgaaattaacattaaaaatacaagacatctggccgagcacggtggctcatgcctgtaatcttagcactttgggaggctgagacaggtagatcacttgaggtcaggagtttgcgaccagcctggccaacatggcgaaaccccatctctaccaaaaatacaaaaaattagccgggcatggcggcaagcgcctgtaatcccacctacttgggaggctgaggtgggaggatcacttgagcctggtgagacagaggttacagtgagccaagatcacgccactgcactccagcctgggtgacagagyaagactccatctcaaaacaaaaacaaaaacaaaaaaccaatacatttttttagccctcacatggctgtttcagtagttagccatttccctctgacagatgtcaatattctatctttctttctttttgcttttataccatttcattgtacttgtatctgttctaccatctggttatttcatttctctctgcccacttcttagaagtggttttgccaggtcaaaggccctatacattaaaatttttatctgcttctgccacatcatttccaaaaccacagagcaattcatccgcctacctaaagggaagaaatctgctccaccagatgccatcaatctttccatttatttgctaatctgatgggcagaggtgggtaacttattgctttaatttgcatgttaccacaaccttgccaacatgcagttatcagcctttaaataattgccaatctgatggaaaaaaggacatctggctctatgtggcatatcactgactactgtgatgaaacatctctgggtgtgtgtggtttttttgttgttttgaaacagagtcttgctctgtcacccagactggagtgcagtagcgagacctcggctcactgcaatcttgacctcccaggctcaagcgatcctcccaactcagcctcccaagtagctgggactacaggcacgtgccactgagcctggttaatttttgtatttttttgtgtttcagtagccatttgcatttcctgtttatgagccggctgtttgtgtcctttattatctttttagaggaactcatttgagcttatcaaatcttgccatccatgctggaaggttgttattcacatacccatgttgcagataaggaaactgaggctcagagaggtgagatcacttgtcatagacatgcagctggtaggtggaaacttggtctgtctgtctgcaaaatcctgtgcataaagcacctgccacatcctagcactgattgcttccccaggaaaaattgggtttctccattaccatttcctccacacagatgctccagaggagtctgattagacgcagaggaactccccccatcactctgggagcagccctgggctggctataggaaggatgcatttctcaatatgagcagcaggtggcaatgtgggacggtgatttctcatcttaattgggaccagaggcatgtgggcaaagcagcccccgaacattgctgtggggtgcttgaagcattgcagcctcttttggcagaacctgctgaaacataaaataaaatgcacattcctttgatcctgtacttccacttctaggaatttatcctacataaatgcttgcacatgtctacagatacacaaacatattcattgtcacattgcttataattgcaaatgctagaaacaatttaaagtccatcagtaagggctgattaaataaattatgcattcatctaaaggccatctatgcatctaaaacagagtgggacatactggtagtgaatgaaatctactgttacaaaaaagagcaagctgcaggcagagggtatactatatcactatatatacatacattttatatatatatatatatgtttttgcttttgagacagagtcttgctctgttgcccaggttggagtgcagtggcacgatcttagctcactgcaacctctgcctcccaggttcaagcaattctcctgcctcagccccccgagtagctgggattacaggcacgtaccaccacccccggataatgtgtttgtacttttttagtagagctggggtttcatcacattggccaggctggttttgaactcctgacctcaagtgatctgcctgcttcagcctcccaaagtgctaggattaccggtgtgagccaccacacccggccatttttaaaaatgtgggagtatgtatagatttttgcctttgggaaggccgagaaggggtggagagaaaatcattttttacaagatgtggacttgaactcttagattctttatttttcttcttttttttctgtatgcatacattattcttccttcactttttaaagtataaatatattttaaaagaaagttaatcctttgagaacccttaggccattgagtctggtgtttctcatacagtagggagttgggggcaggggacagttaaacagaccccctagctaagcatagtgcttctgtctggaacatttattttactggattattttggggggctgtttatttgaacattgttttggggaaaaaggcattcttatatcaaagaatcacagagtctgatgcaaaactctgatgcatttcaaaggtaaaacacaagactttaaagacatgtgtcttctgggggcctctctgtactatgcccccaaatctagagggcctagagggctttcccagaaaaaacttgagaggtattcaagtctgggtcctcattttttggatgaggagactgaggtccagagatgggcaggggctcagccgaggctacatagcatggggactctgggatttaaaccagatacaccaatctggtttaaattggtgggctgccaatcaccgtgggcctggcagccctcattcatggcatccggttatcacaccaataagaaatacctcgtaataatggagagaatgtagcaagtagcattttacaaacttctaccgataccaagtgtgttctgtgtgtgatctttctgaatcctcctgaccatcctatgagctagatggccctcattttacacatgggggaaactgaggctcagagatgcaaagtgacttggccaaggtcatctcgttagaaagggaagagctgggatttcaatgctctctgtcttcaaactttgtgctctgtatttcgcaatttattattgtttcttaattaaagaagcaattcatgaacatgttctccttgggctaataatttgctaacattcagtaagatttgttatttaataatatagcgtttattaggactgtgtcagtcatctctgtgctttagatgttaataacgcatttgatctgtatataaccctctgtggtgggtamttttattatcccaatttacaggcaagaaaactgagatgctgagatgtgaggtgacttgttcaaggtcaggcactctgctacagcactgggcctcttaactgggctcctctgacttttgttaaaaaaaaatcaaatatttcaaaaaggaaaattctcttttgaccacattccctctaaatctatccccaggtaactattgctatctgtttgctgttatccttctagaacagtgctgtacatagacaaataatgggaatcacatttgtaatttaaaattttctattagacacactaaaaaagaaaaatagaagtgaaatcgattttaataatacattttatttaagccaatacatctaaaatattattagcattttagcattaaccaatgttaaaattattgataagatattttacattttgtttctcatgctgactctggaatccagtgtctcccctaccctatattaaatgtggctgcattcgagccagccgcatttcaaatgctccataactccctggggcttgcggctactctgtttcccagaacaacacttggcctttatgcagacattaaaatacagcatgaggctgcgcacagtggctcacacctgtaatccagcactttgggaggccaaggcaggagaatcacttttgttcaggagtttgaggccagcctgggcaatatagacagaccttgtctctacaaaatataataataataattagccagttgtggtggctcacacctgtagtctcaactactcaggaagctgaggtgggaggatcacttgagcccaggaggttgagggtgcagtgagccagactacgccattgcactccagcctgagtgacagagcaagaccttgtctcaaaagaaaaaaaacaacaaaatagcaaattgtactggaatcccaagtagacagcaagcctctgttttcccagtgggaagatttttaaaattttgtctttttttgatttttggggcaacctaaatattgaaataattaggaatggaagtaaatagttgcatttctccgtatctgttttgttgaacgtctgtagtgaattgtataaatgtgctgtaaccatttcgaacatttgctttcttcccacgaccacatttcaggagggggctttatgcagactccccctttaactacacagctttgctcatctgcagggccccakgttgagccaccaagctcagttttccagaatcttctcttcctcactcccatatgcactgaattccttgaatctctacagtatatgatgtttcactggaaattatttttggggggtttgccagattttctattattttattttaaaaattatttcgcgtggtttaaacattaaaaatgtaaagtagattacaaaccacatacccgatatggggttaacatccaaaatagataaggaactcatacaactcaataccaaaaattccaaataacatctgggagcggtggctcacacctgtaatcccaacactttgggaggccgagttgggcagatcacgaggtcaagagatcgagaccatcctggccaatatggtgagaccctgtctctactaaaaaatacaaaaattagctgggcgtggtggtgcacgcctgtagtctcagctactcrggaggctgaggcaggagaattgcttgaacccgggaggtggaagttgcagtgagccgagatcacgccactgcactccagcctggcgacagagcgagactctgcctcaaaaaacacaaaaatccaaataacctgactgcaaaatggacaaaggaccagaataggcatttttcccaaagaagacatacaaatggcaacaggtatgaaaaggtgttcaacatcactactcattggggaaatgcaaatcaaaatcacaaggagatatcaccacacacccgttagaaatgtcaaaagatgacaaatattggcaaggatgtggagaaaagagaactctttcgcactggtggtgggaatttaaattggtatagccatcatggagaacagtatggaggttcctaaaaaatcaaaaatagagctaccacatgatccagcaatccctcttctaggtatatattcaaaggaaatgaaatcactgtcttgaagagatgtctgcacctccaattcattgcagcattattcacaacagctgagacatggaaacaaactaagtgtccatcagtgcatgaacagatacagagatagtggtacaatggccccctcttaacctcaggggatatgttccaagacccccagtggatgtcaggaaccatgggtggtactgaaccctgtatatactgttttgtcttatacatacataactatgacagagtttaatttttttttttttttttgagacagagtttcgtttttgtctcccaggctggaatgcaatggtgcaatcttggctcaccacaacctccgccccccagattcaagcgattctcctgcctcagcctcctgagtagctgggattacaggcatgcaccaccacacccagctaattttgtatttttagtagagacagggtttctctgtgttggtcatactggactcgaactcccgacctcaggtgatccgcccacgtcggccttccaaagtgctgggattacaggcgtgagccaccatgcctggcctgataaagtttaatttataaatgaggcacagtaagagattaacaacataataaaatgaaaccaattataacgatatactgtaatgaaaacaaaataagggttacctgaacacaagtactaccataccatgacagttgamgtgataactgagacagtggctcccaagtgactaatgggcaggtgtggtctacagtgtggatacaccggacagagggatgattcaccccccaggcaagatggagcaggatggcacaagagttcatcatgctactcagaatggtgtgcgatttcaaacttagggagtttttcatttaatattcttggaccatggttgactatgggtgatggaaaccttggaaagtgaaactggataagacaggactgctgtgtatgtaaatccacgaaagaatgttattcagccataaaaagggagaaatcctgccatttgtaacaatatagatgaacttggaagacaatattgtaagtgaaataagccagacacagaaaatcaaataccgcattatgtcatttatacgtgggagctaaaaaagttgaattcagaggaacagtagaacagtggttaccagggctcaggaggtggggaaatgggggtgtgttggttgagggtataaactttgagttataaaatgaataagttctggagatttaatatacaagtatacaatgtattgtatacttgaaatttgctaagagagtggatcttaagtattctcaccatgcatgcacgtgtgagtgtgcacctatgtaaggtgatggatatgctaattagcttgattgcagcaatcatttcacaccatatttgtgtatcaaaacatcatgttgtacaacttaaataagaattttcctttgtcaattatacctcagcaaggctggaaaaaaattaagtaataacagtggtaagtctccttccttttcttgtcacatccccttccaccaattcccactgctcataattgattagttttattagtttcaaatggatccttctagagttccttcacacaagtgcaagtgaatgtgactatattcttatttttctttttttccacaaatgcatactaaacacgtggttgctggcactttgctttgtgctaacaatatatcacagcaatagataactcttgggtaaggtttagtgtgtcctctacactgctctaagggatatacaaatgtaaactgatttgatccatgatccaatcactgctatatatatattttttttgtttttgagacagagtcttgcttgctctgttgtccagcctggagtgcagtggtgcaatctccgctcactgcaacctctgcctcctgggttcaagcgattctcctgccccagcctcctgagtagctgggactacaggcgcccaccaccatgcttggctaatttttgtatttttatatttttgttagagatggggtttcaccatgttggccaggctggtctcgaactcctgacctcaggtgatctgcccgtctcggcctccccaagtgctgggattacaggagtgagccactgcacccagcccactgctatatttttatcctgtgttttttgccaggcaggacagagcaggatggcacaagatttcaacacactactcagaacagcatgtaatttaaaacttatgactgtttatgtccggaatttttcatttaatatttttggaccatggttgaccatgggtaactgaaaccttggaattcaaattcttttgtattttgagtatcactctgtcacccaggctggagtgcagtggctccatctcagctcactgcaacctccacctcccgggttcaagtgattctgctgcctcagcctcccaagtaactgggattacaggtgcctgccaccacccccagcttatccttttttgtatttttagtagagacggggtttcaccatgttggtcaggctggcttcaaactcctgaactcaagtgatctgcccaccttggcctcccaaagtgttgggattacatgcgtgagccactgcacccgcccagaatgcaaattctttgttatacaacactatctttgactcatttttgccaaatgaccttcatatgccttttaaaaaaattgtggtaaaataataaataacataaaatatactattttaaccattttaattgtataattcagtggcagtaaatacattcacaatgttgtataaccatgccgttatctatttccagaaacttttcatgattctaaacaaaagctttgtgcccattaaacaataattccccacctgcctttcctcccagcccgacatatcttctattctactttctgtctcttctattctactttctattctactttctgtcgaatagtatacttctattgtactttctgtctctgaatttcctgttctaggattctcattatatgagattttggagacagagtctctgtcgcccaggctggagtgcagtgtcgccatctcagctcactacaatctccgcctcccgggttcaagctattcttgtgcctcagcctcctgagtagctgggattacaggtacacaccaccatgcctggctaattttttttttttttttttgtattttagtagagacagggtttcaccatgttgcccatgctggttctctaactcctgagcccaggaaatctgcccaccttggcctcccaaggtgctaggattgcaggcgtgagccaccatgcctggcatatgcgtcagaatttcattcctttttaagagtgaatacattgtgtgtatatactgcattctatttatccattcacctatcaaccgacatttgggttgtttctgccttttggctactgtgaataatgctgctatgaacattggtgcacgagtatctgtttgagtctctggtttcagttctttgggctatatacctagaactagaattactggatcatatggtaattctttaactttctgaggaactgctaaactctttttcacagcaactgcagtattttacattcccaccagcaatgcataagggttccaatttctccacgtcctcaccatcacttrtttcctatgttttaaatagtagccatcctcatggttgtgaatggtatcacactgtggtttttacatgcattttctaatgactaatggtgttgagcattgtttcatgtgtttatcagccatttgtatctcttctttggagaaatatctattcaagtcctttgccaattttcaaatcaggttgtttgttttttattgttgttgagtcgtaggagttcttttatatattttgggtgttagacccttatcagatatattatttacaaatattttctcactttctgtcagctgtcttttcatactgcattaccttttttgcttaattattcattgattgtgcaaatatagagtgcctcctatgtactcagaactgctgtaggcacaggggaaaagtggagaatggtcctgccttgctttttaaagtcatctgtaaacgccgtgtttacagtgatattcaagattgcagttgtgtggtcagacttcaaagaatgccagttatttctaaagctgtgttaaatttctttgcctctttttttagccatcccatcagatgatgcttagaagtatccagagttggcatcaactgaggtggtttcaacactgcccgcgccctgcaggcctaaacctctggatgcccagttcccacgcacgtgattttgacatgatcaatctggggttggcacctgggcatccagagatttaagagctcccaggtaattcttcagagagcctgaaaagtggagaaacataggaagataatgtatttcagttgaacacttaagcttattgctttacattgaaatgtcacccgaaatggtgacattcatttcaatgtaaaacaatgagctcaagttgaagtctaaaagttaaacatattcagcgtattatttgaaaatgaagccaacatactttaaaaaaaaaacatagtctacattttcgaccctttcaaatgccctgtgaggtgcagccaggtttagaatcgctggtggggcgagtcttcctgaaacacggcttgtggttcagaagagtcagtgagggagtttccaatactttgaaacttcagagcaatccaaaatgactctcacttttccaaggggtgatttcggagaaaaccaaattttatattttatatttttgttttaaactttatatttgtgcatataaatagcattaccgtggagctttaaaacaatgtatattaaggctcatgtatggttcatgaaaatatttwaaaaaaaaaaaaagaagtagaaaagaaaacaatatctaaatagtgtcattcttcagtgcccggctttatccccttaccagtctgcccttgggaactctctgtgtctgtaggtaaaatgtactaactcactttcactgctgtatgtttccagaacataaacacaccattgtctgtttaatggtgatgcacgctagtgatctgtgggccaaagttgaccttcagagatgcttctgtggtctgcacagtgattaaaaactttttacttggatgctaaccttaaaaaacatcagaaggttatacataattgtctggattatcagcttcctttgaaagcacaggccttctggccatgctggggtgtttccctctcctgccgagggctggttggtgggctaagtgccatggcccctttctggcccgtctctcttttacttggcctgccttctctggagtgagttgagtttgagactccagcccaatctgccagttaggttgttgctgatgtctttctgtgattgctgctgtgctgagcctgctcacagtggcctcctcctcatgcacatgggctggcattgctctggggttggaccctggggagggagaatgctgctcagtgtttagtgttccttctcctgctctggaaagaactaccatttatttaatgcatgatatagttttgctgtgtccccacccaaatctcatcttgaactgtagctcccataattctcatgtgttgtgggagggacccagtgggagataactgaatcatgggggtggtttcccccatactgttctccttgtagtgaataagtctcatgagatctgatgattttgtaagtggtttctccttttgcttggctttcattttctcttgcttgccgccatgtaagatgtgcctttcaccttccactatgattatgaggcctccccagccacatggaactgtgagtccattaaacctattttttaaaaaataaataaataaataaattacccagtctcaagtatgtctttgtcagcagcatgaaaacagactaatacaatgcatatttattgagcacctgctacgggccgggtgatggggacatagaggtgattgaaatagatcaggctcccacctgcaggagacaagaccccttgcttctttttactgggggtaagacagataataagcaatttggtattgaaagggcttcctgctgtgggcctgtcctgcagcttctttcccacaggaactccccaccctcaatgagtgacattcagaagacccttggcctcatgggaggtcatgcctggccagccctgggtgtgggatggtgaatctgtaacccctactctctgtgctctgtccctgcaggggacaaggaccacatgtgcagtgtcaaaagtygcctgtggaagctgctrtccccagccaggctggccaggcgggcccaccggagcaaatggctrgagagttacctgctgcacctggaggagatgggtgtgtcagaggagatgcaggcacrggccctggtgctgcagctgtgggccacacaggtgggtgtgaatgtgcaagtgggtgtgtgcaggtgtgcatgtgtggttgcgatatgaacgcrtgtgtgtgtgcatgtctgtgcacctgtgcaggtgtgcacatgactatgcctgtgtgtgcatgtgtatgtaggtgtgcatttgtgagtgtgtgctgatgtgagtgtgggtgtgtgcacacatacccactgcccaaaccagttccctgacttcctttactgtcaaatagcatcacgaacagaaacattcattcggtattcttttctttttttttcttttgagacagagtctcgctctgttgcccaggctggagtgcagtggctcgatctcagctcactgcaacctccgcctcccaggttcaagtgattctcatgcctcagcctcccgagtagctgggaccacagttgcctgccaccatgcctggctaatttttgtatttttagtagaaatggggccaggctggtctcaaacttgacctcaagtgatctgcctgcctcggcctctggaagtgctgggattacagtgtgagccaccacgcccagcttctttttgttttttgttttttgtttttgtttttttttaatttggaaaaatgttaaatttatagaaaagtttaataaatagtttaatgaactcctatatatgcctcaccttgattccccagttttaaacattttaccacctttgctttctctctctctgtctctctctctcttatgctctcttttccccactgggattattttattgaaataatttgggaataagttgcagatatcatgcttttttatccctaattgcttgagtgtaagcaagaacatctcctgcatgaccacagtacaataaccaatttcaggataatgagcccaaatacatgatcattatctaataaacaatctgtattccagttttgccagttgtctcaataatgtcctttttggttcatcttggtccagcatccaatccagaatcacacgttgcatttagtcattctgactcttctgttttcttttcttttaatttttttatttttttgagatggagtcttgctctgtcgccaggctggagtgcagtggcataatctcggctcacggcaacctctgcctgctgagttcaagcgattctcctgcctcagcctcctgaatagctgggactacaggcgcatgccaccacgtccagctaattttttgtatttttagtacagatgggagttcaccatgttggccaggatggttttgatcttttaacctcgtgatccaccagcctcagcctcccaaggtgctgagattacaggcatgagccactgcacccgacccattttctttaatctggcacggtttctgtgcgtttcattgtttctcattacatttacattttttgaagtgtgcagaccagttattttgaagaattgtttagaagttccattgagacactgggcatggtagtgtgcacctgtagtcccagctagtcaggagggtgaggcaagaggattgcttgagcccaggagtttgagaccagcctgggcaacatagtgagattccacctcttaaaaaaaatcctttgagtacttaccgtagacctcaaagattctgtgttgtgtcgattaccatttggggggtcaggrggacagggggcagagagtcaaggaaacatatacaaggtgattttagatgatgatatgtagagtatgaaacagggctgtgaatagagagactttcgggtctgctctagctggggtggtcagggaggcctccctgagatatttgagatgagccctggatgataagaaagctagattcagagacttggagaagatatggggatagaagattccaaataagggaaacagcaagtgcaaaggccctggggttggatcttgcagagtagagttggatcacacagctgaagcagagtgagggagggggcgtgagaccgagggaagaggtcactgagggccttgtgggtcctcataaatgaggacttgggatttttctctgggcgagatgggggcctgggagagttctgagcagaggagggacaggatcttgggggcaaaagcaaaaacagggcaacaaggaggaaactgtggtggcagggtcaggtggtggccatggaggtgatgaggacgtggatagattttggaaatttcaggaagacagagtcagtggacttggtcatggaccagatattggagtgagagaaagatggtagccttccatgctgcacagctccaggcctggttcctgccctctctcctgatccccaagccccatctttctcttggccccacttcgacggtgacagttgcacaagctgacatttctgggtaattcctctcccatcgacttgcagcttatttttagtttcctcagagccattaactgtccttgcaggcagagactggcaaggggtggggactgggatcaattggcagttgtcccccacatcagtgcctaataacatatttatgtgcagagatgacttggagctccaaagtgtctccagaactctcgtgggaatgactggtgtcagcaaaactggatgctggctgaggggtttgagtggcagaaagtccagggaacagcctttggcagggccaggagagctgggcaggagctggggacaagatgtcctctgaggttgagtcgttgacagcgtccagaattcaggcaggtgggaaaacttttcaagggccttttgggagyggagccaagagggtacttggcctaggagtttctggcacaggctctgtgacctcccagcctgagtttgaatcctgattttgacacttcctggcaagtcagtcacttaacctctgagcacctcggtttactcatctgtaaaatggagatggtagcacccgtttcaagacgtggttgtgaagatgaaaggaggcaggaatacatgtgcaattttgtaactgtgccttgcagataacaagtgctcaagaaacatcttcaacaaatatttagagcacctaccatgggccaggccccattctagaagctggggatagagcggtgagcaaaacagacaaaaatccctgcccttagggagctggcattctggtgggagaagatagacaattaataaacacataagctgtcatcacagtgctttgggaagttagagaggaacatcatttgagtcctagagttcaagaccagcctgggcaacatagcaagaccccatctctgcaaaaactaccttattttttttgtagaaaagctgggcgtgatggtgcgcacctgtagtcccagctacttgggaggctgaggcaagagcattgcttgagcctaggaggtcaaggctgcaatgagccatgattgtgccactgcactccagcttgggtgacatagtgagaccctgtctcaaaaataaataaataaataaacaaacaagtaagcatctaaaatgtattagaagtcaggcgcagtggctcacgcctgtaatcccagcactttgagaggccaaggcaggcagataacttgagatcaggagtttgagaccagcctggccaacatgatgaaaccctgactctactaaaaatacaaaaattagccaggcatggtcgcacaggcccgtaatcccagctactcaggaggctgagacatgagaatcacttgaacccgggaggtggaggttgcagtgagccgagatggcaccactgcactccagcctgggcaacagagtgagactcccatctcaaaaaaaaaaaaaagtattagagggaatgtgttctatggagaagagatgcagcaggaaggcaggcccaggaaggcctcactgaaaggtgacatctgagcagagactgaaggaagtgaggggtgaaccatgtaaatatatagaatgaagtttcccaggcagggarcagcaagtgcaaaggccctgaggcaggactaagggtgacacrgtggggaggcagagctgccggaccacacaggtccctgtaggccatggggagggctttggcttttactgtgagtgagacaggtgcctgctgtagggctctgagcagaggaagaacctggcctgtctttcgctttagagggatcattctggctgcagcgctgacaagagactgtagggggtggggaagcagaggcagggagagcagagaggagcagcaggatccagacaagagagggtgctgctgggccagggtcaggggtggttagattctgaacatatatcaaagtaaagccaacaggatccgctgttggatgggaccttgggggaggccatcaaggatgaatccaggtttgggcctgagtgacaggagggatggcagagccatgggcagaagagggagatggcgggaggaggaagtttcagggagaagatcgggggttgggctttgggtatgttgaatttgagatggagatgggggagtggacacctggagaagagagtctggagttcaagtttgaggtccaggcttgggagttgtcagcatagaggagtttaaatcctcaggactggaggagatactgcaggcgagggtgggtgaagaagggggcatccctggggctctccagtggtgggaagggtgaggaggaggggccaggaaggtgggaggagagccgggagtgggaagctgggtcagatgctgcagagaggctgaaaaatggtagctgtgattgctgctgtcaggtcggagatgatgagtcaggaataataatctcaaaagatactgagcacttaccctgggccaagcatcctgttgagcactttgcaaccaccatctcataggatcctcacaacagcttcctgaatccagaacccctgaacctggaatcgagagtgatggaaggagcagtgggagtctcaggcatccagggaggactctgtgggccgagacctaaggtccaggcaaggggaagaggaggctgtaagggaaggtggggtggggtggtggggggcagacggaggagagtttccaaacacaggtcaggcttccctgccagctctgagcccactgatgctggtaatgccaggactgaaaccattgattgacatgatgtccctcagccccatccatcacatctgatccttctcttccttcccgatatctggcttggccttcaccccatcacatcctcagcagccacagccacacatccctggaaattcctgggtggtcctgagaggtaggggagggggccacgggagctgctgggcctgcacatagctccgctgagatagtgatcatcgagaagaatccttgaggcatctgacaacggagtagaaagcaaaaccacagtattgagagtcagacagactcgggtggaatctcacctctgccactaaactagttatgtgacctcaaacaagtcacttttctgggcttaagtttcaccatctgtaaagagggttggtttttttgtttgtttttttttttgtcttcagtagttttatcttgaaataattttagattataaaagagttgcaaagatagtacaggagttcccaaatacccttcacccagctttccctaatgttacataaccacaatacattcatcaagactaagaaattcacattgggacattgctagtaactaaagtctatactttattcacattgccccagtttttctactaatattctttttctcttccaggagccaatccacaatcccacattgcacttagggcttttgtttgtttgttttaaatagactctatttttacagcagatttaggttcacaacaaaattgaaggaaaggtgcagggatctcccttagcccccttctcccaatgcctcgcctctccatcgctggtgtccctcagcagagtggcacatttgttacaatttatgacctacactaacacatcatcacactcgggatattcttttattccgttggaatcttctaaatcataaaaattaaaagaaacacaatctgtgacccccatccctcaggtctcccttcttctgccaggctacatcctcagagggtctccccctgggggatractacaatggcctccagtagctctaggcaatttagcaatcccatggaggagggcttcccttcccctaaattctagcacagctcccaagactgatactcactggcccagcccacgtcatatgccccactctgcgtggatcactcagtgcctccgcctgggtcccatgcccacacttgaagtctggaaggatgggtcagtcctggatggcccacatggacttagacttaagaggaggtggttctttgaaggaaagtggggtgctgttaccaacgacaaggaagcggatgcaggcaggagcgggcagcggaagtcccccacttccactgatgggccatgttgtcaggaggcaacaagaaggagcatgtgaatcaccaagggtgtggtctggcccgcagtcagtgcctcccagaggtcagccactgccattcacaggaaagctagaacaggggtggcactgcttttgggtcatggcctttggctgcagtaggagggaatgaagacaaacaagaagtgtcttcctgagtaaacggaggcaaggctccgtgggtgaaagctcaaattccagggtggcaaattcaggatctcttatggttgtgtgtgcacacacacacacacacacacacactcacactcacatctgtgcagttgggtaaaaggcggtcttggtcacctccctaacttgccacagctttttcctgcaggcagagatagccaagcgcccatgtgttccactcctgcttggtaattaatgagcggtggcccccatctaaccatctgggccagataaaatggccttggcgctgagctaagctggtgttgaattatttatcatccgcatttgcctggctatttaagtgatggacagcaggtgaccttgctgtgtcagctggacctgaggtgctggtggaactctcagaaagggccggaggcccccccgacttgttttcaaatccaggggaggggccagtgggggaggagtaaccacttctgagcacctactatgggcgcagcacgtgtgggattgcttgcattcagcctcactggacccttgcgtccacccaggaggtggcaatgttacccccagtgttgagacccaaagggggacgtgacttgtccacagtcacagaaagtggggagctgggatttgaacccacctctacctggtctcagtccagggatcttctagcccacctcccaggctgtcttggagctccacctctaatccaaagggatgcagatgtttatttgacaaatatcagtgagcctccactatatgctgggcagtgggtagtgaccggggagtacttcgttttccttttcagtaaaaggcctaataatggcacctgcgtgatggaagtattgagcagaggagtgtggttcctcctggcctcacgggcactaaagaggaaggcaaaatctatctcaccatcactaatgctatggtgcatttctttccagcctttccccataggtttttcttctgtggttaagatcatgcagctgttttaatctaaccttctatttggtttaatattgtaacatgagcatctctcatgacattgtacatcactgtagaaatgatttggatacagcctgggaaacatagtgagacctcatctttacaaaaaatagaaagattagccgggcatggtggtgcatgcttgtatcagctacttgggaggctgaagtaggaggatcacttgagcccaggaggtggaggttgcagtgagccacgatcgtgccattgcactccagcctgggtggcttctgtttcacttaaaattagtgtgtccattaaaaaattttgaacagtttaaaaggtatttgcaaggaaagtcagcctccttcctccttatcctcttgtcttcccagcttctgtcccaaggtaacctcagttacccgtttctggtgtctcttagagatggtctgtgcttctttgggaggctgtggcaggaggactgctcgaggccaggagtttgagatcagcctgggaaacatagggagacctccatctctaccaaaaaaaaaaaaaaaacctagctgggtagcacatgcctgtggccccagctccttgggaggctaaggcagaaggatcacttgagcctaggaggtcgaggctgcagtgagctatgattgtgccactgcattccaccctgggtgacagagcaagaccctgtctcaaaaaaaaaaagagatggtctgtacttcttcatgtatatttctctttaaacaaacacacaaatggcagcatgctgagccaccaccctgcaccttgcgtttgcatgcttctgtgtgtcttggctacagtcccacatcggtacacacagagccagcttctttttaatgacttcctgcatcacatcatccaatggatggatcttcattgatctcattgatctcttattgatagacatgagattgtttccagcatttttctattacatgagcactgcaataattatctttgtgcatatgtccttttgcccatgtgtaattatgtctgtaatgaaattagtgggtaaacatgatatttaatgatgatttaatattccattattatgattgaatagaatagtcacggcagacaaaaaccttcccccaaattgagattagttggtattcttcccatatctggatcactaaagggtgccatatacacattttagccacataccaaagagctgaggctaaaatgtgtatgaaaatgttcagctaagactgaagccttgaagcaagaaattccactcgttttcctaagtgtttatctattgggaagtttaaataatttttattcatagctttcagtcatcaatgatgattgcggctttgttttatacgtacacaacacacacacatttattcttcaagtgactgatagaatttgaagatacaaagcatatagggaactttttgcttcccaaactacatcaagaatgattatatttggaagcaaatctttagatatcrcaccagttagctattgttgcataacaaacatccataacaactcatcagcggcatacacccatcagcatttatttaactcacgggtctgtgggtctggctcattggggcagctcagctctgtccatgagtctctcatcctcctcttgggatcagtgggcttgccgagcaagtggaaacacaaagtctctcgcggcttaggcgtagagtggctgttccttcaattccacctcaatctattggccaaagcaagtccacggctgagcataaattcaaagggcaggggaaatacgctctggctcttgaataggaggaacagcaaattcacatggtaaggagcgtggattctgsgattggggaagaattggggccaacaatgtgatcattctcagatgtgaacagtcttaactgatataccctgttcctattactgacactgttttgctgattagctatgaagattacctgtgtgacctaggattagtgactttgcacacagtcagggatgccacgagtggccttgaagtaggtattttgggccacagggcagttttggccatgtcctgaggctggagatagacactggtcatgcctgggtgtttggcagcagtgggarcccaggcctactggcccctctgtcttggcccgagctgtgtccctggcagagacragtcagctctgccctcataatggcataacaggggcccttctccttgcaggggaatatgggtcccgctgccttctggctcctgctcttccttctcaagaatcctgaagccctggctgctgtccgcggagagctcgagagtatcctttggcaagcggagcagcctgtctcgcagacgaccactctcccacagaaggttctagacagcacacctgtgcttggtgagatcgtcagaccctccaagatagcccctaagactgcgtcatcatggacccccaaagccctccccaacatggactcctgtcttccagggtccatcagtgtgtcctccgacctagggtctccctaagcctcctrtcttcacacacctggcatctccatactccagcctcagctaggggtcaagtgacagaaaacctaacttcaattgactaaggtgaaaaggtactttgagacatgtcactaaaaagcccagaggattggcttcaggcacaggtggatccatgcactttaacaatgtcgtcaggactactcagttcctctccacctctcagccctgtttcccactgggttggctccagtctcaggctggcagtagctgttggcagctcaaggctgacttcctcctggctctgtgagactctgaatctcttacartgttcccaccaagagtcccaagactgtgtctcattggctttctttgggtcatgtgtccatcctgaaccaatcacagggctcagagggatgctctgattggccagtcacagccccatcccaggagttgagcatagaagcagcagtctaacccctgagaatgagagaggggtggaccctagaggaaaatcaggggcccgtttccagaagagaaatatatgccgggcagacaggaacagagattgatggccctactctctccccagccttctgatatctccctagctcccaccttccctcacaacttctcttggggtcagacctggataccctcatgttcaaasgtctctgagggaccacagagaccacatgtcatcgtgtgtcctttttcaccttgctatgtgactgtgtgggcgaggcaggcaccctctctgagcctcttcatcttcctctgtaaaataagagctggggttggcatatgagcaggtgaagggatagcccgctgactcttccttgcacctgccccatgcagatagcgtgctgagtgagagcctcaggcttacagctgcccccttcatcacccgcgaggttgtggtggacctggccatgcccatggcagacgggmgagaattcaacctgcgacgtggtgaccgcctcctcctcttccccttcctgagcccccagagagacccagaaatctacacagacccagaggtaaatggcaggggcgcctggtcatatggggtctgtgggagaacaatcagtgactttgggatgagccagatctgagtggcagcctggctctgctctttgtttgctatgtgacattgcccagattgcttcacctctctgtgtttgcttcctcacctgtgaaatggacctcataatagcacctgcctcatgagattgataggaagattaaatgggatcatgcataagcagatattgatggccccactctctccccagccttctgatatctctttggctcctaccttttttcacagcttctcttggagtcagacccagatcccctcatgttcaagggtctctgaggaaccctagaacatgaggggatgttcattcacactgagtgctttgtgatagctcagccattttccttatttcagattgttataatgtcagtttctcaacacttttsccttgccccagactttgagaagaagtaaactttcacaattgctaacagattgggtgtttactgtgtgtcagaccctaaactacatgctcatctatccatccattcattcatctgcccatctactcatgcatctgtctattcatgtattcatccatccatccacacactcacctatctacctatccattcatctatccatccgcccatccattcatccatccacccaccaatttaccctttcatccacccatctacccattcatttatccatccagccacccatccactcatctatccatccatccactcatctacccatgcatccatctgtccattcatccattcacaaattcacccatccatccattaatctatccatccacccatgcatccatgcatccatccatccatccacatactcacccatctacccatccattaatctatccatccacccatccatccatccatccacccatgaagctactctttcatccacccacctacccatgaatccatccatctatccatccgtctgtccattcaatcatctactcatttatccatccatccacccactcatttatctacccactcactcatatgtccatccacccattcttctacttatccacccatccatccatctatccacccatctactcatccatccatccatttgtccattcatccatttattcatccatccacccatcaatctacccattcattcacccatctacccatccatccatccaccccatctacccatccatccatctatccatccctccattcatccatctttccatccacatttccatctcttagtctatccactggttcattcacctatccttccacccatctttcagtcggcagctactccatgccaagctctgtgctcagctacaacccttgccttaccactgtgcagtgtaaccaaaggaaattggcattttctttttaaaaaatattttaatttcttttattttacattacaaaagtaatatatatcatagaatataargaaatacagagaaatatatrcttaaatgtaaaaaatatgtatttcccttcttctccagttctacagagttctctgaccaaggtttggagtgtgccttgcgaattgttttcatggctttacaggcatacacacaacacattcacatgccatgaaaagattggtgtgtgtataggatcatgcaatatatactattctgaaacttgcttttttcactcaacaaccaattgtagaaattctttccatgtcagtacacacaaaccttttgccataattttttaaccaatcccctatcaattgacctgtatatggtttccagtttttccctcttataaacatgactgtcatgaacatcctcatacatttttcttggtgtgagcttgttctgggaatggggtcagaaaaggaccttcttcctatttcaggtatttaaatacaaccgattcctgaaccctgayggatcagagaagaaagacttttacaaggatgggaaacggctgaagaattacaacatgccctggggggcggggcacaatcactgcctggggaggagttatgcggtcaacagcatcaaacagtgagtggggggccagggcagggccagggtggctcctgatcccctggttggcaggcgcccttctctcctgggactgagggctcagccaggagaatggtttggcagaggcttcacatggacagcccgtgagccatctcttatttgtggttttacaactgtgtgcttttataaatcagaagagctcgtgtaaaaaagccagatttcggatttcttttgaaataatcagatctggcagcaggttcttccctccaagactggtgtccagattccaaatactggacattcctttcagctgaccgtagctacccgtctgcagctgctgccgcatgttcagaacttcatgttaggaactggccgaacttcactgttcccacttggttattttaatrcctgtggggccgagagcctcataaattatctcccttgaaccccaggagctttggccaccaggatcacaaacagattggaccaggggttatgacatctgccctgtcctcctgtccagcccctgtgcaatcataagctgggttaccttctgagcctgtttcctcaactgtaaaatgagggttctgattataactayaccccaggagtgtcaggataaatgaattggatctttctaagttcttaacccactgtctggctcattgtaggcatttgaaaaatgttaattattaccataattrttaatatcattattgtgcatgcattgtgctaagtgagtgggcacgttacataaacctttagcctcagtttcctcaagaaaatggagtcaattatgaacataatacagctcatatgcattccttaaaatcaccttgctgtgtgaaatcatgcaacaaaaactgcagggattcacgcctgtaatcccagcactttgggaggccgaggtgggcagatcatttgaggccaggagttggagaccagcctagccaacatggtgaaaccccgtctctactaaaaatacaaaaattggccgggtgtggtggagcgtgcctgtaatcccaactactcaggaggctgaggcaggagaatctcttgaacccaggaggtggagattgcagtgagccaagattgcgccgttgcactccagcctgggcracagagtgagactctgtctccagaaaaaaaaaaaaaaaaaaraaagaaagaaagaaagaaaaaactgcagggattgagggaaaagggggactggggccaacactcaaaaacctcatcagtgacataataaaaaaaaaagagagagagagaagaacccagtaaaaaaaatggtagtaaagttttatacatgttacctggctaagaactatgtaagtgctgtaataactgtggctgtagatcgatgcttagttgtgtgcatgtgtatattttatggatttctgcacacccaggttcagctgggtgcagtctttcgtcttcacctcatgtttctcacaagtgaaattgcacgtgagcaaatgtgaaacttgcattatattcaaatggtgccctaatatatcaatcctattggaacaaattcacctgttcaaaacaagtgttagagcagaaccgactggcattcctacctcatcaagtttttggacagataaaaagagatagcgggtactaaatgcttagatggtgcctagcgcacagtgttccaataaattagctaatttgttgttatttttatctcactgaattgtcatgacaaccctgctggtccatctaaaaccgagtctaggcaggtcagatcatttgccgtgttcccaggaagtggaggtgcaggagttcaaatccaggggtgggcacaaaaccgccatcccttagaaactcaccctctagtttcctacagcctcagagctggaagagactcaacatgcctttcccctctttgaccagatgggagaactgagacccagagtgggtaagaacttggcgagggccacattcccataagcggcacagcccagatctgtccagagtgttaactcccctctctcctcatctgccctcttcttcactccttcagtgagacaaaagaatccccaccatgtgctcagtgctgcatcgggcgcctgggttggggtagggaatagtggtgggaaaagagtcataagatattctcctgacccttacgaacatgggcattggtaagatgaggcagggaggcagcaaccgttgacatcccccgtagggctgcctccacatttatgggggcactgattacatcataggcatggcagctgcgaatagttattatgacagttttcccagaagatggcagtagagagtgcttgttcttgcaaagttggtctatttaggacaattttctcagagatggcagtaaaatgtcttgagagcgatgcctgtttctaatctcacaaagacacctaagggttagcagcagtcctggccaagatagacagtgagggttccaggagtgtggggaaaggcggcaaagtgtgtgggctggaggatccagaggagtcgccgtattaatcagcacaggctcagctctgcacctgccgagtctcagtggcttttaccaacagaggtgtagttccactyacacggtatcagctgtgggattggagggcttccccactctgtgcacagactcgggccaggctctttccctctttcggctccaccgtctcaatgtgaagcctgcatggctgccaggcaggagggacagctggagagccacacactggctcgcgaatgctttgacacaggagtgacacaggccacttctgcacacagcccattcaccagaactcatccacgggcctgcctaaccttacagggggctggcaaatgtggtgagcagcaaatgcgtttcttctacttcctcactcctctcctcactttactcaaagttggagtcagacttaggaggcagccatggctcccctgccttgttcccgataaccccctgccctactcctctccttcacaccttccatgccatctctctgcagatttgtgttccttgtgctggtgcacttggacttggagctgatcaacgcagatgtggagatccctgagtttgacctcagcaggtacggcttcggtctgatgcagccggaacacgacgtgcccgtccgctaccgcatccgcycatgacacagggagcagatggatccacgtgctcgcctctgcccagcctgccccagcctgccccagcctcccagctttctgtgtgcacagttggcccgggtgcaggtgctagcattaccacytccctgcttttctcccagaaggctgggtccaggggagkgaaaagctaagagggtgaacaaagaaaagacattgaaagctctatggattatccactgcaaagttttctttccaaaatcaggctttgtctgytcccaattcacctcgttactctcacctcgtgatatccacaaatgctattcagayaaggcagaactaggagtcttcactgctctgcccccaactcccggaggtgtcaccttcctagttcttatgagctagcatggcccgggccttatccagtcaaagcggatgctggccacakaaagrccactcaggatgtcctttgtgtccattgatgtcattcagcagtcagtcccccaataatccttaaactagctaaaaccaaaggagtcccttagaagatctgcttccctggggccccatttgccagattgccccattgctcacactacttgagaaaatgcaggagagcttcccccaaggctgatgcattcccggtgcagaacaggggcaccctccaaacactgggctctgaggagtggagttctctgttctagagtgacaggcaccagatgggatgggctttctcagtgtcagcactcaggtagggagctaaggaagacacagcccagacaagatggctggaaggagccagccaggactccttagactgatmaagccaaaaaagaaggtgccgatttcatgcattctagtgcagaagccccaactgtgatcacgatccagtctgcagacgtgttttgtttggacttcacttaaaaaaatgccttagttgttatcatctttgggagagttcattcaaaatgtccagcttctcttgaaaacttggtatatctggccacactgggctcacattcccaagggtaactcttggccagagctgagtggcagccgcctcccttatgcaggacatgtgctctcggcttcaccagggttctgaccgggtctgcttctgcattcacagygcctcctggacctgaaggcatctgagtgtgagaccctgttctaactcttagaagtgacattgtaagaggtggtggggaccagctaattggtccaacccagcctgagtgcaccaccctttgaacaaatgtatcagtgatgaaaatttgcctttgccccggcttgcctgtaatcccagcactttgggaggccgaggtgggcggatcacttgaggtcgggagttcaagaccagcctggccaacatggcgaaaycccgtctctactaaamatamaaaaattagtcaggtgtggcrgtgcgtgcctgtaatcccagctattcaggaggctgaggcaccagaattgcttgaacccaggaggtggaggttgcagtgaactgagactgcgccacggcactccagcctgggcgacagagcaagactctgtctcaataaataaataattaattaaaataaaaaacagcttaaagagaaaaatggcctgcaaaccttttttatgatgctatttktattaatataaagtcytgtttattgagaccctttaaatgcctgcgagagaccctacagacagtatgtctactcctcacagcatctctatgargagaaggagggttgtgcccacttcatagatgagaaaactgagaggtgaggtgacttgcctggggccacatagctcataagctgtagaactctgcaggcagatttactgtcccaggagcaaatgctggatgagcaactcctgttctttgggctcaaggggactggtgatgggacaattcttctcgacttcaggagctgacagagccagaggcacctaaacttgggtacatcttgtaagacacataatgaggtccctctagctttagctggagggagataaaagaaccccagacctctgaatgtcccagaggctagtctcttctcagagcagcactggggtttgggggcttccctgggcctcagcctccaggcacccccaggattcccagagagacgctgtgattggcaggaggcaggatatccccagggaaacccatcttcacgcctgggtgacccccactgccgcctccttcttaactctgcaggaaatcagagctggcagcctccagtgggaggacagagccggtttccgtggcaaccctcagctgcctcatcgtggctgggaagggaaggaagcaagccggcagaaatagctatggaaggtcttgcgcaggctgcaaccytggtgtgctgggcgaaaacccttatgactccccccttccaaatcaggctgggttgtcactgagactagattctcacctgccttcaaagaagggccaattccctttaaaggtcgcacctccttggaaccacagtcattagtgaattacactcaaggaaaagaygtgctcccaccaggcagctccagctgttacctgagatactgaagtgcagctcaggagacgattatttaaacctgcccttgttttaatcgttatttttctctttaaaaaaaatagaagctataaagaaaagagggagagatgagtgggttagctacctgctatgcgctagttaggaagttacctggatgccattgtatttcttcatcccttgcttaagaatcaaaattactggacatatgttaggaatactctttctttctttctttctttttaagctcagtggcaagaatgaaatactctttttttttttttttttttgagatggagtctcgctctgctgcccaggctagagtgcagtggcgtgatctcggcycactgcaagctctgcctcccgtgttcacaccattctcctgcctcagcctcctgagtagctgggactacaggcacccgccaccacacccggctaatttttggatttttagtagagatgggatttcaccgtaytagccaggatggtcttgatctcctgagctcgtgatctgcccgcctcggcctcccaaagtgctgggattacaggtgtragccaccgcgcccagccaagaataaamtactcttaagttgatctaatgaagtgtttccttaccattgtgattattgttactattatttgctatattttaatattgttgtttaccaaatattytcctttaaacagactcgctttttaaacttttttttttttttttgagacggagtttcacgcttattgcccaggctggagtrcaatggcacgatctcagctcaccacaacctccacctcctgggtttaagcaatgcttctgcctcagcttcccaagtagctgagattacaggcgcacaccaccacgcccaactgatttttgtwtttttagtagagacggggtttccccatgttggtcaggctggtctcgaactcctgacctcgtgatttgcctgcctkggcctcccaaagtgctaggattacaggcatgarccaccatgcccrgcctaaactttgtttttaaaatgaactttttttccccccaattgctgccaatagtggataacatgtatcactcactgccaaaaatagaaagtgaccatgaaaaataaattygctggggaagggggctccatgctggtgtggccaaggctgagagctctctcttctctgttacaaaaygagataagcaagtgttagaattgccttaaggccacactggcatctccctgaccttctccagggacagaagcaggagtaagtttctcatcccatgggcgaccagggccatctcctcccaccagtggcccccactcacagggagctggcaatgccctacctgcctgttctccagatggagaaacaggctctgagatttcacaggtcttgcccaaagtcattgattttgatgattaraaagaataaacacagtgtttcctgagtagcagtgattgttatgccttgctattttaataaagattctattttcgtataacattgtcaagtggaaacatgctgaaatctattaaaccatctttgtttgtggaactgcctctgagtgtgattctgatggagggcattggccgtgcctggaatggtgaggtcagctcttgggacaggagagcacagagcatctactctgtcccttgctgtgggcccaggcctctcacagacagaactgagtcacacctttacccaccctccaaggcatagatgagtatccccgtttttacagagaaagaaactgagggtcagagaggtgaagtggtttgcccaagaacgtgtggctaagaggtaatagacctggaattcaaatgcaggaccctctgctgcctgagacagtgttcaggatctttctttcagtgatcctccggctggcagcagagggactgggtacccattagagcaggggtccacaacccctgggccacggatcagtataggtccttggcctattaagaaatgggctgcacaacaggaggtgaatggcgagtgagtgagcaaagcttcatctacatttacagccactccccatcactcacattactgcctgagctccacctcctgtcagatcagtggcaccattagattctcataggagggcgaaccctattgtgaactgcacaggcgaggaatctaggtttcgcactccttatgagaatctaatgcctggtcatctatcactgtctcccatcacccccagatgggaccatctagctgaaggaaaacaagctcagggctcccactgattctacattatggtgagttgtataattatctcactatttcaaacaatgtaataataatataaataaagtgcacaataaacgtaatgcacttgaaccatcctgaaaccatacctcccacccccacccctgggtcgctggaagaattgtcttctatgaaatcagtccctggtgccaaaaaggttggggactgccgcattagaggactttggggtagaccctggtaacaagcagacaacacaaaagctctctttaaaattcaccggatgctgtccatccttcaccagaatgcatgcattcatgttaaaataaaaaagaaggggtgaaatggattaaataagccttgggagaaataaaaagagaaatttggttttttctctcaaatctttgtatagaaataatatcccagggcagatgtgcctcacgtcagtttcctcatctgtgaggaggtcatggaggcacatcaggtgggatgggatttggcagtgagtgacagacttctcaaagtaacatagcaacatgttatatattaacatgctttcattcaataccacaggtttttttttttttttttttttgagatggagtcttgctctgtctcccaggctggagtgcagtggtgagatctcagctcactgcaacctccgcctcccggattcaagggattctcctacctcagcctcctgagtagctgggattatgggcatgtgccactacacccagctaatttttgtatttttagtagagacggggtttcaccatgttggccaggctggtcttgaattcctgacctcaggtgatctgcccacctcggcctcccaaagtgctgggattacaggcatgagccaccatgcatggccacattttttttttctctttcaagcagatacgggaggccagaggtggtgtgacatctccacaatcatgaggttccctcctttctggaccctctagcatctgtaaccagtggtttccacctcaggggccgttatggctgcttaagctccagccattttgtccacattccacccagcaggaaagagggtgaagcaaagaagagaaaaacccctgcattcatcccattggtcagaactcaatcacatgaccacagcttgctggacagacaggaggctgggaaatgtagtctttctcttcaggacatcagtatgtgccctcagaggggtaccataccccagtttgagaagtgctgcgttatgctctcttgtttaccagtcatggtctgaaccacatggcagggccagagggacagggcttggcttccctgagccgctgacctagcctttgttataacccaggtcctagtgatctgcagctccaagactttggcctttcatacccttgtaccattaaagtcaacagaaagacccagtgttttattttgccaggtaaggacattaagaaatacatttactcctactgtcagcttatgaaaggatattttaatacccctaaagcagaaaggtaggttttatattggaattaacacaaccactcactcaaaagtctatattgaatagcccaaaaggtggaaacaatccagatgtccaccaactgataaatggataagcaaaatgtgatgtatcccccattccaatggaataatatttgtcaataaaaaggaatcaagtactgacatatgctacaacacaaatgagccttgaaaatattatgctaagagaaaaaagccagtcacaaaaggccacttattataggactgaatgtacatgaaatgtccagaataggcaaatctatagagacatgaagttggctagtggtttccagggatggggaaatagggagaagtagggagtgaccactaatgaaacctactaaaatggatcactgtgatggttgtgaaattctgtgaatgtactagtaaatgggcaatttttttttttttttttgagacaggggtcacactttgtcacccaggctggagtgcagtggtgtgatttcagctcactgcaacctctgcctctcaggctctagctatcctcccacctcagcctcctgagtagctgggactacaggcctgagccaccatgcctgcctggctaatttttgtttttgtatattttgatagaggggggttttgccatgttgcccaggctggtctcaaactcctgggctcaaatgatcctccctcctcagcctcgcaaagtgctaagattataggtgtgagctgctgttcctggtcatgtgggcaaattttatgatatatgaattatacctcaagaaagctgttatgcactttttaagtaaatattttgagcacctctcattgtaccaggcactgttctagacaacaggacccggcagtgagtaacacagaccaaaaaaatgatatatccctgtcttcacggcgctgacattctcatgggagaaactgtaagaaatgaggcaaataagtaaaatataaagcagttcaaatggagataagtgctttggagaagaataaaggagtcaggagatgggaagtgagatttgaaagagagtgagcaggaatggcctccctgggggagctttgaacagaaactcgatggaaatgagaggagcaaaccactggggcatctgaggaaagaatgttctggagagatgcaatggcaaatgtgaagatgggaagctctggggcaggttctaggagcaggagggaggcagtgtggccagcagccacggaaggctctgggcagagaagggccatggtttaacttgtattctaggaggatccatctcaccgtgcatgctgagggctgggaagctggagaccagggaggaagggactgcactagtccgggcaaggtctctgccctcatagatttcacatttgggcagcagaggccatccagtaaagaaacaaatcagcataaatacagtgtcagatgctgaggacaagcaaacagcaggaggtgatggatgctgacacggagatggatgtgcctgtggccttggaggcagtcaggaaaagtctccaggcaggtggcgataggagttgagatcaagatgagagatcgcagctttgtaaagaactagaggaagaacattccaggagaaagagactacaaatccaaagaactctaaagaggcaaggggtttggtgtgctggagaaagagagcatcccaggaaggctgtggctgagtgagggggtggcaggagccactctgggagcagaccttgtcaggaagaggaggctgggctttatgctaagtgccctgggaagccatgagagagtttaagtaggaaagtaaatcaccatcatcctttaaatggaatcaatttagctttatacaaatctcattccattgtccctgttttttctcattcatttcatgatggaccagtgaaaatgcaaacacgttattggtctggcatttgggagtcatggccatttgagacatggttcagagtgtgtgtctgcaaggatgggagggtgatgagttggggaagagctggcagtgtactatcttattgccccaggaccttccgtggagcttcacagtggcctgggagagacaaggcaggtgcacccatgctatagttaggatgtttgacctttgcaaacctcatgttgaaatttgattcccaatgttggaggtgtggtctaatgggaggggtttgggtcatgggagttgatccctcatgaaaggcctggtgccctccccatggtaagaagtgagttctcactctagtagttcctgcaagagctggttgttgaaaagagccggtgcctcccttgcctctttcttgcttcctctcttgccatgaggtctctgcacacacgggctgcccttcccctttcagcatgagtggaagcagcctgaggccctcaccagaagcagatgccagtgccacatcttgtatagcctgcagaacattgagccaaataagcctcttttctctataaattatgcagccttaggtattcctttatagcaacacaaatggactaagacaactcacattatgcaaatctgggagattgacctttgggacatctggatccttgggatgaacagggtctgtatgtgactttatttcaggtgttctaagagctgaccactgcagaagagacactaattgattggccaacttcctcactagaagaaaccctggctttcttcagatattaggcagccttgtgctcaagaaaatgggcccaacctccaaatcaagacagggccaagccaaacatggatatcaggttccccttgccagtaactgggctagtggtggtcatgtgatccagtactgaccaatgagatggctgggaaaatcagtggggagcttctgaaatatgggagatgttccttcttcctccctctctgggagttgtcatgtgagaggctgagcatggcagccgttttgtgacgatgtggacaagagactctcacagaaatcaaacaaggaccctgagatagctaggctgttgctgagacaggtcctggcwtcacctacttctggattttgtgttaaatgagaccaataaatgtcataccttttttatactttactaagaagccacagtggacaagagcttgggttctgagtgggcttaaatctctgctgagccacttaataccagggtgatttgggggcatttctctgtgccccagcttattcacctgtaaaataggataatggataataataccgtctccctcatagggttcttgtgagcattacatgagtaaatattgtcattcatagccagcggaagaaacagaaaaataagtattgtaggttagtctcatacagtttcccagaggaaagagacattaactcagactatgggaggcagggaaggtgatgctgaatatgggctctgaaaggtgaataggagttcaccatgtggggtaaagaagatggctggggttggagaaacattctaagctgtggaaatagcaggagcaaggcctctgtatcagatatctcgtgctgtgtaacaaacaactccaagatgtagtgacttaacacaaaactattttattatttctcatgtctttgtggattggcgcttttggtttgtgttttgagatggaatctcactctgttgcccaggctggagtctagcagcatgatcttggctcactgcaacctccacctcctgggttcaagcaattctcctgcctcagcctcctgagtagctggaattacaggtgcctgccaacacgcttggctaatttttgtaatttttttagtagagacggggtttcaccatgttggtcaggctggtctcaaactcctgacctcaggtgatccaccaatcttagcctcccaaagt

SEQ ID NO: 95716 - DNA, 23132 bp, Homo sapiens
taggacaggaaacagattacttcagaggctaaaatgggcaggaatcatgcaggaaatctaactgaaggcagccgcaggtgaatggggctacatggaagacggaaagtaatgttaccttgaagcagccaggcacggtggctcacacctgtaatcccagcactttgggaggccgaagcgggccgatcacctgcgggccaatcacctgaggtcaggagttcgagaccagcctgaccaacatggcaaaaccccatctccactaaaaacacaaaattagctgggcgtggtggtgcatgcctgtaatcccagctactcaggaggctgaggtaggagaatcacttgaacctgggaggcagaggttgcagtgagccgagatcgcaccattgcactttagcctgggcaacaagagcaaaactccgtctcaaaaaaaaaaaaaaaaaagaattgctttcagagccaattatgaggccctcaagtaatgttaccttgaagcctaaccctgcctatgagctggcactaactaatgcatctgagctttaaaactgaaaccaggatgagtgaggtgaaattctaagggaactccactctgctctgtcgctttgacttgcaccatgctttacatttttatagtgaagtttagttatgagccaaactgcctgtgtgcaggaactaaaaaacacacgcctacaataggagagcaagaggccctccagcatggggaagggagaggtgggcggcaaagggctgtgggcataaggagaagagaaggcgaccccttggcttggctttgcccccctcccccctccccttttgttgacttgagctactgaagcttaagtactttaaaactgcaggctgttgtgacagtggctcatacctgtaatcccagcactttgggagctggaggatcacttgaggtcaggagttcaaggccagcctgggcaagatagcgagaccttgtttctaccaaaaaaacaaccctgtagtatgagggagaagaggagacgatgagggtgtggatgacgtaatctcacgagttggctggggaaaaggtgctgaggctgaactccatcagacacacacgctgggtggtcagtggtatggaatttctgggttcttgccctacctctctgcttctagccagtgatgtgattttgggaaggtctctccatctccaaaaggctcagttttctgagccttttagatctattaaatcactggagtagactacagtatataatgtttttagtccctatttcttctacattttctctctctcttttttttttcttttcctttttctttttctttctttttttttttttttttttttgagacagggttttgctatgttgcccaggctggtctcaaacccctgggcacaaagtgatcctcctaccttggctttccaaagcgctgcaattacaggcatgagccaccatgcctggcctttttctaattttttttttaattgaggtgaaattcaccaaatataaaattaattattttaaagtttacaattcggggtatttagttaattcataatgttatacccacctctatctagttccaaaacattttcatcaccacaaaagaaaatcctggacttccctctccctctccctctccctactctccctctccccacggtctccctctgatgccgagccgaagctggacggtactgctgccatctcggctcactgcaacctccctgcctgattctcctgcctcagcctgccgagtgcctgcgattgcaggcgcgccgccacgcctgactggttttcgtatttttttggtggagatggggtttcgctgtgttggctgggctggcctccagctcctaaccgcgagtgatccgccagcctcggcctccggaggtgccgggattgcagacggtgtctggttcactcagtgctcaatggtgcccaggctggagtgcagtggcgtgatctcggctcgctacaacctccacctcccagccgcctgccttggcctcccaaagtgcccagagtgcagcctctgcccggccgccaccccgtctaggaagtgaggagcgtctctgcctggccgcccatcatctgggatgtgaggagcccctctgcctggctgcccagtctggaaagtgaggagcgtctctgcccggccgccatcccatctaggaagtgaggagcgcctcttcccggccgccatcccatctaggaagtgaggagcgtctctgcccggccgcccatcgtctgagatgtggggagtgcctttgccccaccgccccgtctgggatgtgaggagtgcctctgcccggtcgcgaccccgtctgggaggtgaggagcgtctctgcccagccaccccatctgagaagggaggagaccctccgcctggcaaccgccccgtctgagaagtgaggagaccctctgcccggcagccgccccgtctgagaagtgaggagcgtctccgcccggcagccgccctgtccgggagggaggtggggggtcagccccccacccggccagccgccccgtccgggaggtgaggggcgcctctgcccagctgcccctactgggaagtgaggagcccctctgcccggccagccgctccgtccgggagggaggtggggggttcagcccccccgcccggccagctgccccgtccgggagggaggtggggggtcagccccccgcccggccagccgccccatctgggaggtgaggggcgcctctgcccggccgcccctactgggaagtgaggagcccctctgcccggccagccgccccttccgggagggaggtgggagggtcagccccccacctggccagtcgcccagtccgggagggaggtgggggggggtcagccccccgcccggccagccgccccgtccgggagggaggtggggggggtcagccccccgcccagccagccgcctcgtccgggaggtgaggggcgcctctgcccggctgcccctactgggaagtgaggagcccctctgcccggccaccaccccgtctgggaggtgtgcccaacagctcattgagaacgggccacgatgacaatggtggttttgtggaatagaaagcggggaaaggtggggaaaagattgagaaatcggatggttgccgtgtctgtgtggaaagaagtacacatgggagaattttcattttgttctgtactaagaaagattcttctgccttgggatcctgttgatctgtgaccttaccccccaaccctgtgctctctgaaacatgtgctgtgtccactcagggttaaatggattaagggcggtgcaagatgtgctttgttaaacagatgcttgaaggcagcatgctcgttaagagtcatcaccactccctaatctcaagtacccagggacacaaacactgcagaaggcctcagggtcctctgcctaggaaaaccagagacctttgtttacttgtttatctgctgaccttccctccactattgtcctatgaccctgccaaatccctctctgtgagaaacacccaagaatgatcaataaaaataaaattaaaaaaaaaaaaaaaagaaaatcctgtacctactaaatagttccggctgggcgcactggctcacacctgtaatcccagcgctgtgggaggccaaggcaggcagatcacttgaggtcaagagttcgagatcagcctggccaacatggcgaaactccgtctctactaaaaaatacaaaaaaaaattagctgggcatggtggtcacacctgtagtcccagctactcgggagactgaggcaggaggattgcttgaatctgggaggcagaggttgcagtgagctgaggttgcagtgagctgagattgcatcactgtactccatcctgggcaacagagggagactctgtctcaaaaataaataaataaaataaaaaataaatagtcagtccccatgccagcttctcccagtccctaacaattgctgatttgctttctgtccctttggaattacctattttagatgtttcatataaaaggaaacacacactatttgttcttttgtgtctggcttctttcacttagctagtgttttcaaagttcatctgtgttgtagcatatatcagtatttcattccttttatggataaataatattccattgtgaactacagtatttttttttttttttttgagacggagtttcaatcttgttgctgaggctggagtgcactggttcaatttcggctcactgcaacctctgcctcccaggttaaagtgattctcctgcctcagcctcccaagtggctgagattacaggtatgcaccaccatgcccagctaattttgcaatttttagtagagaaagggtttcaccatgttggtcaggctggtcttgaactccttacctcaggtgatccactcacctcagcttcccaaagtgctgggattacagatgtgagccactgcgcccggcctacagtacgattttgagctccaaaatgattgtctccttttcaatcatctgctaaacacagacataattaaaaccaattaaacaaacacaaggaaggtgtgaggtgaaatagtcgaaacgtgtgtccccacacatccaaggcagtcctttccacatctggggactggtacccagggtggcgcctagtggtacctgagatgattttagaaaatatactgggctgggtgtggtggctcacgcctgtaatcccagcactttgggaggccaaggtgggaggatcacctgatgtcaggagttcaagaccagcctagccaatatggtgaaaccccatctctactaaaaatactaaaaaaattagccgggtttagtggtgcacgcctgtaatcccagctactcgagaggctgagccagaagaatcgctcgaaccaaggaggtagaggttgcagtgagccgagattgtgccactgcactctagcctggacgacagagtgagactctgtctcaaaaaagaaaaggaaaaaaaaaaaagaaagccaatttaaagaaaatagtaagtgatatttggtgataagaagacttgagaaacgaagttgctaattgaatgactagtgattggaaaataccaactcagaccgggtgcagtggctcatgcctatcatcccagcactttgggaggccgaggtgggcggatcacttgaggtcaggagtttgagaccagcctggccaacatggtgaaaccccatctctacttaaaatacaaaaacttaactgggcatggtggcaggcggctgtaatcccagctgctcaggaatcccaattactcatgaagctcaggcaggagaatcgcttgaacccgggaggcagaggttgcagtgagccaagatcatgccactgcactccagcctgggcgacagagcaagacccagtctcaaaaaaaaaaaaaaagaaaagaaaagaaaagagaaaagaaaataccagctccaagactgcaatttgtcacacttactgtaaggccacggtgtgatttttatctatgtttgatgtggttgcttcaagtactatgctcaccactgaacacttggcttcattaatagacaaaaaccaaattttaaatttgtcycagttttcccaattttgggaagagaggccaaatgttagaccacacacaattccagcggatttcaggccaacaaagccttgatgtgtctagcccacttagcttattaacggactaaaactgcatttgtaattaattccatttcatacagaagccggaagtctctacctgaggctgaaataagaaagggatcctgtcacagaaatactagacacagtaatccacacaaggttaacaaaacagtgggaaatatggaaacaaatacctaatgccccgcctggattcgttcttttaaggttggggcgacagtaggaaaaccacgtgtcacttgcccaagcattcagccttaaagggaatttctccctcagggtctccaggaggcggggaggcggtggctcctccggccccgcccccccaccagcagagggcccgctcaccaccccgtaggccccgcccctgcgtctctgcccgccccgtggcgcccgagtgcactgaagatggcggctgctgtaggacggttgctccgagcgtcggtgagtggctgtcggctggggacaggcgtggagacactggtggctccgggaacgtgcttctcagacaggaccccgcgcttctgggcatgagggccattcgcccttcttggagggtttccgcgggtaacggacccagaggcctccctccgggaaggttccatgcgcctgcgcagaaccgcccttccccactccatcctcgcggtctcttccccgagtccctcctctttcggcgtccccggtccccaggcccatctccacttaaggtcctggccctgattctgccaccgaccctgtgatcttgggcaagcgccttcgcctttctcagactgtgtacttaagatggaaagaatgatgcctacatcaaggcgttgctgtgaacagccccttaaatactggataaaaacgcgcaaagtgctaaaaaactcacaaaggctttccctcccaatcccactcccgcgtgtttctgctgctgtttcctgcttaactgtgggcaatgcgtcgtgctcttttggtacacggctttctctggtggggttcaacacagcccctttcgttctcctgagtcattttgaacattaaagttgagcaaaccggcagagtgcggtggctcacgcctgtaatcctagcactttgggaggccgaggcgggcagatcacttgagcccaggagtttgagaccagcctggacaataatagtgagaccttgtctctaaaaaaaaaaatagccgggcatggtggtcagtgctcctggggaggctaaggtgggaggatcacttgagcccaggaggtcgagactgcagcgagccgagatcgcgccactgcactctagcctgggtaaaagagcgagactctgtttcaaaaaaaaaaaaaaaaagttgagtaaacatgtcccttgagcctttaacagactcccagaggctgaatttggctcttcttgtttacttgtcgctggtgctggaggggccttgtttttctaaggaaaaccttgaaatggtagaacatactcagcagatagtgctgggaaaagcctgcacaagtcccctggcttctgaaccctgtgttgctttaagcgcatggagtttctgattttttttttttttttttttgagacggagttgtcgcccaggttagagtgcaatggcgcgatctcggctctgcaacctctgcctcccgggttcaagcaattctcctgcctcagcctcccaagcagctggaattacaggtgcccgccaccgccgcctggctaagttttgtgtttttagtagagatggagtttcaccatcttggccaggctggtctcgaactcctgacctggtgatcaacccgtcttggcctcccaaagtgctgggattacaggtgtgagcaaccgcgcccagccggtctttgtgttcttatagttcctctccaccttccagtctcctaggagaaggaagcagaagggagtgttaagaacatgcagatccaatccatgctcttagagtttggggtttgctatttggttcacaggaacagggacagctgaaaccaccgttggcacgatgccctttcagccttcagtcaccagtcyaggaaaactttctaataaaaagtttctctttccaggttgcccgacatgtgagtgccattccttggggcatttctgccactgcagccctcaggcctgctgcatgtggaagaacgagcttgacaaatttattgtgttctggttccagtcaagcaaaattattcagcaccagtaagtgttatgtcatgtcttggctggagccaggtaaaggaaaaatgaaccatcgtctctggacaggggctctgaaccctggccaaacgttagagtcacctgggagctttcaggaacacagcactgcccccgtcccaccccagacaagttagtctgtggggtgagaccaggatgtgccgggtgattctaacgtgcagccagggttgagaatcactgaggcaaactgcccttgtcacatttccatgttggttgtcagagtttctaatccactgtgttgaggagggtgttactgggagctcagatgccttctgagtctagtgtgtctgaagagctgtgagtggtgggcagcctgtgggggacctgagagggcagctgctctaagattcaaacctgtgtaatggccccagctggccacttaggaaccagacctgcctaatggtatctgtaatctgagtgaaatttagctgtttcttgagatttacactcccttctctaggatatgggctttgctaagatcagcctcagataatgagtggtatttgaaaataccttgtctagatttgactagcctttgaaaaagcccgtatttaatatgtaatggtttgtggggatatactttagtaaagcctttgtttgtgggcaaaatgttctaagagctttcgcaattttactaccctggagcttcaaaatatttctagtagtgatgtgataccacaggcttaaaactttactccactggtttcgaatcctcatccccagcagcgcctcctgtttctgttcatggcggtgtcaggcattttgacattggaactactctgtcgctcattcctgggtagaagcaagtccttttcagttttgacacatctcttgcatccattcctttctgttctttctgccccatacctcccctcaatacgtctaagatcactgaaatcgaggctgggcacagtggctcacacctgtaatcccagcactttgagaggccaaggcaggcgaattacttgaggtcaggagttcaagaccatcctggccaacctggtgaaatcccgtctctactaaaaatacttaaaaaaaataagccgggtgtggtggtgtgctactggaatcccagctacttgggaggctgaggcaggagaattgcttgaacctgggaggcggaggttgcagtgagccgagaccatgccactacactccagcctaggtgacagagcgaaactctgtctcaaaaaaaaaaaaaatcactgaaaccacctcctaacatgtctcccccttcctcctgctcctctttccctcctgccggactaatcttcctaaaaacccccatctcagccaggcactgtggctcacgcctgtaatcccagcactttgggaggccgaggctggcagatcacgaggtcaggagatcgagaccatcctggctaacacggtgaaaccccatctctactaaaaatacaaaaaattagccgggcggggtggcgggcgcctgtggtcccagctactcgggaggctgaggccggagaatggcgtgaacccaggaggcagagcttgcagtgagctgagatygtgccactgcactccagcctgggcgaacagagcgagactccgcccttgactctgttatctttcctgctaagaagacccagcagcctagtatttaaggactgttgcaacatggccttcaaccattcctgcctgctgcctgctcttcactccgtacccttagacactctctgttctcattagactgccacacgctgctccacacacatgtcctgtcttccttcctgctgtttcctacatgccatctgccccatcccatctagacttgacaaaatctgaaccatatttaaaatccatctctagtctcatgtcttccttaattctatccctactttgtcttcctctttttagtttctgtagcacttggaattgaatttgtgcacaatctaaaactatagaaggagaaattacagttggccctctgtatctggattctgcatctgtggttggttgaatcgaaaatattgggagggaaaaatggatggttgtgtctatactgaacacaaagtcttttttcttgtcattccctaaacaatacagcttaacgactatttacgtagcatttacgtcgtattaggtattatgagtaatctagagatgatttaagtatactggagggtgtgtgtggattatatgcaaatcaccactttatgtaagagacttgagcatctgtagatttcgatatcctagaaccaatccccccacaggtggcaaaggatgactgtgcctaagatgtacagttgaaccgaatgttttgatttatactaagcactttatactactaattaattatgagaagtttaaataaaatcataggtgcttgacatagcaaatgatgaactccatatgagtgtgggttttttttcaggttcctcatgccatgcacctgctgtcacccagcatgcaccctattttaagggtacagccgttgtcaatggagagttcaaagacctaagccttgatgactttaaggggaaatatttggtgcttttcttctatcctttggatttgtaagtgtaatttctatgatgctttcgtgtcattctgagagcaagcacatatcctgttcccgcactgaattgtctatccctagatacccttgtgaaaggaaggattctttctgaccctttatcactgatggccttgttgattacagctgggatctgtagcttgtttacaagtgataaacttcgggggtggggtaggacagctttctttatagtacacctctgtgctctggagcactgcttccctaagccagtctatgaaaaagttttcactggtctggggaaaaatgagaaaagtaggcataataaaatgatttttttcaaaaagcaactttattgaactgtaatttttttttcttaaaatatgtgttccctttccccattttttgatacaattcctaaaaataaaaaggtgaggggaggtagtagtacttttgccagcacaacrctatagtccagtgaggatggtaaaccattttgccttttttacccttagcaagttgaactagttgttagaccactaattgttaaaatccttgtttttaaatgctctaatgagaatttctatcctttttttccagcacctttgtgtgtcctacagaaattgttgcttttagtgacaaagctaacgaatttcacgaygtgaactgtgaagttgtcgcagtctcagtggattcccactttagccatcttgcctggataaatacaccaagaaaggtatggcattgtacccctagcttttgctcttataaacttgcttggaagaatctaaatttctagctatgctgctggactatcaagatcaaattacgcaagggttgggtttttttttttttttttttttgagacggagcttcactcttgttgcccaggctggagtgcaatggcacaatctcagctcactgcaacctccgccacctgggttcaagcgattctcctacctcagcttcccgagtagctgggattacaggcatgtgtcaccacccctggctaattttgtatttttagtagagacggggtgtctccatgttggtcacgctggtctcgaactcctgacctcaggtgatccgcccaccttggcctcccaaagtgccggaattacaggcatgagccaccacacctggcctactcaaggtattttttttattattactcttccatgtctatgtttgagaaaattagcctttaaaagaatgctttaagaattagaaaaagcagccgggcgtgatggctcacgcctgtaatcccagcactttgagaggccgagacaggtggatcacaaagtcaggagatcgagaccatcctggctaacacggtgaaaccccatctctactaaaaataaaaaaaattagccaagtgtggtggtgggcgcctgtagtcccagctactcgggaggctgaggcaggagaatcgcttgaacccaggaggcggtggttgccatgagccaagatcgcaccactgcactccagcctgggcgacagagcgagactccatctcaaaataaataaataaataaataaaataataaagaattagaaaaagcatctgtagtcccagctactcaggagactggggtaggatgattgcatgagcccaggagtttgaggctgctgtgagctgtgattgcatcactgcattccagcctggtgacagcgagactctgtgtcttaaaaaaaaaattggaaaaggtctatagtattagccgggtgtaaatcttccttctgctcctttctagctgtgacctggaacaagttacttaggtttttcttgcctcagtttcctcattttgatagtgtcttctccagggtggtttcgaggaggcagtaggttaatagagtaagcagtgcttggcccgttgttgaattactgttacctatcgccgttactgttggtctcaaacattgtggtacgtggtcaagaatgttgtgaggccacacattctaacagtcatgtttgcattttgattagaatggtggtttgggccacatgaacatcgcactcttgtcagacttaactaagcagatttcccgagactackgtgtgctgttagaaggttctggtcttgcactaaggtaagatcctgtttctgatgaacttaagattatttttcatgtttagtatcattctgcttcttaggggatttatgtagaccttggtaaagcatttttaaaaccagaagaycctggctgggcatggtggctcatgcctgtaatcgtagcactttgggaggccaaggcgggaagatcacttgagttcagaagttcaagaccagcctgggcaacatagtgagacctcatccctattatattaaaaagaattaaaatttataataatcaatccttaattttagtctttaataaacactgataaaatgcctcctgcaagggttggcggtctctcagaaatgctgagacatgcatgtcccctccaccaccttgggtctctttctgaagaaggctggctgcgtcttgaggccacactgctccatactccctaactatgtgggagccacttccatggggacacacacctgacattgaagccatcagactctgcagaaggggggactagcagggtaagaggtagtctcttggaatggtgaccatcttcagccctggaaccaaacaatccttggtttgagtttttcttttttttaactcagctacttaatagctgtgtgactttgggcaactgatttgatttaaccttgttgagccccagttttcccataactaaaatgaggtggtacgtcacaggtgggtgtgaggattaaatagtgacacagctagagtttttagcatagttactggcagcagttgttaggatttctgccccagaacatcatttctatctgtattcagtcccttattaaacctttattcctttgagtgtgaaaagctttcagtcctcagcagccccacattcaaacataaccttcctgggagggatgagaacttgggtcttagaattggcatcttgaagtctgctgagaataggagtgaaggagggatagggcagaacttgacctccaggaaggaagagaggggatccccctttgatgtgctgtgcctcacagttttgctgggggctggtcagcttaaagccagctcacctggccgggcgcggtggctcaggcctgtaatgccagcactttgggaggccgaggcaggtggatcacgaggtcaagagatcgagaccatcctggtcaacatggtgaaaccccgtctctactaaaaatacaaaaaattagctgggcgtggtggtgggcgcctgtagtcccagctactcgggaggctgaggcaggagaatggcgtgaacctgggaggtggagcttgcagtgagctgagatcgcaccactgcactccagcctgggcgacagagcaagactctgtctcaaaagcaaacaaacaaacaaacaaacaaagccagctcacctgcctgtcttgtaggtgacctctggcctgctctttcttgggttacaccttgggttttagcgctgagtggcatcttagagtttgggcctttttttcctctctttttttttttttcttttcttttcgagacggtgtcttgctttatcgcccaggctggagtgcagtggcgtgatctcggctcactgcaacctccacctcccgggttcaagcagttctcctgcctcagcctcccgagtagctgggattacaggcacacgccaccacgcccggccaatttttgtattcttagtagagatggggtttcatcgtgttggccaggctggtctcaaaactcttgacttcgtgatctgcctgcctcggcctctcaaaagtgctgggattacaggcatgagccaccgcacctggcagaccatttttttttttttaaactttaaagagattatcaaacgaatgcctaggtctttcagaattgtcaatggccagagaaagggtactggctatttttctcctacggtccctttccctatgagaactcactaattttgcagttacctctgtacccgttttaatattgagattaacaagagagagaagctgagtctggcttataagataaagacttttgggagtctatgggccctgctctgtcccagctctgcctcaccttctattggtggacttcagctggctgcaccctctgggaacagtttcacctcaaaccccaggctcccagtgcctgacccagggagggagaagcatcttttatcctgagttttctctaacctgccttttccatgagtgattgatacctgaaatttccacatccttttaagacagactgttaaaacctgtaggttaaataaccggacacagtgacacacacctatagtcacgctacttgggagtctgaggtgggaggatcagttgagccagaagttcgaggctgcagcctgctgtgatcacacctgagaagagcactgcactccagcgtgggcaatacagtgagaccctatatttaaaccaaacaaccaaaaaaacttctaggctaaacatatctgcatctgtcacagtaacaccaacacagaagataaacacagaccactgtggtagcgtggttcatctcattacatgctgctacatgattaaaagtgatgggcatggttttctgttttgcatagacttagagcctgtacattctttctatgaagatttttcccgtgggatttccccccatttacccaataattcattcataataaacagttgttgaacctagataaaatacacctctgtctcttcccatttgcctataagtttcttgccaagatgtgatacagcagctcaaagaatgcttgccaagtcactaatagtctttgctctctctagttcagtgactttccgatactgtgtaacattcagggcactatgtgaacttgtaagtgtgaccatactgcatgttttatggtgacctggtccagtactgcctttgttaaagcatctgtcatcagtaagagatgataagttttttgcacaacagtgaaaaccccacctttaagcatatgattacgcttaataaatattttattaaaaggaraattaaagacctaaaagggaagaagttagactgttctagttctggtactgttgaggcactgatgaggataaatgatcatgcagaggtctcttcataattgaccccaatggagtcatcaagcatttgagcgtcaacgatctcccagtgggccgaagcgtggaagaaaccctccgcttggtgaaggcgttccagtatgtagaaacacatggagaagtctgcccagcgaactggacaccggattctcctacggtaggtttttttccccaaaagcagtgaggtccatgttctctcagcctcgagagctattgacctgaaatatccacaaaagggagcccactcttgaagcaagcgtgcagatgatatgcaaatgggtgaagctgctgtggggtagagggggtggggtggggagccaggaaccaattatcagagacaggcaggcctttttttttttttttgagacggagtcttgctctcgcccaggctggagtgcagtggcgctctctcagctcactgcaagctccgcctcctgggttcacgccattgtcctgcctcagcctcctgagtagctgggactacagggcgcccaccaccacggctaattttttgaattttagtagagacggggtttcaccgtgttagccaggatggtctggatctcctgacctcgtgatccacccgccttggcctcccaaagtgctgggattaccggcgtgagccaccgtgcccggcctagagacaggcaggccttaatgaaactttcatctttatgttttaaaggaaatctttaaaagtttaaagaactttaggttaaaaattgggagattgccactcacttttgggactattattatggtaaagtcacagttacctaattaagcttttgtattttcagatcaagccaagtccagctgcttccaaagagtactttcagaaggtaaatcagtagatcacccatgtgtatctgcaccttctcaactgagagaagaaccacagttgaaacctgcttttatcattttcaagatggttatttgtagaaggcaaggaaccaattatgcttgtattcataagtattactctaaatgttttgtttttgtaattctggctaagaccttttaaacatggttagttgctagtacaaggaatcstttattggtaacatcttggtggctggctagctagtttctacagaacataatttgcctctatagaaggctattcttagatcatgtctcaatggaaacactcttctttcttagccttacttgaatcttgcctataataaagtagagcaacacacattgaaagcttctgatcaacggtcctgaaattttcatcttgaatgtctttgtattaaactgaattttcttttaagctaacaaagatcataattttcmatgattagccgtgtaactcctgcaatgaatgtttatgtgattgaagcaaatgtgaatcgtattattttaaaaagtggcagagtgacttaactgatcatgcatgatccctcatccctgaaattgagtttatgtagtcattttasttattttattcattagctaactttgtctatgtatatttctagatattgattagtgtaatcgattataaaggatatttatcaaatccagggattgcattttgaaattataattattttctttgctgaagtattcattgtaaaacatacaaaataaacatattttaaaacatttgcattttaccaccattaactgttggatcagcttattttgggctctcctttccttctcagattatcaacaaacatttattgagcatttacctcaggggccacaaagagaataagatgctggttccgcactcaaggaactcggtttaggggcaagacagatagggaaacattttctcgttgtttcagtaaatccttgagtgcctaccccgcaccaggtgctgttttccaggcacaagagcgaacaacggacaaacccctgcttttaagctcttacattctagaggggaaacacctcatacatgtagtaaaagtagagtgtttggaaggaaaataatgtggagtgaaactgctgaagcggagttgtaggtgttctagatggggttgtcaaggaaggccttaagggagagcctctctggatcaattttctcattgtaaaatgaggacaataattgtacttatctcagggttttgatgagcatcgagggagagaaaacgcgtagaaagtgagagtattacggggataagagacttctaggcagagggcagggaaaacacaaaggccgtgaggcaagagtgggctcagagcggatgcagatttactaggaggccggtgactatggctgtggtgggggtcccagagtgccttttggccaggccaaggactttaggttctgttctggggtggggaatgtcaggaaggatttgaaaagaagagtgacatcaacttgttctaagagaatcactctggctcctttgttaagacgacatagcagtccaaagtggggaagcaggccagcgggctggctttgtgacatcctggagggtagagacaacagaatagaacagcacgctacatactgcactggtgcttagatggatttctgcggcataagggtagaagtggagggggcaccttactcaactcggagggtcagggaaggcttcctggaagaggagataaacccctggaggttaagaaaagtgagctaggcaaactgagcaaatacagaagcagagtcatacaggcctgaaggacgccatgagccaatttcctgttcctggaggcgcagggcaagggaaggaattggcccgctggaggttaatggccaatactgagcacttctgagggctcagtgctgtgttagggatgttttatctcctttgatcagaaacaaaaccctgagataggtacaattgttatcctcattttgcggatgggaaaatagacttcgagatactgacttggcgagggtcacacaactagatgatgtgctgggtcccccagtcctggactccggaggccccctgaacgacctaggcacacttgtggcttccgtgaatttaagtgcacacagcccccgcctggccctgtgctggggaagggcaggtgggaggaggaagggaaggcaggtttttctttacaaatggtacctatttggtagtcaacaaaaggaactggatttgccccaacactggaagaaaaaaaaaaacaacctgttgggctgagggatagtgcactgtgcccagggccctatacttggtttgatgctctggtgttactctcttgaaattctcagtaacatgaataaggggcaccgcatttgacattttccctgggctgagaccatgatgcagccggcctgactgcgcaacaccatgcacactggaattcgtgggccatcggagggattttcgagggtaatgaccaggggtagggcgcggcagaagcgcagggtgaggttgcggacggcctcactcacaacctttccgggtcttcgcattaggtactgtgatgacgggttccgatagtgaccccttggggcctggagacggcccggctccccaaaggtgcggagcagggcaagcagggttgggaggacgtggcccgtgggagagctgcgctcgccggaacagtgggcgcgcaagggccccgaggcgctgtgacacgggacgtcgggcgcgcgggcctggggcgggaactgcgggtgcgcgcggcccggggcggggctcgccgcccggctcctcctccacgcgcggcctggcggcggcggccactctaaccagcgcaaaatgtccctggaacaggaggaggaaacgcaacctgggcggctcctaggacgcagagacgccgtccccgccttcattgagcccaacgtgcgcttctggatcaccgagcgccaagtacggcccgggcccggcgcgactaggggcagggagggggcgggccggsccgcgtggagtcgggctgacccgggtgaccttggccaggccacgtgggcgccccctgtctccgtttcctcctctcggagttgtgccgggaacgcgcaccaccggccttcaccccttagggcgcgggaggggacgcaggggaaatcgaagctgccagatgcccacgaccacaacgtcaccctccagattgccctctcggaggggcccagtccgcgcaggtggctgctccctactgcctgagctgtggctgagcagcagattggggagaaacaggctctcgcaccttggtaagctcagccactttcggtgagacccccgaggctttgggaagccacccttgggcaggacataagcaggacttatctccctgcagcgtctagggcagcaccgtccaatagaaatatgatgtgagccttacaggtaattaaacattttctagtagccacattaaacaagataaaaacaaacagctgaaatttttaacaatacagtacatttagcctagcaggtgcaaaatattaacatttcaacatgtaatcagtaaaaaacattgctgagatattttactcgcttttttggtacagagtgttccaaatccggcgtctgttaccttcgcagcacatctgggttcagccgcatgtggcgaattggagagcagggctttagggggttctctttgaggcctctcctaaagtggggtccagccctgttttttttttaggtggggaaattgagaaggggcggtgagctcaggttgctccagcagagccaaggcttaaagccagaaccactacaaagtttagagtttgctggagcaaacctctttttccccagtgtgaccccagctgcaccattgagcccttaatggggcgtccatcctttgtcactggagtgaagccttatagcaagcagagagtgaggccacagactcttgagatattctaggccattgcttcgaggtcgtatgtgagatatgaacgtaagaccatttgaacccccaaagtctgggattttaaccctcaagggcaatttgatactgagaggttaagggcacagacttctgaatcatttcctggctgtgttgccttgagtacattcaggagtccctctaagcctcagcttcctcacctggagaacctggagaggttgggaggatcccaggagatgatgccagtaaaaggcagatcacagaccctggcaggttctcagaaaaaaaaaaaaaaagccaactgttagtatttatatctttatttttctgctgccattaacctctctgttgcttttctccctcctaagtcctttattcgacgatttcttcaatggacagaattattagatcctacaaatgtgttcatttcagttgtaagtattgttttcagagctaatgaatttcacattttattttgaaacttgaagtctgtgtgtcccttttttttttttttttttttttttgagacggagtttcgttcttcttgcccaggatggagtgcagtggcaccatctcggctcacaagaacctctacctcccaggttcaagcgattctcctgcctcagccttccgagtagctgggattgcaggcatgcgccaccatgcccggctaattttgtatttttagtagagacgggggtttctccatgttggtcaggctggtcttgaactcccgacctcaggccctgcccacgtgtcccttttaaaagcagttgaaataacagaatctacatatattattgtgtttattccttctaaatgagcttgtcagattggaaggggtaaggaaaagcgtacatctgaccgtgtgccgtggctcatgcctttaatcccagcactttgggaggccgaggtgggtggatcacctgaggtcaggaattcgagaccagcctgaccaacatggtgaaaccgacgtctctactaaaaatacaaacattagctgggtgtggtggcagacacctgtaatcccagctattcggaaggcttgaggtgggcgaatcactttctgaacccaggaggtggaggttgcagtgagccgagatcttgccactgcactccagcctgcgtgacgagcgaaactccatccccttcccccagcaaaaaaagaaaagaaaagcgtacatctgtttaacaggtaatatcaggcccaggccaggtgctggggattcagagagaatcaaacaaatcttccacgtgatggaggacagactggctaaactggtcacatcctgggtgacaagagtgaaactccatctttaaaaaaaaaaaaagaagaaagaaaatgtaataaaattagaagcaaatataaccagatgtttacagttgttaattctgggtgaggggattatagtgtgtagccattctttgtaatttttgtatttattttttctcaaattaagaaatggaggctggctgtggtggctcatgtctataatcccagcactttgagaatctgagatgggaggatctctcgagaataagaatttgagaccagcctgggcaatgtagcgagaccctatctgtacaaataaaaatagaaagttagccaggtgtagtgggttgtgcctgtagtcgcaactatttgggaggctgaggcaagaggatcacttaagcccagaagtttaaggctgcagtgagctatgatcacaccactgcactccagcctgggcaacagagtgagaccctgtctcttaaaaaacaataagaaaagaaagaaagaaaaagagaggaaataagactgaactgataagacatggaagtgggtgagggagaaggacttctaggtttctgacatgtatagccaggggatggtggtaaccattcagtgcgacagttgacatcagagagtgggggaggtgacagcaccattgggggcagctgctggagcatctaggaagaggaaggcataaatctgaatggcactcagggctatcctaatggatagagagcctagggcaccatgtggcttgaaatcaggcatgcagtcgaagtccagtgcatgctggtgagtgagctggtgattcctacctctggggataaacctgaacaatgttgagatcattacttgattacttgatatctgattttaggaaagtatagaaaactcgaggcaactattgtgcacaaatgaagatgtttccagccctgcctcggcggaccaaagggtatgtttcacgtgctcaggtctggctggttgccctcagatggttctgcctgcatggtctgaagtcaggtggaatttggccattaatctctgtctccgtctcttttctttcttttttccttcccttgggagccactgttctattggctattaatgctgtcattgttatatactgcccagaggaccagctttgcaaaactgggttagttttttaaatgtagttagaattctgtcccataaaccagacagcaagtttcctcctacacagtggatatttgtggggattccctgcagctgattcctggagcccagtggcaaaccccagaattcagacagggctctgacgtcagaattcattctccactgcaggcagcgttcctgccgataggctcaaacggactgttccttatctaccttgcagtatgtggggctttctggagctcacaaacaccagctcctcaagacagcctatggagagctcacatatttaactttttctaagaatgtgctggggaccctgggctgacagcttggctctgttgcaagtaacttgactgatggcatggtgtgtcatcagcacacagcctgctctgctctgagccagaggcaagccggattcggggactcatctgagggata

SEQ ID NO: 95717 - DNA, 44717 bp, Homo sapiens
gttaggcagggacatctttaacttgagctatttggacaacttttttttttttttttttttttttttttttgaggtaggtcccactatatcactcaggctggtcttgaatcattggtctcaagtgaccctctcacctcagtatttggacaattgaagctaaatttttcattaacttggtttcttccttcttttctttatcttctataatttcggtcttcaaatgtgagattgcttaccaggcagcttaacatttctttagtcagtggagttgcatcaagcactggactctgagagaactggaaaccaacaaagtccttggcctatttggaattcaccttagcaaaaaacactaggaaatcagataaaatgcctgagccatccccgcaaattgaactatcttctgagggctagggagttgtatgttgaccaattgttaaaattatgtcctaattccagtttttcatcatatccagcaattcaaaagcttctgttcaagagaagtagtagataatagggatggtaatgggagttaaggcatgctgcctgtgtgtgcacaagaaaaggaagaaaataaaattagcatactatgacaaaaatatacaaggagatataggtatcttgagattctgaattcaataatgtgatcagagaagctttcataaatgtgctggctatgaaggcatatctactggagaaatctttccaaagcacaaatctgatcatgccctgcccctgcttagaaccccacagtgtctccctatggcccataggataaagtccaagccctttgatggcatccaagtcctccacaatctggactctgctcacctctccaagcttacttcctgccgccattcctctcacaacctaggctctcgccattttaatcttctggccagtcctccaacactcagtttgtttctgtcctgaagaccttacccatgtgctacttttgcttgcatcctcctggtcctgcctaacatgctgccattccgtgaactcctaaccatctttcacaatcccagccagggaagcctttcccactctgcagacagagctggccacttcctccttcatgcccccatgaaggcctgcatatatgcagcacctctcactgtgttactaatatctctttgcatgtcttttttttatgccagatggtgagctatttgagggtagagaatgtgtcttagttatctttatacaacagcaacaagcactgtgctaggctcagagtagatattcaataatgtttattctgattttttgcatgaactagttcttacttctgttaaatactatacactaccagagttaaggattggagtatgctctttataagagggggaaaaaagggggaacccttcttaggggcttatttgtaagagtccacatgtagaggtcaccatcgccaaaatggaagcctccagagtaaaacataagctgttaaaaatgaattgagctggttactatttttgcacctgacctactttttggttacttctgctgttgcaaaaacttccattcttataaatgaaccaaaccactttttgatggttttgtattctctcctcttaaggtagctttttactgaaacaaaaatctgcacagtctctgaaacccagctttaatgcaaaggcatctatggaagagtattattcccagtaggaccaacttccaaagaactctctcaattgtttttccatggaagagtttaaggccaagaatagcaaatctatccaccacgatgatggcacttatttccttagtgcttgtggttgtgccccctggagagcaggaagggttagatgccagttacctcccgccacctcttcccagctttgggcttgccctttctgagctgtaaggctgcctgaagctgtgtctctgctggttggatgaagatgggactctggcagtggaatatttttcagtccagatcccttctttgttaccatttgattttcttttttttttttttttttttttgttgcaatgcctcggtagttgttgatttgcagaaaacaattggtgagtttttaaatgtaggatattgtaacatcacatagtgttgtgaactagggtaaggggagtagaactgtattggcagagagtgctaaaggagaaggcagaatcctggctcaggatctggtataaaacacacaggaaacaactaaagaatcctttattactgctttatttacgaagaccgctattaataacagcaaattatttaaagggcagctgggttaaaaggatgctgagtaaaacaccaaggacttgattctgttgtggttggtgataacctacaatagttaccaagtaaatgcagactctttcaaatttcccagtttcccagaggcacaacctgaagtcttcaaccaccactaacaggagaaaatatgtttaaaagaatactaaggagctttcaaaaggattaagaaatggctcgggggccgggcgcggtggctcacacctgcaatcccagcactttgggaggcagaggcgggcaggtcacgaggtcagcagatcgagaccatcctggctaacacggtgaaacccagtctctactaaaaatacaaaaaattagccaggtgtggtggcaggcgcctgtagtcccagctactaaggaagctgaggcaggagaatcgcttgaaccaggaggcggagtttgcagtgagccgagatcgcgccactgcactccattctggggcgatagagcgagactccgtctcaaaacaaagaaaaaaaaaaagaaagaaagaaatggctcggctgcgctccattctggggcgatagagcgagactccgtctcaaaacaaagaaaaaaaaaaagaaagaaagaaatggctcggcgtggtggctcacacctgtaatcccagcactttgggaggctgaggcaggcagatcacttgatgtcaggaattcgagaacagcctggccaacatagtgaaaccctgtctctactaaaaatacaaaaattagcctggcacggtggtgcgtgcctgtaatccaagctactcaggaggctgaggtacaagaattccttgaacccgagaggcagaggttgtagcgagccgagattacaccaccgcacttcagcctggacaaaagagtaagactccatctcaaaaaaaacaaaccaaaaaaaaggtaagaatggagagtctgggaggaaaagttataggagtcagaattatttgctgacagattttgatagtcagcaatgcacccagaactgtgcttttaaagacaggtgatatgtctgctgctgaacagaagaaaaggaaatagatttgcaatggaggcacagagatttgcaatggaggcacagataatggctagggggaactttgaatgatgaagacagttgactttaaagcagcaagagtggctttctgggtaacgtggaaaattctggataatgtgggaaataggtaaaggataaagatgcatgcttatgactgtttccatgctaactcgggagcacacaaagccaaagaaaattctgtccttccagatctctagctcatagatccccaaaatttttgtgtcctatggaaaatgctaagttggtgtgggctcyaactcatattttaaagcctttaattgcaatgatgtgtttattcaattcagcaaatactcaaagtgctagcgttcttggctcaaaaaactgacttgcatcatatttttcatacatctgctgactctattcacaatgactggagcaaccatccacagttgtgatcaaattctcctcgaagctatccatacttggcagccttaaggtctataaatgctgagtctccaggccaatcagtttaactgtgccccaagttagaagcttgaaaagagttgataggataagcagcagacagaatagagagcctttgctttcttcaccctctcttctagaatccaaatttgtcccctgcactggagttagaaaagctacctgaaagtcttgccactattcttggaatattcaataccaattactccctgggcctcagtttcttcatcataaaatgagggagcttgatgtttcatctataaggtttcatttcattcagaagccactcttccaagggaagaaaagaaggctttttyttaaaaaaaaaaaaaaaaaaggacttttcctcctttgcttacccattttccaaggtgtctctctcatatctgagatttccttctgcgcctcagacttggtcatgccttacctttttctttacctcaaagacttgtgagaattcaagggcactgtgcatctgaaattactgtgtggcatcaaaagcaaaatacagatttaagataatgtttcttatattttttgccctttcttcacaccggaacacagctagaactctgggatcctcctgaaaggaccttcagcaattttcagttgccaaataaatagctctagatacaaagggaagtgccttgatctatcagggttattttgttgagtgaatgaatgagaattttacttatgaggggagaaaaaggagatcagctggcaggagaaatctacgttgttccgacccgtgctttatatatttagttgttgccgcggcacttttcccattcagaccagggcccaaggagtaattaatctttgtttttatttttatttatttatttttttgagatggatcctcactctgtcaccaggctggagtgcagtggcgccatctcagctcactgcaacctccgattctgtggttcaagcgaatctcccgcctcagtctcccgagtagctgggattacaggcatgtgccactacgcccagctagtttttttttgtatttttagtggagacggggtttcaccaggttggccaggatggtcttgatctcctgacctcatgatccgcccgcttcggcctcccaaagtgctgggattacaggcgtgagccacagtgcctggcccaggagtaattaatcttaaacaagctatctttagcaagcaaaagcatcttacaaagtacagtaactgaggctatcaagcatgtaaagaaagcattttctagaagcttagagatggatccccgaacactctgtaaccctctgttaacagtctaaggaattctgttctgaatttgggggctcttctccaggcagtcagggttttgaattctatttacaattcctctgctctctatggcctagaatgattgaaccaagtctctagatcactgtaggagacatcaacctttaacaatacattcttgaggagaagagactcgtgtaagaaactatcttgtaagaagggatgagaattaccctaatgatgtaactgacaacacagtttctagtttttcctttctttccttccttctccattttttccagtttcatatccttgtttgttcatgctacatgaatacttgaagttgatagagttggctttaacttaggaacctttgcttagaaagtcaatatcctggcctttcccagagtacttgacttcctgcaaaccttgttaataatactttgttttttaaaatgttggagaacttcagccattgcagcctcttgctaagaagcaaaagctataatgacagagaagccccaaagtgcagtggaaccagggatctccggggagagtggtggtttcctgggcccccccagagaacccaaggctgtgctggagatgctgccgtgacaggtggaggcgtggagaggcacctggcaagtcctcaaacgcctcccccttgatttagctcctctagctaaggatacgcattcctttgggtttcaggtttttcttccctaaaaagagaatccccaaactggacaagcaggttacattcacacaatagcgtgaatgaattcgctggtcgcccttcagattctcattttggaatctcgaagaaagagaggtggtgggaggagggcgcttgaaacttctggcgatgccagttcagatcgattccagctatgacggagcgggaagtggataaagaggaccccaagtcacaggaggcactctgagagcaccaagcgcccggggaggccatccgcaggtgggcgcggggcctggattccacagaggggcggagtccctcagtcaggcgctggctgcaatcacacccgagcgccagccccctccagcatccctgagtcccagaggagatcgccgaagcgctggaaaagccgttccgcccacgacttctggtgccgggtcggcggcgactgggggagcccagttccgagaccgtaccgcacccactgcggacctcctgggccctacatagtaggcgggtcatgcagggcagcgggaggaggggcgtgggagggccaaggccgccgagtccccgctgttcagccagcaggagcgccccgcagccctcccgggacacggtggacacgcttgtcccagacctgggcgccctcctgccgggagccaggactggccgcagcaggcgctgtccgggcccgtgggcggggtttcgggagggggcggagccaggcccacggccggtgtcaggttgctccggtaacggtgacgtttcgcggcgtgggcggggccagcacgcaggttgcatattttaggaagtgaggaggaggcgcgggctggagctgcggcggggtctggggcgcaragcagcggcgggaggaggcggacacgtggcaacagcggtagcagcccgggcggcggcagcaacagcggcggcggcatcggcccgagccgccggccgccctcccaccctcccgccccgcggcagccctagctccctccacttggctcccctggtcccgctcgctcggccgggagmtgctctgtgcttttctctctgattctccagcgacaggaccyggcgccgggcamtgagcaccgccaccatggggaagggggtgagtgtccggcgcgcccggggagggggctcggggagccctcgaggggaagaggaggaagtcgggagggcgaccgcggccagcgggaggcggcggaggaggaagcggcgccgcgtggagtgggctggcagagccgcgcggcttaaaagacgacgcagtttggaaatggagggagcgcagtaacggggggcgggggaagggagcgccgaggggctggagcgcggcattgcttaggggggtgggcggaccctgggcgggggctgcgcgccccggaggccgagcgggccgggggctccgagaggcggtgcttgggaagcctcggggccgggaggagggggcttgcagcagcgggggcggccccgggactgagccggcatccctgagcctggctcccctccctgcgaccgccgtcacctccttctccttccttttccctccgccctccgtgccctgaggaaaggcgcgctcctccccttcccctggggcgctccgccggggcctcctcccgggcctccgttcccgccgcggccccggttccggcgggggcagcctccgggttcggggctccttctcctggggacgctggggcttagcttgctccgcgcagaggcggccgccctcccccaaagaaaaaactggctgcttctaagtgcgaagccggctgggcgggctggtgccagaaagggtgtgtcttcactgccctaagatggcctttaaggtatacttttgagggctttcttgggccactttccgtaaacacaggatgcaccgatggcaactggagttgtcatccgatggtggggagaggcgtgcagattttttttgaagggacgagccctgaaggaggataggcagacccaccagggcctcagggtacaagaaacccgaaaaaggactggaggctgcaggcaatacggtggtaggaatctctgccggtttccagcgtcgcggaagcaccaaagggcggtccctgaaggaaacgaggggtcttggggctggagagcggcgcggagcgtggtgggaatatcgtcacaacgccgctgtcctacatttctgtagcgaagacttgattacccctagctattacccgtgcaggagactgggccctggaccccaaatgagccaaagtctagttgagaaaaatttacacagaataacctcggagttcatggggtgaaagtgaccatgtcatgagaatacaaatgggagagaatccacttcgttgtctccagggtttagcacagtgcagacactgagtaggtctttgaaggccctgaggcttctgggtgtagacagagtgtcgggagcagagggaggctgcactccttggggactctaagggagttttaaaggaggtaattgaaaggcttggacctggtggggagaacaggcacaagtggaaatgcacaactcgcctcgcttttaaaagcatgcagcgtggagggctggtccaggtcaggtggcatcaaagagcggagtacagggcctctccattcccctgatggagtctgggttagtggcctgtgcttttaccacaccgtcaaacccttgatcatttctgtaaacatgcactttaaagctcattctttgtctctcctgccttaaaagaaaaagaaaaaagtttacttcctgagctaattttggggggtttagacatcacagatgtgtgccccaagcctaggaaggtgaagtgacttgctcaaggtcaaacggttggctagtgacagactaggcgtccctgattcttgaacagcctgtggcctcaagcctgaacatgcatttactctttaacattgagttctttatacagaactcagaacttcggatgaaacggggtatttgtgatgttgaattaataggccatggagatggtttgggtaactaagttatgtccatttatctagatgtctcctttataaccacacacaggcacacatgcacagtagtgatgcggtggtaacccacctgaatagttagtagagcttaaacccagatgtcttacaacaaaatgtatagtggctagcaaacacaagattaaattacagctgcgaacactgggatgatgagctgcttggctgctgggtggtagttagcattttgagtattctgatacattaaacattagtttacttgtgtgtgtgtttgtgtgtgtgtttgtcctgtgacttattgtgagcgtccaaatgttcagaagaatatttcatgttgggatttttccacatggggattaaaatgtgggyggagagtgactaaagccctgctgataattggctaacaaggaagcctgtgccggcagctaatttttaaggtcattgtaaatttcttcccctcctctcctcagtaccctttgtggcctagcttttgatgatatttcaggtgattttatatgtccttaaaagtctagttcctaagcatttggtaagaaaatgaaagaacagctcttgctgaatcattcctggatgaaataggattttgtccctttttttctttctgggttttattgccagtgacttggcttaaaccgtcagctaggcctaccaccggcaactgtttcactcaccaaaggtacacgccataactgtttagaaatgtgggaaagtttgtcttctcaagtgtgtaaaagatgaggagggggggtctcaccaggtctttcactgcattccggatttagtttgaatattatttaccgaaaaaataaatcatagcttatgagtagtgatttaaggaagggcagggaaaaaaggttccagtgaaggtggcaggggggatgcacatgtcagcagaaatcctggttgtatggtaatgttatcagctgcccttttggagctcagcttgaaagtgtgactaaagctcctctggctgctataaagctagtactttagacttaaagcattgtaaggcagatgcctcagagtggaaagttgcccgggcctggccgggagctagtggagcaagttacaggaagaactagtgcctagagctggggggtggagagagcacttgtgcctcaccctttgcctgtcagttgttcagcgtgtaacagttccctgcttcttaggttctttctgtacccttttataagggtgtatccccttttggtaacttactgtttgttaatttgtagtgttccctgccagtaagcttgtaacactctagtgactcaccttcgggtgggagggtaggaaagggagaggcctgcctcctaaacctgggaagatggggagagagtggtaaacctgagagcccaaaaaacaaaccaaaacaaaaaaacaaaaaaaaagatgcctttaaaaattcagttagatgtttgcccagatgagggctaacacttaaaatatacagattcctgggaatgttattcctaaattgcattyaaaaataaaagtgaactcaacatcttatagcacaataggcttggcactcatccatgctccatgccagtaccctcagtcattgttttcggattattttagcaacaaatgaacagataagtgactttccattcaaatcaggctatgttcttttaaatatatctaaacttaagaataagaaaggctttaactaaaatagctttgaaggattttgtatggtaaagtaaaattggtttcttcacttaaaaacaaacaggtttaaaagtaaaataaaataaaagccctgaagcttcagtttctcatctggcttttggatagaatgctcatcctggggatcaagtgaagtaatctatgttctgtttatggaaggagtgctgtgccagcctgagttgtggctattgttattgggcttacataggtacagtaattagagccaagagaagatcaaatctttacagactgggtttgttgttcgtcagtaagtcattagcccttgcaaaattagagagcagtttttctttcaccatgagaacatattaaggtttgaaaataatgggaaatactgttaattgcccttcataggaaagtcaagtagaggtgtcaattgacattattgcaactgttatcttcgctcaacaagcaaatctcctgtttaatagcatctttctgtctactttcacttctcaggtgaaggactttgttcgcggttgatgatcatttttacgtttttgaagtcttgcaaaataaaatgggcttttcggccttctgtgatgagagggagcctgaacatttgtgctgtgctgacttcttctagctgccgagggctctctgccagccaacaggctagaagaagaaacccgagtgtcagatcagatgggctcacagtaatcagagtggctgggtttggacggcaaagcaccaggcaaaatgtttcccatccctgccagagctgtccaattctagattacactgaaagtacatgtccagtacatgataatgtgcagtagagagaactgtaaaacctactcactcattttaaaactctccatttatatattttgggggagggatgtggaacctagtcaggtctgaactttctcacgttgctatgaattgagtgtatgagaggaagtgtgtattctttggctggagtcatagagagactgttcttagcatatgactcacctcattagttgtgctgaaatctgttgtcaggaatccacaagaagttcttcatatttattttgtgtttcggatagcagattctgttacgaaagaagtacccttcaccctacactttctctttggtttggtttttatttgcatcctgagcaaagggatttttgatcaatagacctcattcctttgttcctttgtgactttacagtgaatctctttatctggttttagacctcacttactagttcctttgtgasttatgatgaaatatatctgcacgtgatctctttccagttttattcaaaccctatttagtaatgactrttggctgtctcagtgatttgataagttgattcatgatagttcgtgctttgtccttgggacttgtattgtttgggagcctgataatcagtgtaagattttgtgactcagtgggccttgctgtgtagatcggtgagctgtgattgctctttctagtctgttaccatgtaggggcaggtccctaatgcactttggggttatcctcttgtgtgtttcttttatcttccacatgatgcttccatggcaccatatttgttttattatttcaattcatgtgacatttctttagggccttggacagcctttatcctcttcagcctggcagtcattttccttcctagcctaggcttcagggtactaattgaggagtgatcaggacttactgggagttgatctggtcctctcataacgcatatgctgattattaatcagttgtctctaaccagagcaatctggtaaaatgaaaaaaaggagggtaaggtggtcagcagaaagggggagttaaggaataagtagaaagttttaacccttcataacccatgcacctaatgtagaggtagaattttccattgaagaaactgaagtttttgtctgattgttcttaataactgtaaaagcaaaaatatatctaaagtgcactgattctttacaccttttagaatttttattttttgaatgatcatggatgtacactactgcaggtagggtaggctgtcaggctcattaagaattgacatgcaggcagattggggaggaaggttaagtcatgttcttttgggttgagggaacctgctggctagaactgtcgctgttctttgacccttgctggctgctgggctgcccaagtttggatatactaaactgggctcacaaagggatctactgctttggccttggtaaattatattctccaggatgcatatttgggtgggcaagagaaggaatatgaaggcatggtggcccctcaggctcacctcctctgcagagaactgctgctcctgcagtgatgtgctgctgctggggctggatagcagccatggtactatgacagtgtcctccctcaaccccggccatcccttagccctccagtccctggctagacaattccttgcacataaactaaactacttagtcatttaggagcaaatggagatgtaataaactgggctagatcatttcttgactgttattttctttaagttttcactgttaagatcaaatgaaaaataatgccaaaggagttttttcttcaaaggtttgaaaagaattttcatagaaagcgaaaaatggcagtaatgtatatgttaattaagaccaagttataataatagcctttgtgtagtgctttgagaatacttttacatacacaattgtgttggatgatttaataatgtatcgaccaggaaaatgagaaagcacccctcccccttaccttttacattgaaggtagcccagacttggcagcctctagggaaccagcaaggtcagagtccatcacacaactttcctgctaaagtggtatttgccaaatcatgtccagaggtgttgtttctacaatcttcttggcaactccgaaatgggctgcatttggggcacttccttttgccatccttctggcccttcttgcccgtcaaaagcttttgtctgtgggctttggaaatagtccagtttttaaggtgttttatttttcagagttaatggtttcttractaatcagactatgaaaatgccttctctaggttctttaatagttataccaagtgttattcccattttaggaatgaagaaactaaggctgacaggcaaaggtcatgtagccagcatgtggcaacactagaataaattggcagactcaacaccattagcagacctgtctggagggaatggtgggtcttgaactttcaagtaccctctaaactttttcagcaggaatttcagaagtctcaagaattctgagctccctgctggccatgggacattgtgctgatatggtgggaaaaatgcaggttgagaaagccttcgcatcctgccctgttggaggctggtgtttgggatgggtatgaaggcctttggcggtggctatagcttatgcagacctgaagcaatatacctctgggatggaagatcctgcttattttgggataatttctaaatctgtcatatctatccccaaccctgtccccattaaatggctaattgccaaaaaagaggaagcaacatcttcagctctagcaagtctcggggatgtctcactcattgtgaggactgtgaggattcggtatatatttttaagtgagtgaaccttgttacatgttttaaccttggttcctcctgtcaagaattttatcttctcatgtcttgggcaccttttccctctacccagatcaaatagcaaaatgcttagttaatctttgagaggatagaatccatgggaagcacaggatgaaatgatgacgctgtgctaagctgtgtcaccgtgggtaagcccctgcccttgctgtgactttccacttcctaaattagaatggaagggggaaaaaaaaaaaccataacccaacttcatttttatgagtggccctttagaaaatagtgtaatccgttgagtttccattgtacctttcctcagagatgctcaaaggggcgggggtgcccttacatggaacatgatgagagtgaggattaatcactcccagtcctctgggaggggggaagtgacctgaactttctaattgaaaaagtaggaagtgtgtgcccaatgcccagatgagtgggaagattactgtagttgattgaggaaatgccgtatttatcattcacccttcccatgacctttgtttttccctaatgccttaaaaaataataaggaaacattgtcctacctgattctaccactgttcatctcacgcagtgtgcactccctgactctgaattttgcagctttgagactgaggtaattgagactgatagggatttaaggatatttggttcccacaagaataagctaatattaagttattattttacttgtggagaagaactaaattgtataagctgcctggttcttctagacacacattgcctagtgaaaaaattaaaattttgaagaaaaagcagttttacttgttaatacttgccatgtgtctcacccacaaatagcctcatttaaaactttgccttacctagcatgaatggataaagaaaaaggagagttattagggaatctaaattcccaactaactttagcactgatagtggtgaagctatgggcaagacatttattttgtaagtgggggtaaaactttggaacgtgttcaaagcctagctgctctagtaatcctctctcctcttctggagtggaagatattggaagtctgagaataagcaaagcatgcagattatgaagctgaggggttataactatttcatttattgaaatatatttcaatgatattcaacttgctcagagagaatccgtgagctgtattttaaaaatcaatacaggctgggcacggtggctcacgcctgtaatcccagcactttgggaggccgaggtgggtggatcatgaggtaaggagttcaagaccagcctggccaagatggtgaaaccccgtctctactaaaaatacaaaaattagccaggcgtggtggcgagcgcctataatcccagctactcaggaggctgaagcagggaattgcttgaacccttgggcggaggttgcagtgagcttagattgcgccactgcactccagcctgggcgacagagtgagactccatccccaaaaaaaagaaaattaatacaaagtggtcacataaatcttttagagatccttagtcaatgtctttaaaatgttttttaagtgttgtgctttctcattaaaggtatgatatacctttaattaaagctaaagatataccactttagctgtggttcctttctggtagatgacctgccttttcctttttgttttatttgtccacttgtatgtgttactatttttcatttaaactctggcaccaagagctgtaccgaaagaggcaccaacaaatgtggttgctccataatggagagaatgtcaagaatgttgactatctttagacctgcttcattaatagataagatagaaactaaagaacccacccagttggaagaagttattagtcaagtagtgctgcacacgtgaccacagaagttaaaaaggtaaataatgtgtctctacatgtggcccactccagtgaatttggagaaggatttctccttggagtcttaagaggatatttttaaatttaagtgaacaatgtattttatttgcaackattagttatgactgaaacacacataatacgttttgattttcttttttcatttcagcacagtgaaattataatctggacacgagttcctaattattgctttagtagctggtaatgcacttaggaaagttagaaatgagtaaaggagaaccacaaaataatagtaatagcaccatatgtcatgcattttaagaaaattgctaatgtctactttttggccttaagttgtagttgtgggaggctgcttcagggggaggtgtctggaacaaggggctcttctgctccgctaagctttggagcaccaagttcaggctttgtgtagataagctcaaggatttttcaacaggggtgggggagtggaacaatctaaatttaaactatagaatcaacattttctttaaaaattgttccagttttcaagaggcgtaggtggatcctgtgaattatgtgataatgcacacgcttttcctacatcctgcttatgtcaaaacatttccagagactttcattttggaggttttattttcaggctacagaatgggctgggcgctcccttttttatctcttatgcaaagaattttaaggagtcttaggctgactttttaatatgggaagctggtaaaggtcagtgttcttatgtgagcactaaagatatttaaatttgatatgtaataatgtctttgcaaagcaaagaatataaacagtataaaagtactagcatttagatgtattgtatcatttaatccttaaaaacatgaaatgaggttggcactattctttatctccacgctgtggaagaggaaattgaaatgtagaagttagtaacttgcctaaggatacactgctggtaagtggtaaagcccargattttaactcaaggctgtctgattgagaatgcggactcataagcacaatattgcactctaagttaataatgtaaagttagtttcattctttcagtagggaagatggaakgctgcagaatagggattttgatagcaaaaatctcctcattaaccccaaaaggaagtggcactggcagggccattctgaagcctaccggtagcttcagtattgttcttaatgctcttggatggagagaatrtatcttgagccaatgtattaatagtagattgctttgmttatgtagtaggcaatatatgggtatacattttcctgactattatcttaatgactattccaaattatgactaccttaaaaactaccaraatcccctgctccagaattttcagtwtcagatgaggttcataattcatggcctcacttytcccacattctcctacaggttggacgtgataagtatgagcctgcagctgtttcagaacaaggtgataaaaagggcaaaaagggcaaaaaagacagggacatggatgaactgaagaaagaagtttctatggtaagtactaggaggaatattgtattccatccttattaaaawtccatgatttttaatcccccaggcctcactgtattcttcaaagaactgctatatattaaaagagatcatagcagctgtacagatctcatctagtcgtagaggttaatgttgaacatatactttttaaaagctgttagagggtaggaaaagttattcagtcactctggcataaccagagataacagaaggaacttaggttgataccatgagtctttgcttttctctgtattatatcaaacattgggaaattcagcctctccaggcgatggaagcttccatagacttaacctgtctagaatcgacctggtcatcagagaaggcagataaggttttactagatccctgagagctgctgggtttctctgaagtgttatggcaaatagtaatgggccacggtcactcagctttagccattctccagtgaagagctgtcaatgataactgtgtggttgcaaagccacaaagcgatggtgaaaattgtaccaacttatgcactgaagaaaacatctgcactttgtttaataagcttaatgatagtaatgaataatgctattttttctgtcatttttttatactacactgtttaactattttctttgtttctgttttcccttaggatgatcataaacttagccttgatgaacttcatcgtaaatatggaacagacttgagccgggtatgttctagtttgaaagctgttgtacaaaatcctagttttccgtattatattttcccctgtattacatacaggtctaacctcaggggctctagtaagaaaatgacagacaccatctgcgtatctaccatgtgacatgcacagaatttgggcatttatatgctaccgtttcttttccctgaaactttttgaaagtagatgttattttcttttccctattttatrgcagttgagagccagtaagtgggaacaccaggacttgcagttggcttcaaagccatgcttatgccttgaccttttgatgataaattttccctttatttttctacatttgttaaatagagttgaatctttcacctagttgaatcttcaacaattcccatttttgcacttttcccagctagcccattgcagtgtgttatggttatactatcatttgtttagttattctatcatttagttggaaattgttttgtacaaaaattaaagaaaccttttcataaaataggcgttatgtatccttgttatgtagaggattttgatattaaatgtgtaacaaatgttataaaagtaaatagtctagggatgtcttatttccagataatcactgaaatgtctgggaataacttgaatagcaagccaatatgtagcattttttcagtaaggcatcaagagacatgggtactgtggtattctgatatatattggtttttgtccacagttcctggttcataactcccatagcccttattacagtcgtttgttataatgttgggtgtgttagacctcagtggcaggcttcaagaaacaggatctctctcctgccctccttttcacctgtcgcaaggcaggactctaatcttgttccacttttctgattttccaggtagatagtgttggaattgaattggaggaaaccttggtggtggggagaaaccgccacacctttgctcacagaagtcatcttctgtgttgattgttggggtgtaagagtagagaagaggccgggtgcggtggctcatgcctgtaatctcagcactttgggaggctgagactggtggatcacctgaggtcaggagttcgacaccagcctgaccaacatggagaaaccccgtctctactaaaaatacaaaattagcctggcatggtggtgcatgcctgtaatcccagctactcgggaggctgaggcaggagaactgcttaaacctgggaggtggaggttgcagtgagccaaggttgtgccattgcactccagcctggacaacaagagtgaaactccatctcaaaaaaaaaaaaaaaaaaaaaaaaaaaaaarggagagaagaacaaggttgagagcgtttttcttgacacaagcactttaagctccaagaggaggcctcgagtcagctcagaacaacatgccaacagtgactctgtgcttactttgtgccaggcagtctctagccacttcacatctcacttaagtttttattagagtcttaatgaagtgtgctctctccgacctatgcccattactcaaatgctgcgggtctatttctttacttataaaatgaggttaataatgcctaaaaaaggattgtcatgagaattaaacaagttaattaaagcactgaattcagttcctggcatgtagatagcactcaaatgtttggtaacatgagcacaaaacacagataaatagatactttagacaaaaatattttattttttttttgacttgttattttgagagtataaaagtgatcatattttcctctcttaatgagagcttatatgtaattgcctgctgtcagtgaatcttgggtttaaggcccattagaaaaatagcaggctttagtagagtggttttttccagtgagtacttttcagtcaacaggtttattgggaggtggctaaaatgcacatggaggtgagcccttccctgccagacaagcaaagaatcaagctgtatatttaaaacttggctgttaacccaaaggatttctacaggaagtttttttctcctttgatgtttgtagaggggttttttttcccctcccgacaaaatcaatacacagaaaacccaaagctcttaatttgcaaaactgaatggatttgtgaaaatagatacctttttggcagaaatgcaatttggcattaatcccttgatctaaaacttagaagaaaccaggctgaattcaaatttattgatggatcaatttaaagagttttaatctgggtgttatgagttccttgggcctattgtttgcctgaaccctgtggggactggctcatcagcagaattattcatggaggaatttgctaggttttaccttggctctctagcttgggacattttgtttcttccttaaatccttattgcaaccgtccagctaccaggtaggtatattgccttgtaagtgctggtacagtttgccttatttatattccactgcttctcagggattaacatctgctcgtgcagctgagatcctggcgcgagatggtcccaacgccctcactccccctcccactactcctgaatggatcaagttttgtcggcagctctttggggggttctcaatgttactgtggattggagcgattctttgtttcttggcttatagcatccaagctgctacagaagaggaacctcaaaacgataatgtgagttctgtaattcagcatatggatttgtagtacacatcagatatcttctccgtctttgtctcccwcttcttctcaattaccactcattacttaatggttatgaactcattacttaatggttatgaacagctgttgccttcaaggctcatccattcttccttcgtttccatttcstctctctaccacccacgttgtagatgctcttacaagtgggatgcccacctgcatgtgctgctgtgagcaggcagctctgctcaggccccggccgccacccactggatggcagagcacagcgattcatgttggcacatccacctgtccagaaatgcttggtggccattcttcaaaatccacaagttggttgaaaaacaatctttgttttataaagcaggagaaactgatgcatctagaacctttccaaacgtccagttagtgatcaagtgttrgtgtgcctgactccatttctgacccttcctgtgtggtctttagaaggataaataagaaaacatgagttctatatttctgaaatcttggtttctctattaaaaatctgttttttrttcagtcaaaaaattaattgaatgtccctaattattgtgtagagccacgggccctaacttgtcttttcccttccagctgtacctgggtgtggtgctatcagccgttgtaatcataactggttgcttctcctactatcaagaagctaaaagttcaaagatcatggaatccttcaaaaacatggtccctcaggtaccagacgctttgtccttccccagtggatgacttgacagccccaagcatgtcagcctgtgaattagtgtgaagttaaggttttccaagtattacatgactcatcagagagatggatgtcttctaccccacccaaaaccaacctattttccttctatccaaaaagtggtagcctttcttttgaatgtaaactctgaatacaggcacaccatgtaacagcaatatctcttaaactggcgagcaagcttttgtaacttgtgtaaataaaaaagtgaataatatctttgttttgtattcaggtaattaggattatgactatttttattttcttgttttggacactaccttctctttgttgrtatactaacggtgtaaattgtttcttttccaaagcaagcccttgtgattcgaaatggtgagaaaatgagcataaatgcggaggaagttgtggttggggatctggtggaagtaaaaggaggagaccgaattcctgctgacctcagaatcatatctgcaaatggctgcaaggtagctcttttattttaacaaacctcatagctagctctgctgttcgggcagcttgatttgaggggtacagtagcccatgataaggctggtgtattcacatgacatttttcttyttttcctcacatataggtggataactcctcgctcactggtgaatcagaaccccagactaggtctccagatttcacaaatgaaaaccccctggagacgaggaacattgccttcttttcaacmaattgtgttgaaggtaggccatttttgggcactttgagcatggcgtggtatttctcttgggcattaacaaaatcaaaaccataggcacaatctcttgttttattggctccatttctgagaacttgtgtcaagcacagagcagaggtgttttcctagctggcaggaaaccttgtggcagtttcccttccctccacctccaccctgcctcttctgtcaacaacaccagtctggcatgggtgttggagctgctgtcctgctactggagagaagtccctttgccaaacagcatgtacagccaaagagctggcccttaaaaagtgctttyatcaactctttttgtttttttagtcatcctwtgtaattgtrtaaaatccgtggcttccttcaggttagatacaattaggtacagttctccctccccttctttttaaggcaccgcacgtggtattgttgtctacactggggatcgcactgtgatgggaagaattgccacacttgcttctgggctggaaggaggccagacccccattgctgcagaaattgaacattttatccacatcatcacgggtgtggctgtgttcctgggtgtgtctttcttcatcctttctctcatccttgagtacacctggcttgaggctgtcatcttcctcatcggtatcatcgtagccaatgtgccggaaggtttgctggccactgtcacggtaagaggcaggtgatggtcaccctgactcagatcagcttgcacgaatgttacactcttccgctatcctattctaaggtattgccaacttatgttttattctggatgtttgatatagttcttcttgagagccacatcacgtggtgaattttgacagtgagaaaacctcagcatttgtttatacgtaagataaccccaaagcatacattttgcttttaaattatcacgtggtccwgaacagtgcagtggagaaaggagaagaacttgggatcaagtagggggatagaatatggtagaatcctgttattatttttcttaatagattgcttttctggaaggaaggggaagcctcatgtatgggttccccttattatttcttcaaacttcagaagaaggttggagagatktaattttagacaaatttcttccacattaggatatarcaagaatctgtatagaattccagcctggttgagtgaagtaataatcttcctaatattttttaggtctgtctgacacttactgccaaacgcatggcaaggaaaaactgcttagtgaagaacttagaagctgtggagaccttggggtccacrtccaccatctgctctgataaaactggaactctgactcagaaccggatgacagtggcccacatgtggtttgacaatcaaatccatgaagctgatacgacagagaatcagagtggtaaggccagggttaccacacacctcagccacctgctgacttcgcttggttttttttcttttaagaaattgcatgaaatttcttttttttttttaagctcatggcagctttttctttcttttttgktttttttttttttatcatttagtgaagagtcaagggtatgggatattgattttttgcatgtcagtagaaactttaaattgccctacaaacgtgactgaagaatgcctaaaatgtgattggtttcattaattgggaaatgagatgtatcactgcagatttctatgggactttartaggagaactgagaacacagcctttgaagttaatgcattrttgttctgttgtgttttcttgcctccatcaggtgtctcttttgacaagacttcagctacctggcttgctctgtccagaattgcaggtctttgtaacagggcagtgtttcaggctaaccaggaaaacctacctattcttaaggtatgctcaagagttaactaatggagggatgtagacagcacatgagaactgccatttgagtgttaaaagtagcaaattacctttgtggtctgtgtgactgttcactgtagaacacctggagtggtctgtgcagtactttgctgtgtgtaacttacattgtgttgcctgtagatcctgatgtattataggaccccctgctccatataggttgattaaaaagggaagatgcagtaaaaatctgaccaaagtgggaggggaggagacggaagacagtctttattggtgaaaaacctaattcatctgcttttactactcttgagtttatatgttatcacctaacctagtggacagtgagagctgagggctgcagtgactccataatcgtatttgcatattaggatacagtagattccagtaactcctttaagccatttattttcctgaaatagctcagcttatcttatcttattggttcttagcttgtttactaatgatgtaaaaataagctccaggccaaaataagcccagccttagcctgtggaattctgatgcagtttgaaatgattgagattttactatgctgcccaagtgaagatgcagtctcagaaggatcatgaattgtacaaagtcctgtaggagaagaaagctatgtgaggctctctgggtcccacattctctgtgaagctgcctgtagtagttgtgggtataaactaagttgccaaagggaatatggcttggatgtaactcagatgccttctgtgatgaggatagggttcatttattctgcaaaggagattttcttggcattgaattgatgttgatttgaggataatgttgtgtatcttgaggataaaacttgagataaatgtttcatgtttttctttacctcaaagtggaaatgttctaggctttgagcatcaggtcccacaagtatcaaatctttcctgattaaaaaaccccagaaaggtagcagaagctgtattccaagtatttctggagttcggccatgttgatggcattattactaaaaagcggggagggagaagcagccctattctgcttttattaaaaatggcttttattaaaataagtggcttttatttaaaatgtcccccacttattttgtgtttctttccaaacccagccaactttcttgctctgtggagctgctatacttctgagcattgatctgttcatctgcatatgcagccttacatgttaaggttctaaaaggtttacctatataaaatttgtttacaactgaaaatgctttcagtatgtcaaaatataagtgtgtcatcatgtatcatagaaaatatgtgtgtcactgaagcatgggctttaactaaaatgttacgtggttcgattttattactgttggagttggtaatagctttcagttcacatccttcaggcccagttaattttgcacagttatgattagaatgcacagtcttctactttgcccttgacacaggcagcttgtccccagtcctgagaccttaagcattttcttacgaattctacggtaatgaaaggtgctataaatgtttaatctctcacttggtattttcagataagtaaccagaagtaggtagttgggaatagcattggctttgagacttttcagtaggccaggggaagatagaaatagactgcagtaggttggaagggtgtgttaatacctcttctagggaaggtgacaccttcccacacccttctttcactagaagctgctgtggggtggggaaggacgttggggtttgagtctgaagcactgtgaacagcagtggtcggggctagagggactcctgtcccacttaacaccgctgcttccttcttgcccatcctctgctacctctgacaagattggaatgtgtcttgagttatttttcctgttttttagtgatgcctcagtgaaattttttggagataatttacagatgatgtctctgttcacagcgggcagttgcaggagatgcctctgagtcagcactcttaaagtgcatagagctgtgctgtggttccgtgaaggagatgagagaaagatacgccaaaatcgtcgagatacccttcaactccaccaacaagtaccaggtctgaagatcgatgggtacacrgagggcgagggcaagctgggggacaaagaggggaggtacatgagcaggaagaggaaatattctccctttggagttttataagctttagctttaaattttgcccttgattaccatagaatgccataatttagttgaatatcagcaggataaatgaagcctcttgcaaaacactgttgagcccttttgaatacttgtggtttggggtgggtgtgggcatgtggggaggtggctggaggtatgtgtacacaagtgttccccaatccctgtgttctgaaatttcgtatgttcttttttaatgtgaacaaatgtcaggaatttatgaatatatcatagtgctcatttttttttttttctgtagcattcaaagtatgttacaggtgtaagatacttcagagttcagaaagaagggatcttgggtcttttatagcaaatactaaatagtaagtgaagctttgttttccaccatggactgccacacatccaaccatccaatgtttatgtctcaacaatccttcacagttgtctattcataagaaccccaacacatcggagccccaacacctgttggtgatgaagggcgccccagaaaggatcctagaccgttgcagctctatcctcctccacggcaaggagcagcccctggatgaggagctgaaagacgcctttcagaacgcctatttggagctggggggcctcggagaacgagtcctaggtatgcagataacctggtaacagagtgcctgggcacgtttttatccagtaacctagtctggtagacagttaacaagtgatcctatgaacctctatgtcttgttgaccttcctctacatcttttaggggcaatcctcctatttgtttatttgccccctattattttgaaaacaataagtgctgaagaaatgttcagcgtattgggctgtgagaaacaacgtcctgatggtttgcttctgacttgtacttagacctttggtctcatgctagtcagttctgtttgtttaaaaaaaaaaatggtggaagaatatctttcttatctaacctttgttgctgtggacatgacttataagcctaattaaagttaattaattcttagtgtgtctaagttagacatactatttcctgactgccttggaatgggtgtgaatttacatgagcacttatgtgctcagcttagaaactagactaacggtaaacttttagtctaagatgctacctatttttttctaccctgacagctactgaggctgagaagttcactttacccattgtctaatgtatttgggaaagtggcatttataatactttgtaggttgacagatactacattcattatttatataatgcttcctattcttcttaacttgggtaaatctaactcatggtatctttcgtatgtgtctatccaaccgaaggattgctatcttctctttaagtgtttttcacttccctacttccaccaccccaaagtggaagcagtctctcttcttttgagtccacatggcacgttaaagatcattgtaacgtcatacaacattgaaaagaatgtcttacattatcttgattcttgtatttactatactagatgataaaccccctgggcagaatgcatctgatctgtacttatcctcaaaagtagctagcatgatgtcccacattggtgctcagtaatatgtttcagttaaatgaacaagagagcagaggtatggccttgatgtttccagagaaggcagctgaggcagataattccatgatttgccaaatccaaataacttaatgtcatcatcagtgggcaagtctagaaccctaatatcctggtgctcaaaattagtgttatcaattcagtcttctccacattaaacaatttccaattcctttgaggcctggtgtgatggattctgtctttcaaatgctttttttctttcagtgactctatcgttcataaatgttaaataaaaccctcactctgttataaaaatatagactttaaaaattttccaaagtaaacactccagagaaaggtaggcgggctgaataggctgctgttgtccttcytactgcccagcgtcactgaaattttcaaaggctcctgtcctcctcgcaggtttctgccacctctttctgccagatgaacagtttcctgaagggttccagtttgacactgacgatgtgaatttccctatcgataatctgtgctttgttgggctcatctccatgattgaccctccacgggcggccgttcctgatgccgtgggcaaatgtcgaagtgctggaattaaggtagtgcccaggcgcctccttggcttcatctcttagtgccttgggacaccctactcagtgaatgttgccttttgaggtccagatggccagctgttctatctcacctggagtattaatttctcatctccaaagctttacttccacccagaaaagaccagatagtattaaaatatgatggtgtaaacacacgaggaattaaaaattttttggaaagcaattgtgtaaaaaagaaatgtaagcaaagtaaaaacagcaaaagacttgaagttttaaaatacttgcattattctaagttaatgtaccttatgcaatgaatggcatatcttctgtgttttcagttaactgtttgttaatgagtgtttggtgtcctctgtgtatctgtctttttttaagtagctgaatattactcaagtgcactaatatcctgttgctgggtatttggtttctgttttttactctcaggattttattttatttattttttgagacagagtcttgctctattgcccaggctggaatgtcatagcacgatctcggctcactgcaacctccgcctcccaggttcaagcaattctcctgccccagcctcccaagtagctggaattacaggcacccgctaccacgcccagctaatttttgtatttttaagtaaagatagggtttcgccacgttggccaggctggtctcaaactcctgacctcaggtgatctgcccacctcagcctcccaaagtgctggggttacaagcgtgagccaccacacccggcctactctcaggattaatactgccctgaaaagctttgtagaagttatttcctcaccattccgactgcttctttttaaagtatattctaagtataatcactgcatcaaaaaataacaattttgaattcttgtcacatgttgcttttcctccaagttgtgccaatttgagaatgctagccagtagcatgtggtgtcttcacagtcccaccagcatcagatttttatcctttttttttttttttttttttgctggttttagtaattttcaagtatttttatgtaactctgtagaaggaaaaatagacattgtgtatgctagtgattgtataccaagataaaacctgagtattgcctttgtgtttcctttctgtggatatatatgtttatatttttggctaatcgatgtttattagttttatatttgcattcctttccttttgatagtctaagccgaatcatccttagtatttactcttgcctactggatataagactttaaggtcatttacttggcagttgcattcaacacattgtcttgtttattacaggtcatcatggtcacaggagaccatccaatcacagctaaagctattgccaaaggtgtgggcatcatctcagaaggcaatgagaccgtggaagacattgctgcccgcctcaacatcccagtcagccaggtgaaccccaggtaaggcaggaagctcaaatcacagtctgctgtgaacaagcaaatagtgatggtttaaaatcttcagcgtggttctataatggtttgcatctaggcttgctctgagtaggaaatgtacctgcactgccagaaagcaaccttgtcattcctaagaagggttttaagtaagagcaagtcataataattagcacttagatggtatttactgttctaagagcttgatatggtgacctattatttgcagagcagggaaggtaaggattcaagaggcttttgaagtacctcagaactggtgaaatcatgcagtaaattcagcagtctagcttctgatttcatgctgttaaccactgagctctactgcctagcacctagcatcttgacactttccaggtccacactaacaaaataaaataaggaagggacaattacttaggccattcaggcaaacacaggagacatttggcaatgaagtaaaacagataatagcaaattggttttgttttaaggtttagggccctttcaccctatgttacggttagaggagggtttggtcttgtatcagctctgccactttctaaaacttggttatatttctttttttctttgatggagtctcgctctgtcatcccggttggagtgcagtgtcatgatcttggctcactgcaacctccacctcctgagttcaagtgattctcctgcctcagcctcccaagtagctgggattacaggccccaaccaccatgcccggctaatttttgaatttttagaccaccattttggcaagctggtctcgaactcctgacctcaagtgatccactcacctcagcctcccaaagtgctgggattacaggcatgagccacacacccagctaaaacttggttatatttcagcatgtctaataaagatagggaaaggaagaatacagacaggcctgccttagagatcatcatgagcctcaaatgagataaaatatatgaaaatgctctgtaacctgtaaagtactgaacacttaatagcttttatgtgctggggaaaattccttctttgttttgtttacaaagtgatctgcataagaatatcccctcttgaggtgatggacacatgctggtgatgtgatgcgtgactttttttttttttttgtcctaattctagggatgccaaggcctgcgtagtacacggcagtgatctaaaggacatgacctccgagcagctggatgacattttgaagtaccacactgagatagtgtttgccaggacctcccctcagcagaagctcatcattgtggaaggctgccaaagacaggtcagccagcacaaggatcaggctgctttgggcactattggctttagggattggagttccagtggaaacagagcaacggtgatggatggatgcatacctcgctgtattagactcagtataaataggccagtaggaagctcataggcatagagagggtgacttgttaatggtttagcagtgacagaagcactttaaagtccaggtgtccactgtgtcccagagcctgaccgctccgtggagtcatctgatatggggtcctagtatttgcaatagagatgtgagtggtcagactacagggcgtgcatacaggaatggcattttctggagtgccacccaccagagtcattactttgagtagctcttgttaatgctgggggctatgtttgttgtcacttctcagttctgttatttggtgtagggcctgtgtgaatacttgcctgtgayggttctcaggcttcataaatagtctcaawaggaaaggagcagtrtctgtaatgagtgctcmgtgggggcatgcatcgcactatttccatcgctaggaaaagtgattggtattaacccgttttcccttttctggggtagggtgctatcgtggctgtgactggtgacggtgtgaatgactctccagctttgaagaaagcagacattggggttgctatggggattgctggctcagatgtgtccaagcaagctgctgacatgattcttctggatgacaactttgcctcaattgtgactggagtagaggaaggtgagagctatttaaggtgtacaccaagatcttattcagatactgcccattagcatccatttctgtatacttcttggatatgttcagtttccagtgtgcttgtctcataagctaacagtaaaaaatcttggttttcataggtcgtctgatctttgataacttgaagaaatccattgcttataccttaaccagtaacattcccgagatcaccccgttcctgatatttattattgcaaacattccactaccactggggactgtcaccatcctctgcattgacttgggcactgacatggtgagtgtcacaacagtcacagatsgatagtagtgaggtgtgagctgtgtcttcattcactggcactatgctcccagcatccatgaggctggcgttgggaaaagaaattctcaggaccagtatccagtgtgtgtcccaatcccggcttcacagaatcagtattaccactcttcaaggcagcagttaacatttgtttatcagatgggaatctttatttttgtatacttcacctaaaagatttttaaatgggagggcaagaattttataacaaaaggttcacaatattagcttccttatttttagtaactaaattccttctccccaccccttcccaggttcctgccatctccctggcttatgagcaggctgagagtgacatcatgaagagacagcccagaaatcccaaaacagacaaacttgtgaatgagcggctgatcagcatggcctatgggcagattggtaagctgcagcctggagtgggaagctggcacatctaaggcatctgaggtgatggtgtccacctcaggttgaggttgatttcagagactgcaaatccaggcgactttcaggtctaggatgagccctaacggagtgagcctgtggagtttctctgaactctcttccatgtgagaatacatctgttgctgtttgcccagttaccttttgtggaaactggttttctatactgagcaccttggaactgggctcaactctgcctgagaaatgaggatgtccttcctcactgagccttgcggaacaggaggcatggttctaaggaattgtgtgtactgacgcacaggctgctttccctggagatacacacttatctgtcactcacttggatggagttaggcattggagaaagtatatgtgtttgagagtttggctggtaggtcaccaccaaagggtgatcctccatccacctcacactggacttctgcccccacagtgcagcatgactagctaacaggtgatccaggtggtgggcaatcagcatgccatttgtttttaaatcctctgcctagggttccttcaagagaacctggcaaagccaccatggatgtcttattctcctggattaatgggtcacataactgtgaacgcttggataaagaagaacagattagatagaatattgtggaaattatggcaaagattcattagacagttgttggcaacaaagtaattggctggtggcccatcctgaccttctccaaggaggcctgcttttgagaggaaggaagactaggtctctggtggtttaggatgaaaccctgccctgaggaacttggagcagcgtggttaaattggatgccagggggaggagggtcctgaaggtggggaggagagtcagaaagtgccacagtggctagaaaaatggcagcatgtaggaattttgaaagatggaaaagaagttatcatttgtcagagattaaaaagtagggaagtggatttcccctaaaggtcatacccttagaagcagctggtcaagtaacaggtgggcattttgagagcaaggcacatgtgtctttgtgtaggctccaaaaagtgactcaaaaagcagagggccctgagattggagtgtatgcctggggtcctccatcccatccctcatagcctgtgagtgaccaggcaattctttcctgtgcttttatcaaccagggggaaacactcctccatatgtgctctcccaggcctgctgcagtaatcagctgaaggctatacaggtacccttgtgtgtgaggttctagtaattgggttgttttcccaacttaggaatgatccaggccctgggaggcttctttacttactttgtgattctggctgagaacggcttcctcccaattcacctgttgggcctccgagtggactgggatgaccgctggatcaacgatgtggaagacagctacgggcagcagtgggtgagtgggcacctctgacctgaccagtgtcagagctcctcaagccccagaagactgaggccacactgccaccagccatgcaggtgaagagccagagctcatcttctgtcttctgcatttcagacctatgagcagaggaaaatcgtggagttcacctgccacacagccttcttcgtcagtatcgtggtggtgcagtgggccgacttggtcatctgtaagaccaggaggaattcggtcttccagcaggggatgaagtaagtaatgaaggacatgtcaaggccttggctcaaagaaggggactggtgatttgtaaaccctttgccaaaaactaaacatatgacacatatagccaggtttctggaatctctagtttatagagcaaatttaggaagcaagaaatgtagctttctagttttttcatctgacctccaagttttcaagtacagctaatacataaagatgttgatctgccattttaatgcatagcattagaagataaacctttatttgcaccttttaagttttttctcccctactttgattttaggaacaagatcttgatatttggcctctttgaagagacagccctggctgctttcctttcctactgccctggaatgggtgttgctcttaggatgtatcccctcaagtaagttgatcctctggtagctccaaaaagtatgaaatagtatgtgtggcttttccccccattacttgtggtaatagttgttattttcagaattttgagtggtatgtacaaaaattcctatgggttggaaaactgtgaaagcttgacatgtcagtaaatcagactaacaaatcctgaggcttccatgatagcagctagtgtttaggatttggcccaagataagataaagccacacaggctctagctccatggaactgctcaacagcgaactgcattgagcactcaggtctgccacagctgtagtccagttgtctttagaggccaactgggggtatgctggagcgtaggcgcccaggctcaaatcttgatttgcttgcttagtcactgtcccattacaagtcatccacctttctgagactctgaatactctgctctcaaagaaagaaggttggagaaacagatctgaggtcccttttactttataatcagtcatgggtagagttgatcaaaggaagcatactgctagtctttggccttaaacacagtgaatgactctgcatttcagataaacttgaattttcaaagagggtttatcacaaactccgttagttttttgcaacattgagtatgtttggtgatacctggttgaggttaagcaactgcaacttgattaaaacgtgcaaagccacagattgtgggacccatttacaagttcctttgaagcttttgatttaaagcattagtctcctttgaattcctgctgtcctcatccttgctcagacccgtctggaccatctctcaatcccctgttgccagcacttccttcagctcatcttatccctaaagtaaccaaaacccatcagcctcattcacttcctgtgggktatgtgcagacatcgtctgtggtgcaagatgagactggcatccagagtcagtctcattgtcccaacctgtctttatagctttctcttgtaccccttacccatccaagctcatgttaggtgaattcggctttcttcctctgcctttgtgtttggtaagatccttcctccccacatccctccttctgttccctcttaccctgccaatcctgatagtcccttcagggccggtttccttggagcttgtccctccagggcctgtgcacttgcacctcttctctggcattacttgttgcttgtcatttcacctccctgctaggttttaatctagaaggcatgggccacagtgtctttcttctctgtgcatccccagctccctacacaaagctggtgtacagcaggggccagccatctccaaattgaattctgtcagcttgggccattatgtatcaagatggggcttggagaggtcacagagctttccaaaaaggctggtggaaaattacactgaaaagggggcatttccatcttctgggtccttccctggtttttttgccaccaccaaagagattgttctgacaggttctgcccaattttggaaggtggttcagttattcggtgactgagtcaaatgagatcatctctcttagctgccttgtcagacacacaggaagaagaggagaccaccggagtcctgcccagggacagcctttctcacaccatagcagggagctggtgatcacggaggctgcctggagcctgtcagcaggctagagactgtgtggctcagcctccaggccccttggaagccttygggctcagcttttttcagtccccaggaccaggcctcagaacacagagctgatatcccaaatgctgttgtcagagatcaaatttggggaatgcataaactggttttgacccacactggcaggtctttatcttcaaaatgctgggatattaggcagatggtcttaaaaagcttcttaaacactttagaaatgaaagaaagaaaatgttcagttgctctgggatggttaacagaaaagtactctgctcatcctataaaccaagtcttatgaaatccaaactgaagatgagtagggattccattacaragtctgcagactgatttcctctgcgtctctaggccctgggcacatggagtagcaatctgttttaagacatttttatttgttctgttaatgactcagtagttaactgtgactgtacttggcttctcctttcaggctgattatttcattgtcactggtgatgtgcaatttctctttctttatttgaactgtgttygtgtgcatataaattggtaccttactctatttccagacctacctggtggttctgtgccttcccctactctcttctcatcttcgtatatgacgaagtcagaaaactcatcatcaggcgacgccctggcggtaattaygggcattctgactttggttggaggaggagygggaggggctatagttctattggttttttgtttccctcaaggtgtctaggctccctcagtggtcagtctgattagctaaggtgactggaccagcaaactgaccatagtcacatcttcagaatgtagatctcagttacagtttgaggactggtcatgttttagactttaaaatacaaaccaagtatgatttagtgaaaacttgtcagaatctaaaccatctttccaggtaacttggtattcctaaaaacatgtaaataagtacagttgaggtcccatgtttggattttaacacacccgacccccatcatcctccggttggttttcatccctgtttccctctgtaatgctggagcgaggaagactcactgtagtgtgtcttgtctgtctctttgccacccacaggctgggtggagaargaaacctactattagccccccgtcctgcacgcygtggagcatcaggccacacactytgcatccgacacccacmccctctttgtgtacttcagtcttggagtttggaactctaccctggtaggaaagcacmgcagcatgtggggaagcaagacgtcctggaatgaagcatgtagctctatggggggaggggggagggcygcctgaaaaccatccatctgtggaaatgacagcggggaaggtttttatgtgcctttttgtttttgtaaaaaaggaacmcccggaaagactgaaagaatacattttatatctggatttttacaaataaagatggctattataatggaatttgtctgtgccctcgtcgcttctttggtacagatgtctatgtgatctggagctgtggttttcaacatgagtccctgaccagcagtttatcagcatcacctggttgcttgctaggaaggcgggcccagacccactgagtcagaaatgcatcagcaatgtggcttaataagccctcaggtgattttgatttacattcaagtttggaaaccactggctaagaggaagcattctgcccgtgctcttttagttggagtaggtgagtttacctgacccattttttctggctgctgcctggggtgatagggctgtaactccacctgctgccttagcatctggctttttgatggaagagcacctcgcctaaaggatttccagaccctcagagtatactaaactgcagatgaggcccttctctttcagtctaaaagagacctgaagccttcctgctttccctccagagatcaccaccacatctcaagtgtctctagcccagggcttatctgagaagcagaaatctatcccacacagtctgcctgggcatgtgtgctgagaagtggttcccttccttccatataatgtgttcctaatttagcatcaatgacacaatttcagcaagtggttatgtgccagcaagcacttaagaaaaaggtgaaagagatgtgtttacttcagggtcaagtctgagaacacctcctgctttcagagctgctgtaaaaggctcccctcagtctcagccatgagtggtgcagagtgctgttaactgccggtgcttctcccaggctgtcattgccaactgtcgcctccaagcaaacacaacaagcaaactccttacctctggcaccaaacagtgatcgtgatctgccagatgatcatagtgtcttttttctccgaaaagcttaactcagtcctcatgcttggttgctgtgcacttccaagctgggccaatgcgggaggagacagtggtgactcctgtacactggggctgtggttgctgcacccacccactccagccgcagaactgggaggggcaggtggtcttggactctcctttcttggggcactttcccctgggatgatctctacatttgtctgcaagtcatctttaaaatgagccatttgctcagaccaagataaggaaactagaactaaaagatcatgggattagaaggttgtgagtcaggtagcaactggagcctcctggaaggtactttactggcccagctgtgacggcagggccagtcacacaagacgtctcttgtgaggtcaggctggcactggtggtatccgtactgcgactccctgtatgtctactttcggcatccctggagaagaccaacgcacatacgctgctgcgatgaaggtcatgggcatttcctgatgcaaaagatttgaaacactctgagactttagcttttgacaaggggaccccagagaacgttaagccagtgtttctctgacagctctaagaagccctggtcttctgggaaaccctggagggagcaaggcaaaaggaaggctctgaacttcacacctgattttccaccagaacatttctgcccttttctgtgtgacaatcctttgaatagaaagttctacagccaaacatttgatttaggaagagcaggtaagtgagctgctcttcatgggtaaagctggcaccaaagtcaggcctgctgtgggttagagctttcccaactttctaaaagcaggagtgcttgggctctcatttctacctctacgctcaaactctcctgctggccctgtcactaggagctaaaatcactccagagccatcacaagcagcttctcacaatggccctcagcactgtcgattccctacagatctctgtctctgacccccctttcaaatgccttcctaacaaacacttctgaccacatacctttttcagtatatgggtcctcactgatatgttcaacttcttaaggtccttctcagcatttaaattgcggtcttatccctctcacatcctgacccctacccctttctctagctgtcaccctccctcatggacaaacttgtagaagagtcactgccactcctcctaattgttcacctcccagtcatccctctgcctcttccagctcccatgaacaccagtccaccaaaattgcctggttgaggccatactgacctcctgatgcatcttggtccttccttgacctctgctgcatctcttctgtccatcacacccttcctgaaaccagacctcccgtctttctgtcattgtctctgtgcactccttagctctcagccccctcttcacctgctcgacccctcgtttcctcagggaggcctccacaccttctctccctgcttcatactcttcctggcatgatttccagctctgatctggtcctctcctgagccccagatgtacaaatccagtgtgtcctagacatctgcatttgttcagaaagagcatggcacacttgagtcttagtaccaatggcgagcctaagtttgaggttccacaaataaatatgctttaggcagtgatgacatttggcaccctactgcccaagcgagaaaccggaaaggtgggtgagccctctcttttcctgctctgccccccacccaattactgtggattccaatgttgtggtagagaacatggactttgcgtcttttaacagacacagacagtgtcccatcactggctgatgaagggcacataatttagcctctttgtgcttcctttactctagaatatttcagagctgttaaaaggattaagtgaaattatgcataaaagggagtctcatagtggctgctgttcaatagttcattctctctactgccggtgtcctttacatctgggtgctggaagcggctttttggtggtatccctaatttttgcctttctctattccggtagttctcaaagtgtttctggaccagcagcatcagtatcacctgggagcttgttagaaatgcaaattctgatgcagacctattgaatcagaaactggaggtgaaacccagcaatctgttagaagtagctttccaggtgattctgatgcacagcaaaatctaagaactaatgctctaatccatcctccaagcccatatggctgcccctctccaccatccatcttcacactggaccccaacacataaacccatctctgctcagccattcaaactcctgtgcagtcccctaatgtgccatacaccctttcttctgccatcctataagtccctttggcattctcccaacccacccaccttccccccgaccttcattcacttggcaaatccactcaccctgtgaatacccattaggtctggatcctcacttttgcacaccttagtgtagcacttccacttctgttgatttgcctgttcccggatagattatgagttcctagatgacatggaccaggctataccctccccagcatctaatgctatggatgtttattgaatgaatggatgcatgcacatttttctgttgcccaaacagccatcattttaacatttcactgtcactttgagtccgcttcttggcttagggctgacaccttacccaagggaaatccatgtcccggcttgccacctgtctgtgagttaaggcctctcctctctcaagactttgaagttagagagtgtaagaatgagtcatgcatggaattagggtgttagaaagttgagtggggacccatggcaagcaaaggtactaggtaaagaagagatccacaaagacagagacaccaaaaggaacatcagccctggacctgcctggttccagagctttttagtccctgtcctgggcctctaatgctctcacaaacccctcccttccccaaactagattgaaatctcccatcagatagttgatgagtactctctatttcttcaaagaactcacaattctaattaattatctatattactcagttatgtaattattaatttaatatccctttttttcctgctaagctttatgaggtcataaagccaatctgttctttccattttatccctggtgctcagctcagtgcctcacaaagaaaactgaacacttagcacagggggtcaacactccctactgaaggaggagggcatagaggcaaagggacttgtccatggtgtcctgtgtttaagaaaaggaggcaaggctggaacaagactggaatgggtgggtctcacacttcccaccagctacgctgtgtgccgtcctcctagatgcaaacctgactgcacagatgttcgggcgctcacagtgggaggcatctcctggctgggctcaggcttgccggtgggactgcacgggatttgtgcccacagactttcaagtgctgggtttccttttcagccccaccacctcacccatgtgcccggagacagtgtaagtctcagcagtgggttgggaagcctggatcctgggcattttaggtggacaatgtgggcaagtcatgtggtctctccaagcctctgtctgtaaaatgggaggtgacccccgttcctacctcatgaggctatcgtgaagactaagtgaaggaaaatgtggaaagggtttagtacagtgactggcccttcatcatagttcaataaaaggtcactcacctcctacacccgcccacacacacatctccaccccaaactgtgctccaggtgtctcctgaagataaacacaggggaacgcattgctgttcccacctaatggaagtagctacttactgtatagtggttgttacatgccaggcaatgtcctaaactatcaacatttcaaaagtgaaacaacagagcctcagagaagtgaagtaacttgcctgaagtcacacagccacaaagtggcagagttgggtgaatctgccttgaacccagacgggctcgaatcctgggctcccaacatgctagggaagtgttggctgtggtggcagaaagcactagcagggaccaagaacaggagaagggcagtgtttttatgaaaaacaaagaacagggaaggttagagttggtgttaaaacataagatcatggaaagtttcttggaaattaagcacatgctgttgaacagttactcaaatggatttgcccccaggagctgctgggtgatcaagctgcaacttgcataacgggagcaagaaggtgggaggctctaatcctcggcaagctcggcactgcctctcctgttaggtgaatgggcagatctgcttcccaggctgcggctgtctgcgtacggggatgtgtcccttgcctcctgtgggctgcagagaggcctcctctgcgttcatgattgtccttcagctgacagaagttttaatactgtccctcctggccctgtcttgtataagcagtgatctcatcccttctcatctcttcccttccccatttaggactctgacgcagtacagttaatctgtgcayaggaaagaagagctgtttgaagaggttattcggtaaatgcagagaatgtctttgtagtataaattattgctctatataaaactgcttgtaagtttttgttggtggtgtttttttgtttgtttgtttgttttagagatgtggtctcactcactatgttgcccaggctgggctcaagagatcctcctgacttggcctcccaaagtgctgggattataggtataagccacagcgcccacctggttgcaagtttttaaagttttgctaaaatgacaggcatatgaagacattattgccaactatatattgtcccagaaacaaacattcatcctttactataaaagtcttctgcgtatgggttctctcccaaagaagggacagcaaaatgctcacagccagctcttcaccccatgtgcatgtgccaggagagaagcccagagtccttgcaggtcacccaatccagctcccttatcactggtgccaacaaggcaatgttttctaagggaagggaaaccaacatttatcgaacatgtactactgcctacagcactattttgggggctttttatttcatttcatcctatgaagtagctagaggtaaatataatccccactttgcagaggggaaattgagaggttagtagcctgtaagaagtggttaagaatgtgtttgaacacatatctataagccttaatctttccattagatcaagctgcttcccattagggacataaaagaatcctgtgttgccactggtggtttttacctcaacataccctaaagccagagactcccatatactaaggtggactcatcagattcttgtgggtccatatacttgagcagctagctaggtatacttattccaaagaagtagctagtaggtaggcatggcagaaacttattagttgttcaacaaaccataccccttcttcttcctaagcacccaccttgaacacatttctcaccccaccttgtggaggtacagccatgtgactgttctaggcaacggaacaggagttcacctgatgtacctatcacttgcaggcctggcccataagcccttccacaaaaaagcattctctttctatacctaccagatgcatggtggaagaaataggaaggccctcaagcagtggttctcatcgttagctgttgattgaaatcacatgagagctttaaatatcgccattgtcaggctgcatcctagaccaattaaa

SEQ ID NO: 95718 - DNA, 58760 bp, Homo sapiens
  misc_feature (1)...(58760): n = A,T,C or G
actgagaatgaacctgacctggttcaaatcacaacctttgccacaccatcttgggggagagcacagaacaggggacacaggtgaggtcgaggtgccaagactttacagctgagtaataaccaggctccctgctctgctgaagaactcacactatctcagacttaagacattccccagatgccaggttgggaagtgatgcttataacttcagaagacctactctcaactggcatttttctccaaggagacagtacaaggcctaccacagggctgctttctttttggtcctctatcttgagcacaggagcatttgagcagggctctttaaatttgtctgaaagacattccaaaagttggccacagcatcttttcccaagaattgatctatggactcagcaaggaggatcaataagaccttaaatgacctgaaaggacacgccagatccaaagaggctgcaagacaggtctccagcaaatacatacaggaagggctggcttagcatcaagcacctccgggtgagggctgcctgtagatcgagggttgtcatttcagtgccaggtcccagaaacactctaatcaacctgtctttgtttgtgactgagtgaagaggaccacatgggtattttcatttctggatattggattcaaagccagacagtcccatttggaaaatgaagaggacactttgccctccatctatgttatagtagatggaatctgcatcctcaaggtggcgttccgttgcctaagctatcatagcaaagagccaacctctccactcctgcacagaatagaaatatctttgagctgagtgcccaggaaaacttggatgactgtatcacaggacaggccacgtgggtcttaatatgtctctggtctctttctcagaaatcatggtagcctaagaaggttggcccactgttgatggcttgtgaagcagaaatgaggtgctttcccaagaacttgagaaccaggttgctctcagaaagtttgactaccaaaatctgcacactcaatggttttgactagaattcagtgggcataaaccaagagagtgactcaatttgtgactgagaagtttgaggattacctcaaattcccattaaagtgacttggctgtaatgccaggaagatagagaatgtcattatgacttagaaagtgtaaatctgcctaatgggctgtataggacgctgtgtggagaatcaggtttggagaaactagagcacggagaaagaagcttgaagcctcagaagccatagggcccatctaagcagaggtgagtgggatgggtgggcagcctcattctttcagaacactgtatcagagtatttgtcttgtggaccacacaactaatgtccttcattctactccagataactaagcaaacttttggatggaatttgtcttctcaagtgcatttatttatatagagagatcttttgccctgacagtgtgagtattctgatctgtccatcataattcaggcatacatctcagtctctcggggtctagttaatgtgagtccacttgaggaaggtcaagagctgacccttgatgaatgttatgacatttgtggtaaataggtcagctggaaatactcctctgcccatcctggatattgtagtgtcaaaagagtataccatgtacctgccctctgcaatgtctacttttgcagaggaccaattgcaggactcaataatcttaattttagcctagtaaagtaatttttcaaaaacaattagagaaaataatatctatgaaaacacatttggttttggtggcggtttgtctttatttttcaagtttctgcaatcctattgtttttctaaagtaatttctaaaacagatgcccctttgaaaactatttccaatttttctttgtgtgtgtgtgtgtgtgtgtgagggttttttttgttgttgtttgtttttttgagatggagtctcactccgtggcccaggctggagtgcagtgcagtgatgccatctcggctcattgcagcctccgcctcccaggttcaagtgattctccttcctcagcctcccaagtagctgggactacaggcatgcaccaccagtttttgtatttttgtaatttttgtatttttagtagagacagggtttcaccatgttggccaggctggtcatgaactcctgacctcaggtgatccacctgcctctgtctcccaaagcgctggaattacaggcgtgacccaccgtgcctggcctcattttttttttttcaatcatttcactcagcagcttcactaggcccaagcctgacataagagttttcatatcccataatgcaaaaaaccccaagaactctgtgaaggaacaatattggcccagagtcgacccaaacagggagatctgggctgcatcttccctcccctccccgccccagaaagtctaaatttagtttactggataccctgcaatgacattaacatgtcattgcaacattaacatgttgcaaaaacaagaatcaagcaaaagagaaagaggaagcttaatgtggcatgaggtattttaataccatggcaactgtggtgtcttctctattatttaattcacttccttaggtcaggttattctgccctctctctcttgcacttcctgttgctgtaatcaaatcaggtcaccctgaatctgtaagtcttcttcctgactgcactcatgtctatttccagcagaatgaattttctccatttctttctttgctccctggacctttatttggtgcccttgatgtccctgctcttcccagtgctccacaagctgcaaacgcttccctttcatccccatctcctcccccacccgtctcctcctcgctgctcctctcccagcccctccctccagcttctgcagttgtcactaacacagttagccacttgattagtgactcagtgattcagaacccaggaaccttggttctcctaaaacttccatgcttccctccctagagtcaagataaaggttctcccctcacctgcctgcccagatagagccattaacgtgagaggacttgagtattcagtttgttggagttgccctggcttcttcccatttcctttttatgtgccttttcctggggcttctcaggctctatttaccttttctccagaaaaggtggacagagaaggtttgagcttcgaatttatgtagcccaactcttcatttacagatgggaaaacgaaggccccccccccggcccccgcagaactgaattgcccagttgcttggctagttcttggtggaaccaaaacagacaaagcaaaaactcaatcaaactggctaatttggtgggaaaaaatcttgtgaaggagtgagcagtgccaaaacgagacttgatgattatttaaaaggtctttcactaattttatccttgtcatcctgctggcggtgtaagcaagtgatggaaaccagagccaggccagcaaccataaagccaccagggcttctggagaggctctgatgcgacttcctaccgctgaggtctcagaggctcctccctcccaaatacatggagacccagaagactgcttgggcccctccactccctgccagcgggcaggatgaggagtcagtaacagccaacagtagtgaatcccacataagttccacattcactacttgtttcacaattcgcttagcatgcatagcagcgaattgacagaattgtttcccctaaatgtaggaaggtgcataaaatacaagaagcttgtaaaaatatatttattgcaaaagttatatcagtcttgtatgtaagcaccagccttctccagggaaagacaggggtggtagaatgaataaaattaactcagtattttgactgcttgctgcaatggaagagggaattatgtttcccaagctgggtatgaagagaaggaatatagccttggaggcaatggaaactaagccagagcagcttagaaaagtcacccctcctcctgattcaagaccaaagacagggaaaaaaaagtcactctcagtgtgaacatgaaagcaagtctcacccagcctagatgttggatgtcctgtgcggtcccgttcctccctggtagagcttgttctgtctcactgggatctgccaagttaggagctgagccacactacttctgctgctgctgttgctgctgcacattgtttgtgattaagagttttattgattttctagcccatgaccacattggtggggacagagtacgacaggggaaactggtggaaagccaagtagaaagagagtttatgaaatcagctctcaatgaagaaaactgtgggaaagaatgcgatggaagcagatttggggccagtcgatgtgggaaagtagaacaactcaaaaatgctcttcagatttgaactgaaacaaagcactttgccaaaacataggaggagaatccagtctgtgagaaagcctcagcactgtttatataaaacagaatattcctatctgcaaaatcattgctgacaatgcttaacccacattctgtaccaggcactgtgttgtgttctaggaccataaataagaatcagtccgtctagagaaggagactcgaaacatacacaacatgatttgtaaagatacaagtggatcttaagagagtcataaaaacattttgccccagctttgggcccagagccagcaggaatgaatggtgggggaagagggatgggactgtgtccctgctgctgcctgcctcatgtgcagatctggtgaaggttctctgtagtttgaccccgcatcactactgactttgctagaaagaccctgctcccttcctgtccctgcctcttgtaggtccagaggacccctgcttcaccgacggcgggggccggggttggggggtgccgtaggcagggtttcaggtgttctcaaggtagtaggtagaaagggagcgcttgacagtttgggtgcttagtacaggctgggaaaacctcacagcaccaaggggacagttggacacttgcaacatgattcctcccctctccttcactcccacacgtacccacccaccatgaaactgtgtcttctgtacgtcttgagagatttcttccagcctcccagccctgcctcactgcctttgagtaagagaataaagtctttttgctgcttccttcagctttcagcattgtttttcaccctgaaaatcaactggaaactggggaagacgagtatctggtatgttttagtgcaccagtataatatgcaagggagggggtgatatgtaaaaaggttaaatgagaaaaaatatcatataattcaaaaccagtgagtgaccgagctcagtaaatgatggctttttaaaaatcagatataaaatcctgtttctgtggttcatgtttgaaaatgatgtaacctaaagtggctctttcatcttccactgcacgtacaccttctctgtttagccttggactcccagtatctgcactggaggactttaaggaggtcaaacctaagccaagagacttcagagaggtatagactaagctagagggtgtcttgcttgagccaaagaacctcagagtgctctagcctaagccccaaggaccttatgtcaatgtagactaagcctctaatctggaggaattcaggctggctggctgggctcccaagacacctctgcaggtgagcagcaccaggactcaagtctcctaacttctggtccaggaccctcccctttctaaaacagtcaaaggggctgaaattcctggaagtgtgtggggctaatgtccctagcattgttctctttttcatagaggaaaagctgactttaagaaacaagccggcaatacttgacaaaaatatctaccatttaagcacagagccaaaagcaaggagtagtctcctgggcgctggaagtattttgaaatccccaaagtctcattcattgatcagaaaacaaaatggaattactttttttttgctccctcctcccctccatgcagtagctgttcttggcgggtgcccagagcggcacccggtaattccacggtacattgtgtacatttacatctgtttaatcggctatttacagtcgccctttaccgccacctgtaagaggcagcgccataacgacactaagtggccgggccggaagccgggtgcccartggttttctccacttgaggacgcctgaatctgtgaagtggttggcacttggagaaacagagagacagctggggacatcacacgtacagggcgggaggcgcgggaaagaggcgcgccagacggagggtccttccttcctcgttagctccactcggcggctccttttccattaccacagcagcaaggaggaacctgcckagccttcggtgcggcttgtttcctgcctgacagagagcccgctgccatttggatttgaygaatttctgaatcacccgagggcctggcgacccgaaggagggcggggagtgggggcgctggggtggacccgccatcctgcggaatccgggccagataacagcccccgagctggggaaatcggcttgcggatgtgatgcgggaccgcgaggacacctgcgctcccttgcgtgtcgcactcgtgcagctcccggtggcgacggggtgatgtgggggcgagggtgagaggaagtccaggcgccagagcgtcagaaacgcttccttagcttccctggcactttggaggttgtctcgagggaacacggacagtgcacgacggactttcaagttgctcccggcacaacgggaggtcgggagctcggagcccctacgggcggtccaagtgtccgcgagaagcccgcagcgcccaggaccgcgttgagcgctcggggcgcgccaagccgcacctaagcaaaagagaaacgctgacgggccggaggcgggttggctgggacgcggaatacgcgcggccccggagcgcctttcgttttaaggagccttacttctggaaagggacagggaactgtcaatcagcgagggagggagcgcaccggcgctgggtgatgtcagcggatcagctgctcgataacaaagagagggtattacaggagaaagttgcagcagcggcagcggccaaggcggcacaccggagcctccgaggcgaggggcaagtgggcgaagggaggggggacgacggctgctgccgcagcagctgaaggccaaggaattgaaagggctgtagggggaggcagtgcgagccagccccgactgctcctcctcttcctcctcctcctccaaactcgcgagccccagagctcgctcagccgccgggagcacccagagggacgggaggcagccgcgcagccccgagctgggcagtgtccccagccgccatggatagcgacgacgagatggtggaggaggcggtggaaggtacaagcatttctccggggccgggggaggaggcgcagagggcctggagcgcggaaggagtggcgggctgcgaacagcgcggcgccgggccccgcggccgccactgtcccctacacgggtggccggttgcccggctcgggcgggggcccgacagccacggtcacgccgccgggagcgcgcactgcgcggcggggcgcaggccgagaatggggctccgccaggccgggggcgctggaaacgcacggccgctccatcccgcccggccacagcctgcatccaccctcggagttgcgaaacctgccccgcgctctggcctttccgcctttgggcgcggagggtgggtgcactccgcagggcagccccttgaggccggcggactccgcggagcaatcccctagcccagttttggccaccccgatcccctcccggccgccagcccttcccttctgctgcctctgcgccccgcggcggccgcggccccgtccgggtaggtcccccggcgcagcgcacggggccagaccaggcacgtggcagccgcggcccaggcggcagctcttccgaaaagatgaaatcattgtcgggcgacggacaagtctcccgacccgggactcgaacgtgcgccgtccgggaggcgggcagccctcccctcagctgcccccragcgaactcagtcaggcctccccctcccccttcctgcttggctgggatgcagccgccacgctgtgcaggcgcgccgcgagtcygcaccgagattgctgggtgacacttaactttctgaattccatgccgttggctgtgggtgatatcaccgcctcagtgtcgtgtttctccgccccttctcttctaccgcccctcccccgacttttctcgccactttgttttgctgagtttctccacctttttttttttttttttgttagttctgaaaaaacgatgtggggacgttatacaatctcgttgtttgtatcataggatgttatgattttgtaacagcgaatactggaaaatactctttagcgtatttatttggttccactmcatacagtacgtcgtgatgtttttcagtgtggtgtggtatgataccagaatgttttaaactaagcatgtgagtaaataatttttagctgttggttgaatctggtttctgtctgatttgtataaacacaagttctgacgaaggataaagaaaaaaagtggcgacactacaaatgcataaggatacatggttattgttacactagggaaaaatcagttttaatgttttcataaacataactccctttgcagtgcttctgagatcttaaggggagattaagcagactaatatttctgaactcttgaaaagtatccaatgtaatgccaatattaaaacttatttcttcatctaacttcgaagccaattaaagactgtggtttttgttaagaaaattttcaccatgttgtgaactcacagagctatttatctctctaataaataaagccaatgttggggcttactggagtgaggcccagatacattgattgagttgatccacagggagccttctgagaagttaaaagttgttgacttcttgtgcctccatgttgtgaaagataaaggaaaaatgatctcagattgttagggcttgctctctttcttcaacgtttacttttacttgtaaaaattaaatacaaacccttaattgctggtactgttctccatgttaaaccacatccattcccctttgaagctgtttacaaacatatgtccagttgtccatagtcctcaggctcctttgcagactgtgaccaagagctttagaaatggcagtattgttttttgagaacatccactggattcgaaaacagggaagttcatataaacagggatggttttgttttatagggtaattatgtacattattgtccaaaatcagaacccccttgagaatgagagggcacactattaataatgatgctggggcaggtagcttaagccttgaatgtctggggcaatctgggacacatggtcactcagttgtagctaactaaacaattagagyagcacagaatctttaaaagcccctagaagcatctcaggctctaacttgcacagtgccaggagtgtgtgtgtgcacatgcagtaaaccgtacctgtgcgtgcactcttgtccagccattcttggcctttttagtgctgtttgcaatagtctttacataacatctaacacttacataggggactggtataaactgcttctgttctttcccaaagagaagctagtctgaatatcttagtgtttaagtaccaactaatctacctctttccataaacagagcctctgttctcagtagtttcattgtcatagctattattatcattgctataattgtttagttcttattaagtgcaggctctgtgctaagtgtttcacagacattatccattcagtcttattcagtcttatgaggtgggtactaatattatcctaattttacagaggcgggaactgaggcatacagaagttaaggactaatccaagaacactcagtgaggtggagagactggcttggacttccaaaacagccctccaccagaccaaactgtcttcctacattttttatttttaatgagttagtcaaatttatgaaacacttgataactgagtttggaagcaacagttaaatattatgtcagtgccattttttatcagtgtaactctgtagaggttggttctgacagagttcagtgactttcagaaaaatgtatttggggagaaagaacctgtgtcctctgcaatagctatcttttttcttcttcattagagatttactctggggaagaaattagtctcttcaggattgagtttaaatgtcttatatatcatgtgcatttggttctctgtcagggtatgattgtaactctgggaaagttctgaactcagagtggacaattccctgaggtgaggggagtggcggaggctgtgtcgagagagtgttctgtgtactgtgttggctgtgctcttgtgggaagaaggcagcaagccctgggcctcagaggacctcagagctccacctgagctctggtgtggcttttggaaaacactttgagacacactggttcagtgaagagtgatgtttagttttccagtgttattcccctgggcatctggaaacagaaatttatcacagcatctatttctttgtctacccatagatacaaagatgaatatgatgtggtctctaatatgatttcaaataaatatatctatacagatgaattgtgatggttgagaggaagtaaaaattagttccagcttagggaagtcaaaggggaaagattttccagaagaggtgccatagagctgagtcaggttgagaggggaactttgtgagtgaagacacggaggcatggaattctgcgggtgcacccagagaacagtcatttgattttgctgcaacatggagcttacaaggagaaaagtggaggggaagacagggaaaggaggctgggtagcaggctgagagcatggactgtgtgctggaagccatggaagccgtgggggctctttagaaaagggaatgacaggatcaaggctccactccgggaagaggaacaggcagtggccagcaggacagtcagaggggctgacacagcagatgaggtaccttgaagtctctttgcagtggtccagatgcacagttatgatggcaggaaaaacagaagggcctggaaatgtgtaggagacatggaggaagaatgatcaaaaaggggaaatatcagaacaaggggccagaatgaaaataagcagctcagtgttccactgccacaaccccttcaaaatattaagaatattttttattaacactccccctaatatcagattctacttgtctctgctaagagtgctcatgccctgtatctagggaaaatgcatatgaagtgtatttgtagcaccctttctgtgtgggccacacattaaaatcatgaccctcacaattaatagatgaacccttgccaacaattacccttaaaaaaaattatccaggtaacaaactttcatatgtacccccggatctaaaataaaagttgaaataattttttaaaaacctaaaaaattaaaaaattttaaaaagatcaaaacatcaagttatgtttttaagagttggtgattgaatgcatcaccaggagggcatgttctttgcattaaacagaataagcttgccttttattattgttgttttttgtttttcaatttatttatttatttaatgagatggggtctcactgtattgcccagactggtctcctgggctcaagagatccaccttggcttcccaaagtgctgggattacaggcatgagccaccgcgcccggcctattaattgttgttttttaaagcaatgttctagtgtacaaaaccaacagtgtgtgcgtagggtctctggttctaagggaaatactcacacgccactctcagatctcttgtgagtaagcctgagacattaagcagctgggtgtctgatccagagggaatttactttgctgagattgagatgtacattgctgcttagaatataggcctggctcttatcagattcaggaagaagctccctcagaagtaactagaggggaaaattgtaactttctatctgttcaatagataatgaccatagaataaagtgaaaaagtagacttgtgaactgatacttttttcctttctctaacttctgtaaatatttaaaatcatgctacagacagatacacagaacattagctccggcaaccttaaaaacacagagcagtcattcaagttaattttccctgttgcttgggcctggtattcaccctctgttcagtgggaactcgcctggaaggctgttggctgacttggcgcattttacaaattgacctcatgcagagcaaggaggactagtgtttcccttcaagttagataacacttggaagagataggactttgcaaccgggayatgctgttggaaacctggtggttctgtgtgaatgatcttaaccacaaagccttcttccacttccctgccagggacctgggggttcctacctttttagaggtaccttcttaccatcaccaaggaagagtgtgttcaactagtttgccagtgtctagaatgggaattaaaggatttggagaaggggctttcagtattcatcagcacactcagtgtggcaatgtctcttgggcaagtctcataaagcattggtgtcttcatctgtaagatgagaatatgggagactgttttgaggcttacatttgataacaggaaagcatataacccaatgccgatcatagtagattcatacactttttttctcctctgtttatcagtacccctgtgcattaaattgacttactgacatgacaaaatattacatgatcttattgtccaaatattaatgatcttattggcatttgaaaaagttatgtcagattctgttctagcactaatgttgaaagaagatgtaagagcactgcaacctagtctcttctctttctcatggaaagtctctgttattgttttggttgtggctgctgttttagacataaagttctactgctaggaaaactaatccgggatattaaatattcagagtggaagtctcgaatgatcacaacccttaatctctagttcctttaattgatcacaccctagggatgtaaagaaaacaaaacaagccaggaagaggctcctgctgtcgtcgaatagatttcagaattctctcacaaccagcaatctaaaagccttcagaatgatagggagtggtcacatgtccaagcacctccttaatgtgcaaggtcaccagagtaatggccatcatttggtagctctcccctgaccttgtctctcccaagagattaagatgatgatagggctcctcttcatttgcctgttgaaaggcactgaggccaggtgtggtggttcttgcctgtaatcccagcacccaaagtgggtggaccacttgagctcaggagtttgagaccagcctgggcaacacagtgagaccctatctctataaaaaaaaatttttaattagccgttttggaggctgaggtgggtagattgcctgaggtcagaagttcgagaccagcctggccaatatagtgaaacctcatctctactaaaaatacaaaaaaataagctgggcttggtggcaggtgcctgtaatcccagctactagggaggctgaggcaggacaattgcttgcacccgggaggcggaggttgcagtgagccaagatcgcaccattgcactccagtctggacaaaaagagtaaaactctgtctcaaaaaaaaatttttttttttaaattagccagttgtggtgatgtctacctatagtcccagctacattggaggctgaggcagaaggatcacttgagcctacaagttgaggttacagtgaactatggtctcatcactgcactccagcctgagtaacagggtgagaccctgtctctaaaaaataaaggaaggaggaagagaaagagggaaggagggagtgaggtaagaaaggaagaaaaggagagaaggagggagggaggcaaaaagggaggaaggaaggaaggaataattcttcatggagtggagttgacatttttgttgtcatctcaactgggatcagtactatcctccaagggcttacagtatgttatatgacactttcaactttccctaatatctaaattccattgctgagggtgcaccttcagtgttttattcagaaatagcacagggctgaaggaaggtggaaattaatttatattggacatttttttcttagtgttcagatttattgtaattctctcaatctaaagtggaataacacattttatcaaacataagcttttaaaactctgaaatatgtgaactgttttctatggtgaaagcattttcaacaagttaataaatgctctagtatgaggctaaactgattatttggatattaatacctaaatcaaaagtaggacactgaatttatatgcctaaatttaacttgatcgcaacaacatttcactaaaaaamgctcttagcaatacactgagtggctttttttaatgaaaagaaaaaagcaaatttaatttatttcaatgagagaaatggcatcagatatttagaaaataattgtccaagtgatttcatatgactcaaatgtcattgaatttatgtcatgtacaattagtttttgagcgagaagaaagcaattatggcctagttcccttctgaccattaatttcctgggcctttcctcttttgtgttaagaggaagggatccatattgattatgatttatttaagtagatgtgtcttattgtaagatgttctaggtaacccattgtatacagagtcagatgtagcaataaaacactgtagttgtttgcagctattttatgtttatgtaattaatgatacaaataaagagcatatttattctttttattgttgttgttgagatggagtttcattcttgttgcccacgctggagtgcagtggcacaattttggctcactgcaacctctgcttcctgggttcaagcgattctcctgcctcagcctcctgagtagctgggattacagacgtccgccaccatgcctggctaattttttgtatttttagtaaagacrgggtttcactgtgttggccaggctggtctcaaactctggacctagggtgatccacccacctcagcctcccaaagtgctgggattataggcgtgagccaccatgcccggccgcatatttattctttataagagtgtgtacttaccatcttttccaagggctaatattcttttatcatgttagaataaattatttgaggagactaaagctttcactgtggtagtatggtttgtgttgccttttatgtctgtgagccatctggaagctacatttcaatgtttaatgtccctgcattagacacagtgtttaatgttttcataccttttctctccatgacccaggttattaccccaagaaaaagccagtagaataactactgccttcattttcacccacctctgcaaaatcagctcaccagaatgattgggaagacaccaataaggtgattcctgggttttgtaaaacatgtagatagtaataaaaagcataaacattgactgtaaatgtcagtattaaactataccaatctttgacctaggaataaccagtgacttaaaagtccatgtaataacttctgctgatgttcacaatcattgcttaaatgaccatgtgcatactctggctccatttaaaacacaagccctctgagacacagtggtggacggtataggataaggttattactaaacattcaaagctgaaagattttgtaaagtaaaccagtaggtttaaggttaagcttaagtttaaggtgagaaggactctgggtttctgtgtttgtacaatgagctatataaatcttagggcagttttaaagatatgacactgttccttgtgtgaatataacaataacagtgagattttcagactggctagcagtcctccacatcatattatagaatgatgtataaaatcatattgcatacttaatgttctagaattagataatttattccaaagactgtgtatgtggcaattgactataaaacagtggaatctcaaccacacttcagttaagcatgagagattggaggcatcaattccaaatatgaggactctcgggagagtacttggtaaaytgtgacatgccctgcagataatattactgataatgactctcagttccaggtaaaaagcaagcttatttaaagttcatattctggaatgtgtctaagtctgttctggacctatcagttcacaaagtgtacataacaatcaatttggtactgctggtgccgatgaggtgagaaacttttgcacgctgactaccctttctttccagggaggggaccctttggcagctggaggggagttgggtgggggacttgtctggcagcatctgaatgcttagacgtcagatgggaggagcactgaagatgttaaggtttgccttgtggttccctttctccagggcacctggacgatgacggattaccrcacgggttctgcacagtcacctactcctccacagacagatttgaggggaactttgttcacggagaaaagaacggacgggggaagttcttcttctttgatggcaggtagcactcacagttttattttgttctttgggggtaccgaattattttatgttaaggactaatacaaacgaaagaattcaagtggaagtttttctacaatttattcaatgggtaaaattaacccctacctgtaggcactgctttggtgactggggaagtcaccctgtggttatgggacagccagcctaaggcttagctcttgtcatcactgtctcccagagtgtgcttggccaaaagataccagatttgggggcccccatcttgcataagttggttacatggtcacccaattctttgatggatttcacttgatcattccggtagcgcatctccctgaagtcacacaagtggggatcgtttttgtcagtggccagtttgcacagttccagtaaagtcagattcacacttttttccaagggtcacacacactctattgcgttcagcacactctcccagatgtcacaatctggcatcttagtaccccgaagcaagattctgccaccttgttggttcttctgcttcatcrgtttctcagcttgttgcctctcctcatgagattgatgaaaaaatgcttggcaaagttcttcaaagccacatcattgcagtcccagtaataagacataaacaggtacacacaggagggcaactctctagacttcaattttttaaatgcctgtctttgggatagttggtctttttgtgtgataatttaatactaatgtcagaactatgattttccacagtgtacctctagttacagtatttttcacaacaggatttcttttattttactctcatcccctgtctgaggacactgagagggagaggctccttactcgcttgtgatagataggaatgactataggacgtttttctttcaagaagagatggggttgcccaggcccagcttcccaacaatgacttttaggccctgtcagcttcaggagcaaagagtgaccatgtgaatttctcaagcatttagtggaattcagagccgcaaaagggctagctattttcagacccgttggttgggtaaaatggaaactgacttcaccaaagcaggttataggattctgtaggataccgcaccacttactaaactcctgacattggtaataggccagagcttcctttgggaaagaaaatgtctaagctgacaactgaagggtgatgtcagggactggtatgtgacccagaatcccttttctgcaggcaaagtgcgttgttttaaagggggtaacatttctcaggctctcaatgatctgatgcaatgaggggtgagaacagcaataaaaaccttctaaatracttttgtaaaatttcattttaattataattccaaccttcatttccccgttgcccccaaccccacctttttgtaaagcagagttttgcttacaaactgtaaattttaaattgtcagatattttacttcctttcttttgggtggatacttgagtgccatagagrcccatttcagtatgttggtattggcctgggcatgttggctcacatctgtaatcccagcactttgggaggctgaggcaggaggattgtttgagcccgggaatttgagaactgaccagggcaacatagtgagaccctgtctctgccacgaggtgtagagaccttgggaactgtggtcccagctgctggggagctgaggcaggaagattgcttgagcactccagcctgggtgacagagcaagaccctgtttcaaaaaaaaaaagttggtatcactgcttttctttcctatgactcytttaacctatccagagggaaacttttcctgccccatttccactgcaatttttttatagctcttttttctgaaaagtgtcacttttaaccttattctgcaaatttttttattcgttcaacaagtacatatttatgtaaatgtctccttcatctccaaggacagaggtttccttgagggcagaatctgtgtctattacatcttttatgcttcatagcactttctcttaatttgatactaaaaagaagtccttgctaagtgagagtgggagctgaaagagagggtagaattcacccagaacaccccctccgcctccccctccacacacaaacacacacacacacacacacacacacacacactttaaatctggtagtttgatgatgatagccagtaactgattgactctgggaaaacagtccagcagatttgtttgaatttggtgttggttacctgcttgctttatggggctgatacacagagtactgatgggctagactaaaattctgaaccagtgtgccragaatgagctacttgttagcttcaagatgctgatcccctcagccctagggtaagatagcaaagtggggcctgagacttcctgggcacctgtcttctcatatccagctagtaacttctagccccaaacagcttcatccgcttaccccagtgtgtcagacaaatgcattaatttgcaggtgtgtcacgatatgaacaagctgaagcaccaggccaagtggcagcactagcccagtaactatctataggctagaaatacattcattgattttttttttccttttgaggcacgaattcaccattctttttattttattttattttattttattttattttattttattttagatgggttctcactccgttgcccaggctggagtgcagtgccatgatcacagctcactgcagcttcaacctccctggactcgggtgatcctcccacctcagcttcctgagtagctgtgactacaggtgcatgccaccacaccaggctaatttgttttgtattttttatagagatggagttttgccatgttgcccaggctggtctcaaactcctgagctcaagtgatccacccgcctcagcctctcaagtgctggggttacaggcgtgagccattgtgcccagcctaaccaattcactaatttttgtttgtttgtttgtttgtttgtttgagatggagtcttgctctgtctcccaggctggagtgcagcggcgcgatctcggctcactgcaagctccgcctcctgggttcacaccattctcctgcctcagcctcctgagtagctgggactacaggcgcccaccaccacgcccggctaattttttttttttttttgtatttttttagtagagacggggtttcaccttgttagccaggatggtcttgatctcctgacctcgtgatccgcccgccttggccttccaaagtgctgggattacgggtgtgagccactacgcccacccaattcactaatttttatatctaccactcaaacaccagtggagatgttgattaaatagaatcaaggaaaaatagtgttagcgaggacctcaagagattatcttggttatcttcagatagacgggagttaatatcttaaggggaaaatgtcagtatcattggttttattacacatgatggaacagtgtggtgacaggatctcaaaaggtcgtcctcatcttcttaaacccaaatactgatcatgttacgagacatctgctaaaaggatttgctgtaaaaattagtaagagagtcttacaactgaataaaaggtcgagaatctaccagggttttctaaggcagatgtgggatttgattatggataagtcagttgtttctacatgaagcagtttttatttatatttgtctattactttttctccctgttcccatccccggcttttagagcttgatgtgttgggtaaaattaagtgggaatgctttgcctttattgtcagtcatcaacctttggtctggaaaaattccttaagaaaggctggcattaggttttgaataacaagcgaggagacaaaaactttgtattgaagaaagttgttgaaacctgttatgctgatttgtgtccccatcaaagagtttgtctgaaattgtgggaacccatgttccgacaaggaaagagacaaggaaaatcacagtgtagtaatggaagacttggcctaaatattctaattttatatgaaaactgaaccccagaatatgatttatgagaagtatccaaacaaatataaacatatcaagaaaattatagaatcagtgtttcccttgacatcgaatgagataaatctgaataagaatttcaaatatccagataactaggaaaaatagccctgtgaaattttaaaaccaaatttgtaaatagaagcagaatattttattttatttttaaattgcaaacataacaaatgcttagtggaataaaacaaaacttcaagaaattcagaaatgtgaaagtgctcccccccgcttttttttaaccccaacccatgccatagaagtaattactattggcagagaatttgcacatcttaactaaacatattcaaggtaaaatatagaaatagscatttttaaagttttattttaattgacacataattctacatttttctggggtaaagtgtgattttgatacataaacacattgtgtaatgatcaatcagggtaattagcatatccatcacctcaaagattcatcatttctttctggtgagaacattcaaaatcccttcttctagctattttgaagtatacaatatattactgttgactgtagtcaccctgttatgtaatagaacaccagaacttattcttgctatctaactgtaactttgtacctgttgaccaacctctccccatccttccctcctgccttctactccccagcctctgttaaccactgttctgttctctacttctgtaagatcagctttttcagattccccacatacaaatgagatcatgcggtatttgtccttttgtgcttggcttatttcactttacatgatgtcctctaggatcattcatattgtcacaaatgacaggatttcgttttgtttttatgctgaatagtataccattgtgtacgtatataccacattttctttattcattcatctgttaatggaaacttgggttgatttcatatcttggctgttgtgaatagtgcaataaacatgggagtgcacatacctcttcagcatatggaagaaatagctatctatttctaaatcagtttaaatagcaaaaatgtacattgtttacctgttcacaactgtctcagattcaaaatgtttgctagttttgagatcataatatttagtcttttcttcattatatgacaaaatgtggaagagaaaagctaagttactacaaccagcttattaagtcagaaacctaaaatcagaatactcatgctttaccagatggtttgccctacaaataaggaatgaatgagaacataaccttattttaaaaattgtttttaaagtagmtattgtgtccattcccgcctcctctattaaaagggaagaagaaattatcctgagattcagtaactgggacttctttacatccactcggtcccgagataaaggaattgatgcagcgtggtgacaggaatcttgaggctttgttggtgtggatctggagtctgtctggtacccgtggatttgctggagtaccatggggtgtgatgaaaacgtgtagtgttcaaaatactttgatacacacatctctaatttttatactaatcctagattctggatgtttattttcatgtatctttctttaattgttctattttgaccatgatttatgaacctaaaggcaagacttttcacaatcctagaatggtgaacaagaaggagatrtttcttcagattggctttgcgggggctatggaatattagggtcatgtggtttttagcctaattatgaggtggagatgaggtcattcattcagctttatttgtttatattgttgatgcctctccttcacatgccaatttgattttaaaggatttactactccacggcttctttctcctgtgcccaagtccttttctgatgttgcttggctacatttgccaaaagggctccgtgtaatttatcactggccaaataacctgagcaaggtcacccgtctgatgagccactgagaaaggatggcattctccaggtgtcaagtctatgcaggatttcttgtgtttagttttcagaaagtgcttgatcacaattcagagaaattggagttggatcggatttctgaagtcatgcattccaacctcccacatgcggcaaaagtttcttttgtgttcctgacagtcctctagcttttgttggaaccagacccagcaaatatattcatctgtattccaacaaacagttctgattgaggccaaaaatttttgtgacatgcaagaagagagtgcaaatgaaatgggtaacattgaataactaccatttcttcaacactggacacgtggtcttcataacaatctgggaggtgggttttataatcccatttgacatacgaagaaactaaggcacagagtggctaaataacttgccccaggtgacctagttaaaaatgattggagctgagactcacaccaaggcgaattcaattctagaaccaaccctctttttcactacatctgctaccatcttccaacttgaaacagggaaatagctgtgggcctgactgcctttcttccattctttaattttccttgaagttactcatcagccatagttgtgaaatgttaaaaggagttctggagtgaattcagttatgttcttgtaggggccttaacaacttgggaagagcttggaagattgacagaaggttttcctgaggaatcaattcagaagaattctgttctagctatttggcctccctgaacttccatttacttaatttgtaaaacggagataattatacctgcttttcaggattgctgtgattgaatgagaaaacctgtaaagacccttaaagtgtaggacactcagaaggtgcttaggggaaaagatggattattttatcattgttgttgttactattattattaataattattaggagagtgtcttagtttgggctgctacaacaaattccatagactgggtggcttagacaactgaaatttatttctcacagttctggagggtgtgaagtccaagatcagggcagcagtacactttgtgtctgtcgagggcccacttcctggtttgtagatgtccatcttctcctgatatcctcacatggtggaaagtaaagggagagaaaacaagctttctaatatctttttataagggcattaatcccattcaagagggctctgcccttgggaccaaattacctcccaaaggccccacctcttaataccatcatattgggtgttaggagttcaacacaggaatttggggagacacaaacatttagtccgtagcagaaagttttcttgaggtttgtttttagaaagcaaaactaaatttcattattcactcttcaaatattttactgttactttgaggctttgtaataattagatctatagtagactcatagatcttttcttaaaggatagaaaaagaaaaccttcaaagatagacagtatgttatattatatggaagcattagagttctccatcaaacttgctccaacaccttgggagaagttgaagtttctggctggaaatagttctagcagatgggttgcatctccttgttgctgctctttgcttagtttgcagtgtttcaaaagataatatatattgtcatataaaataattcctaaaataatgtatatactaagggtcacaattcaatttggttagagatgggagtttaaggagtgattattcatttttaaaatttcctctcggttattgtattgctatggctgacaaaaggaagggaacacagtggaaggaagggaacagaatttaggccccaggaggcggaargtccaaaacctagaccccagaaccatgaagaaaagccaaaactgttaagtctctaagaacagttttctatattcaaacactaacaggaatttttaatgaaaatacagcaatatctgaataaaatgcagatatgtaagtctaggaaaacaactataaaatttatccatttctttgtaagttagatttcttaactgatttctcgaaatttaactcttaagtacaagaggttggataaaacaggaaaaattgatctatgtgcagaaaaagaaatttaattaaaatttatgttttaatttcctcaacattttccagtttgattcagatgatggtaccaggaaaatcaaacaattgcaagaccatttttgtaatttcttaacatactaaagaatttgccaagatgttgaaaggaactttaagaaaatacaagttaagcatgttaagaacattatgtatagtatgatcccatttttattaaaataacaaaaacagaaggtaggaaaatgcgtggtatagaaatgaaaagagtggccaggagcggtggctcacacctgtaatcctagcacaggctgaggcgggtggatcacttgaggtcaggagttcgagaccagcttagccaacatggtgaaaggcatctctactaaaaatacaaacattaaccaggtttggtggcacacacctgtaatcccagctactcaggaggctgaggcaggagaatcgcttgaacccaggaggtggaggttgcagcaagccgagattgcaccactgtattccagcctaggcgacagcaagacttcatcttaaaaaaaagaaatgaaaaagtcttaaatactgtatgtgaaattggggaagaggactgagaatttctactttctgcatcttagtattgcttgaattgctttttatgtgtttgttttacaatgaacacatattgcttttttttagaggcatttattttcttccagtcaattggatcactcataaattactgcagataggaatttttcttgcttgttctttaaaaatagatttaatgcagttttataaatttctttatttcagtgtttcataactgtttctttgatgatgcttttttttgatgatgctttttaaacccagttttttagtagaaagtttgccatcatacacatgaatatgcatgtttaataataatagctgctctttatttaagcaatcactatgtgccagaccatattctaagcatttgatatatattaacccatttaaccgttataacaacactctgagtagtccagtttacaaatgaagaaatgaagcataggaagtttaagaaactttcctcacgtacagcctgtatgcatatcgaattcatataagaatgctccctgcacttgaataacactgttatgttccttctcaatcttctcttctcaatgcaaaatgatcccagtttccatttctattcttttgcttaggaattatcaacatgaagtttatatgttggggggatacgtggatgcatatttcctaatttgttcccataaagggcttacaatctagttagagaaataggacacgtaaatttaacatcgataaagacatggagtgttctgtaatagtacatgcctaggctctgatgaataatgtgcatggcagggctgccaagatcaggatagatttacttttgtaggaaaacaaggttccccgcggatgatgagtaggctctgtttaacacagtgaccagcagacttgctctgaaacccagctctcaatccaatttcaccaagaaacattagaaggctatttctatgtacccacttttcaaatatgacccgatattaacattttaatggatacaagtctcgctctgttgcccaggttagagggcagtggtgcagccaggcgcggtggctcacacctgtaatcccagcactttgggaggccgaggtgggcagatcacttgagnnnnnnnnnnnnnnnnnnnnnnnnnnnnnnnnnnnnnnnnnnnnnnnnnnnnnnnnnnnnnnnnnnnnnnnnnnnnnnnnnnnnnnnnnnnnnnnnnnnnnnnnnnnnnnnnnnnnnnnnnnnnnnnnnnnnnnnnnnnnnnnnnnnnnnnnnnnnnnnnnnnnnnnnnnnnnnnnnnnnnnnnnnnnnnnnnnnnnnnnnnnnnnnnnnnnnnnnnnnnnnnnnnnnnnnnnnnnnnnnnnnnnnnnnnnnnnnnnnnnnnnnnnnnnnnnnnnnnnnnnnnnngcagtggtgcaatctcggctcgctgcaacctctgcctcttgggctcaagcaattctcgtgcctcagcctttcgagtagctgtggttacaggtgcctgccaccatgtccggctaatttttgtatttttagtggagacagggtttcaccatgttggccaggctagtttcaaattcctgacctcaggtgatcctcctgcctcggcctccaaagggctgggattacaggcatgagccaccatgcccagtctattttttttttaagacagagtctcgctgtcacccaggctggagtgcagtggcacaatttcagctcactgcaacctctgcctcctgggttcaagtgattcttgcacctcaccctcctgagtagctgtgattacaagcatgtgctaccacccctggctaatttttgtatttttagtagagctggggtttcaccatgttggccaggctagtcttaaactcctggcctcaagcgatccacctaccttggcctcccaaagtgctgggattacagtcatgagccactgcacccattggcttctttcttttttgatagaaaaatgccagagatttcagagtattcattattagtccatgattatttttgttttcaatgaagaaaaaagaaaagaaaaaaaatcataactttttttcccccggctggccttaaggattttaaaagtttgctcmcatatgtattatggaaagcaaggaaaaatatagtgtggaagctaagctaaataaaggtcagtgagtaaactttcgatatgagcagagctttttagagcagggattagcaaactttttctgtatgtggtgagagtaaaatcgaggctccgtgggccacatacggtctctgctgcagcaattcaacactgctgttgtagtatgaaagcagccatagatgatgtagaaaggaacatgcatggctttgttccagtaaaactttatttacaaaagcagtcagcaggccatagtttgccagcctcctctggaaagaacagttagagagaaaggtagtgccttgaatgccagtctaagaaacgtatattttatttcctcaatgacagaggattttaaaaaatcacttttatcaccctggagaacccagtttatgtgtgtaatatgccctcttttgtcatcagatttcatctaacttactattaaaagttgccaagaaagctaagctgtggcctcaagcagatggctgaaaaaataacgcagtaagatttgctttccaatgccttaagagtttgcatttgtgtactttgagtcagttgggctaagagggaaatagcagtttgttcttcgtactctgatagatgggatgatgggctccatgggtaagggaggttaggacaagccactgaatacagttgggggaaatgtctgcaagtccatattattttttgtctgatttgcaagacctgtttcttgtagatttgatcataaccctgagaaatattggcagactagtctgtcagggagtaatattctacccaaactcacacaggaacattttgaatgctgctgagagtccaaagtcaatagggttgccaggatgagcaaataaaaatctagttaaatccaggacacccagttaaattggaatttgctcaacaaaaaaagtaagtataattatatcccattcactatttgggacattcataaactaaaaaattatttgttgtttatctgaaattcaaacttagctgggaatcctgtattatacctggcaatcctaaaaatgaagataaatgaatagtttcttgcactacataaattacatcattatgtcacttgattagtacccttcaccaatgattttttttttaattgtgggagtctaatgacagttgaatctcattacttccaacctcactgttttagaattttgattatttatgcaagagctatgctaaagtgcactttattctcttcatgaatttaggaagcctatttgtcattgatagtacaaataaaactgaaagaaaactatttatctccttgggatactacaaatagtataattaccttttaaccagaagctatcattatttagaatctgcttttcatttaataattatagatcattcacagttgttcattgaaataagtcaagactttaccagacagagtcaggtgcagccacctaagtcctgatggcccgctttgcgtcccatctgctccagttcacagtgtgtcttgccagtctctcctataccattgtgtttgttttgttccttatccgctctagagcctcacacaatgcttgctactgagaaggcacactgtaaatgttgactagttgtggctgggaggccgagttgggtggatcccttgagcccaggagttcgagaccagcatacgtaacatgacaaaacctcatctctacaaaaaaaaacaaaaattaacccggtgtggtgacacatacctgtggtcccagctacttgggaggctgaggtgggaggatggcttgagccccaggaggtcgaggctgcagtgagccatgatcatgccactgcactccagcctgggcaatagagcaagatcctctctcgaaaaaaaaaattactagttgaattaatgaataaatactctctgcctatgttaaaataatcaagctgtctttgtttcaaaattttcttacattttaaattttaaaaataatttgagttggtctttccctattccaaattttagtacttaaagggaattttgggtgtttcattgcatagggcctttcagaggataacaatgaaaacatgttcctgaacttgcaaatatatattacaaggagagagatggagaagtgctggtaaaatcacgtgagcatccctgtgagctttcttctggtataggaccrtgggtctcaaactatcaggatgctaatgatatcagcagggtggagcattcagtcttccttacttgcccctactggccatgatcatggatgtatgtatatacatagayatacatacatacatacatacatacatagatatatagatatacttaaataaatccccatatgtcttccaaggagatggaagggatttcatttgactggataccaattacggctattaatgataaataatacattagtgacttgaaacaaatgtgtagacattcacacactttaagccacatttctatcattagagattactatatacaagccatctgaaagacccttgagaactaccagtgaattctggagcactcttgagggaaattagacatgaatggtttgcttgtggaacaggtaacaccagaatttctattgcctgaaaacatactcaagtgaacttgttctcagtttccatcagtagcttttttcttctctattttctccagcagagtaaaaggattcccaggaaccatgagattgggtattaaatctccrtctttcttctcagtcttacccacgtccatgaagcaccttttcctagcagtcgatgataatttaggaggctgcgctgaatccatgtcagggctgacacagctgggcatgcagttccttggatatgatcctttcttctaagagagtcaagtcatggtctgactattcctttttgtttttcctttcctcacagcaccctggaggggtattatgtggatgatgccttgcagggccagggagtttacacttacgaagatgggggagttctccagggcacgtatgtagacggagagctgaayggtccagcccaggaatatgacacagatgggagactgatcttcaaggggcagtataaagataacattcgtcatggagtgtgctggatatattacccagtaagccgtgtgactgttcactctgctggaaagtaacatactgtgactcttcacaatgaagagtaaaatgtattctgtgttagaacttgggagctgtgaaacctgagagtcaccacagctgacaccaagagtttatgaggcatgccctctcactgttactcactattggcttagattgttggcccttgaatccgttattaattatttttcagcgttgttttggaaaggagtaattaatcatgattaaaacaaattgagacaaattggttttattgtatcactaataaaggcaaaatatattgcttttaattcttttggcacatagagggagatagtggaaattttcattgttgctattagttttatttcctgtttctcatatgtaaaaaccagtccagcaatttttaatttgggagagcttactgcactgttgttacttgattctacaattccactaactgctttttaaggtattttatggtttatattgtttaaattaaggtgattaaaattaacttacctttgagtatttgatagcattttatgatatttctggagtctattaaagtaaaaagatatggcagaacccatggttggaaattaatgctctaatttttgtttgcatttcaaatgtcccatctgttgttactgaatttccagaaaatgttacagaaaatacaccttagaaaacactttatctttattttattttattttttatttattgagacagggtcttgttctgttgcccaggctggagtgcagtggcacgatcttggctcactacaacctccatctcccagactcaagccatcttcccacctcagcctccttagtagctgggattacaggcctatgtcatcacatctggctaatatttttgtgttttcttttttgagacagggtttctctaaaacctagtctcgaactcctgggctcaagcaatccacctgccttggcctcctgaaatgctgaaattacaggcatgagccattgcacctggctagaaaatattttgcttaatactttattttgttcataacttaagtcaaaatactctttttttgttttgagacagagtcttgytctgttgcccaggatgaggtgcagtggtgccatgtcggcttactgcaacctctgcctcgtgggttcaagtgattcttctgcctcagcctcccaagtagctgggattgcaggcacaggccactacgcccggctaatttttttgtatttttagtaaaatggggtttcaccatgttgaccaggcactggtctcaaactcccgacctcagatgatttccttgcctcggcctcccaaagtgctgggattacaggtgcgagccaccacaccaagctgaaaatatatttttactctgaaaccttatgattaaaaagtgctaataaaaagaaatgatcagttacatatataacaagaaaagtaaccccagctaaatccacttacacatcattgttcttaaaaaataagttataatctaggaatagggcataagaaaagaatgttgtaaaacattttctaagaattgctaaagcatttaaatatcctcttggtaggatccgtgatagatcaaaagttgtaacacgtactgcttaggagaagagaagcagaaagatcagaagcggtggaggtgctgcccagggtaggaggaccgaaacctggcctcgtgagtagccagggtgggcatcttgctgcccagtgctggggcgctgctgatgtgacagtgcatcttgaagtcaggggaagtggaactctctacatagagatgagtataggaagcaggcaaagtgttggattactagattctcctactacctgtcattttacttgtgacatagtcaatgaaagtccctagatgggatcaaagatgcgccaagattggtgaatggattggcgtcgctcaacatggttgcattttgaaaaccaaaaatatagctacattttaacctttagccttgattatcatattaaatctcaaagaagactctgccttaggaaggagcattggtgagcagaaaagcagcctttgtcctcttaacccctacccagtagagaaatgggtgtcagtaggtgtcagaccctggctgctcaccagtcaaattaatgatttctccccccacgaggaggagccagtgagcagaggagagaaagcagccgtttctttccccacactccctgacgcctgatacagcagaggaggaaatttctgtaatggrccatagcaggaacaaggggagaaaaaagtgatgattttccctacagtccacacttgtaagctcaccctaaggacagtgtatttctttcaaaaatttacctcgaaaaagtttttcatataaggtttttaattaaaaatatataactccttttggaaatgaaagaagaatttctactttatcattctggacaaataaattcactccctctgaaaccagaaatttaaacatttaaggggaaaggtgtgagaccctggaaagacagacttctgttttaaataaatagtaatattatcttatgttagtcatggattataagaagcacaaatgctcttatacccttccattcaataatcatcactaaaagcctgaaagcagatcttgcaggaagtatcatctccatttatgctcaattattaagaattaacttgaagagaagaaagagcaatgactatatccctagtgcactttctatccattaaaaatgcttctaagtatttttctttctatgtaagtgccatgattcatttttaaattwacatcccttttcctagaaggcaaaaaaaaaaaaaaaaaggcagcatttgggatcactcaaaagtcatcctacatcattggctttgagtagctagctgttcctagatcctcaagttggagaaattaaccaagcttttaaaagatgtcatggcattactattgttaaatcaaactccctaaggtcttaaattttcaaagttataccatgaggaccttctggatggaaaaaaaaaagaaagaaagaaagaaacatctctggcaccctagcttaaattattcattactttttggtaaccctgttcaatttaaaaagmgtttaagaatcacctactgtgtccctaccacttatcaaggtatagaattatatgatagcctcttccctaaagtactcaatgacccctagcaatgaagtaaatggaagagttaagcatgaagctaagtgcgctgctctgctaaaaggaggcaagagggagcaggaaatagagtggaaagaaagaattgagatgggagtgaaatttagttgatcttttttcacttttccttctaattctaaaaaaggtgatggtataggagtctcagaaaggcagtgtccagacatccttttgtttgcctctgaaaaagtgcagataactctctttacttgtgtacactaaattaattcttaaktacatttgaactgaatattttcctaacacactagaaatccaaaatttaatattgagaagggagatcttatgaatagtgggtaggagtgtcttgctaaagatcgtcatcatatttgattttggccaaaaataacacttagttacatttcctttaaatattggtaattgatgttacaaatatcaaagaaacatcatttatttcttagtaaaccaacatagagtatcagtaacttgtcccggattacaaactgcaacggaatttcccactctctaaatcaggcatacatgccccaaatgcgtatgactttctagcagtatatttgtatggagctggatgaggagctatgcatcatgtttttcttacccaggtgaaaagctctgggttcctaaactgttattatccctactggtgctatattaataatgggastgcagaagagaaatttcttgggactcatgtcctagacatactatatataatattttctggtttttggtttctcccatcaggatggaggaagccttgtaggagaagtaaatgaagatggggagatgactggagagaagatagcctaygtgtaccctgatgagaggaccgcactttatgggaaatttattgatggagagatgatagaaggcaaactggctacccttatgtccactgaagaagggaggcctcaytttgaactgatgcctggaagtaagttgaatctgcttcakatgggttgctccaattccaaagcaggttgttagggctgatttgagacaagcttcttttcttttcctctctgtatagttctctttaatcgtgtttattagtcaggttttattgcataacagacactgcacctccccagtggtttacaacagcaaccacagctctgccgagcagctgtactccagctggctgaggctgggcttagggggccaggccagacttgaggcttctggtcaggtttgagtcagctctctttgtcttaattctggggcctaatctgaagggacaatggcaatgtggggcaacattttcccacagtggatcacagaagtgtcagagcatragcagatacctgtgatgccttttgaaacctcaccttggaactgacatggtggcactttactcacttttcactggtcaaagcaagtcacatggccaagccagacatcagtgagacagggaaattacaccatacacattagtgggagatactgaaaagtcatgtgacaaagggcctaggtatataattctcatatagggagggaataaagaaatgacagcagtaattcaactgatttcaaatggttatctctccaaaaaactgtactatgataataaagaaccaaatcaagtagatctctaaactgtaaagttgattgagcctgagctgtgactggaaaatataaatgcatattggcatctcgagcccaacatcttgcgtggagcacaatgtatgagtgaacccartggaatccatatttgaaaaaagtattattttccttttagaagtacacatgtcacactaaacattttttctgagtataaaattactaagtgtagaaaatctggaaaatatacaaagaaaaatcaagattttgcattttgagtggcacagcttaagaaagctatttgaattggtctgattccctgaaaacaatatatgcatgtatttctgagccaggtttggttatagggagaaaaaaacagaaaagmcaataaatctgggcattaataggcttaaatagtatttagttatttgggatctgaagaagaatctccaaaggaagcttgtccaaaagtggaaattttagcatttatatttaggtccaatttgggttgctttaaatgtcttttttgtttttttaagttaaaaatggagacagtctaaatgcaatgtgggattctggattggatcctggaagagaaaaaggacattagtggaaaaactggtgaaatctaaataaagtctagagttttgtacatagtaatgtatctgtgttggtttcttaattttgacaaatgtaccatgcactgtaagaagttaacattaggagaaacagtgaggatgctctgtgctttctttgcgacttttctgtatacagtcatgggcccataacaactgtggtaccataagattatgccatatttttgtttttatttcattttattttttaagggacaggatttcactctgttgcccagactggagtggactggtgttatcatagcccactgcagccttgagctcctgagctsaagcaatcctcctgcctcagcctccccagtagctaagactacaggcatgcaccacaatgcccagctaaatatttttaaatttttttgtagaaacagggtcttgctgtattgctcaggctggtctcaaactcctggcctcaagcaatcttcctgcctcggactctcatagtgctgggattacagacataaactactgcacccagctaagattatatcatatttttactgcatcttttctgtgtatagatatgtttagatacacaaatccttcccattaggttactgttgtctatggtattccctatagtaacaagctgtacaggtttggagcctaggggcaataggctgtaccatttattaatagcctaggtgtgtagttggctataccatctaggtttgtgtgagtacactctctgatgtttgcataatgaccaactcacctcatgacacatttctcaaaatgtatccccttcattaagtgatgcatgtcgtatatttgaaattactccaaaatgaaaagtttattttttwaaaaaaaggaagcagtaatctttgaactacaaactgtgatatctatgcccttgatctatgttctgaaaggagacagtgttataatatttagaaatgaggaggctcgaaacaagggaggatcccaattggtgatgccagttttaaaacttcagaagtagcagcatttttagtggcaggtgcctaaacttaagaatcacctaatttgagacctagctctaacatttactatattatccttgggcaagttatttattttttcagaacctgtttcctcattaccaaatgtggatattagcacctaccataaaacactgtaatgaaagttgttattacattcttcttgctataaataagaaacagtaggccagggctggtggctcacagctgtaatcctagcactttgggaggctaagccaggtggatcacttgagcccagaagttcaagatcagcctaggcagcatggtaagatcctgtctctcctaaaaaatacaaaaaaaaaaaaaaaaattagctgggcatagtggcatgtgtctgtagtctcagctacttgggagactgaggtgggaggatcacgtgagctcaggaagtcagggctgcagtgagctgagtgcactgcactccagtctgggcgacaggagtgagaccctgtctttaaaaaaaaaaaaaaaattgttgagagtgagaattctaaagggaattattatttttttagaatttctggttgctttagctgggtgtggtagwgtgtgcctacagtcccagctactcaggaggctgaggcacaagaaccgcttgaacctgggaagtggaggttgcagtgagccaagatagcaccactgcattccagcctgggtgacacagagactctgtctyaaaacaaacaaacaaacaaaaacaaacaacaacaacaaaaacyttytggttgcaaataaacattcacttcaaattaacttaacgcagaaaagaaaggggggatttattggcaagattcctgcagacctcaggtgttttgaaatgttgaatagtttgagcctcaaaagggccaggaaccatggctgctctggcactctgaagatcctatagaccgatctttagtctaatgttctgccatgtttgtatctctcctctgccccttccagttataattattgacctgctgactggccagtgggttagsgggtacagggtcctgtgactgtagsgtccaatggttggggaaggagagaaattaatgcaaatatctcacataaaacactccttgacctgtcgcctcaccagcttctccatttctctgtgtgcttttgtaaccacaaactacttctaattctctacttacttcctgtggagtttctcacctatgccactgcttctcacctgatcagccctactccacatagtaactgctttccttggctaattcctactccatctttaaggcttaactcactttttataatgaatgtttgtccattgaataaatgaattctagtcaaagggcatagcatactatagaggaaaggagggaaagtaaaggatgtgtaaaatctgtaaaagtaaaggatgtgcctgcagcctgggcatgtctaaggcagcagaagaagagacagtaggcattggaagagatagtgtgcactccctgaaagcagcaacagaagttaatccttattgtatctacacagtccctagtgttgtacatgtagctggcactcagtaaatttgtcataaaaattttagtctaaggagctagatggaattcataggaaaatttccactcaatagaacatacattccacrcacaattttggttatttataaaaagtgacggctgggcacagcagctcacgcctgtaatacccgcactttgggaggctgagccaggtggatcactagaggtcaggagttcaagaccagcctggccaacagggcgaaaccccatctctactgaaaatacaaaaattagccaggcatggtgacaggcacctgtaatcccagctgcttgggaggctgaggcaggwgaatcgcttgaacccgggaggcagaggttgcagtgagctgagatcacgccattgctctccagcctgagtgacagagcaagactgtctcaaaagaaaaaaaaagtgggggagggtggtttaaatgcttttcgtggattgcttggtggtctgttaccactttgctctcagatccaatccattcatcattctttcactgcccgctattattgcaagaggctgctgccccttgcagcctgcatttttcaggctcctgtgtgtctgacttctgtctgagtttggccaaagggaggccactggctggctggggacaaagcaggagaaggcagcaggaagaagccctctctgtgtcaaccagcatctccagcagtggccccatcacctcctgattccatctcccatgaggaaggcccaggctagttccaactaccccagctccagagctccaggagcagcactgtgccctctgtccctccggcctccagtggcagcttcctgctcttgccagtgtctgggctcttcacggctccatctggcttgtcagcattccatcccctgtatgaccaattccctgaactgaattctttttgaaacactcaaatggtccgtttctgtgcggacactgactgatttggattggtttctgacttttagtttcaggtattcattggggttttggttgtacaaaaaaagccactcacaaacaaacagaaagaggacctagtaaccattagtaactactgaagaattgcttaatgggattatgagttttccctcagtgtatataatcatttgttttgcaggagtaagccctctgattctaaatcttgtttctttacctatcagtcttcagagcatctatctttagtgctgtctgtgaggattctctaaagctaatccttcacagagagccagtgttccttctagggtggttgtgtgccttgatttctagagtaaattactaattggcttctgaactaccgtaatagaaaggagattactttgttaatgctttatcaaaagcagtgctgttctccttaattctggtgaggcagaattttattcttagtgaaggagacaactgccagtgttcagttgttggattctgtagactgtatctgtaatgaagaaaaccaccagaaaaatttaaaaccatcatccaatttgatctgagccaagagatctcagaatttcatgacaaagcattttattgattcccaagcatcctttaagtcattttaataaggaaaattcaagagtgaattggaatgttaagagatgcatctgatggctgttcatgaaggcctgaaaataaaactgaagcgtaaatctaaaatgtatccatttaaattgaagaacttcattctagttggtataacttgattaagatttttggttttttaactcttcgttgtcccatgaatagagagaagtgttataaatgctcttccctaactctgcacctatactggtatttttgtttgcttttcagattcagtgtaccactttgataagtcgacttcatcttgcatttctaccaatgctcttcttccagatccttatgaatcagaaaggtaatttcctccttggggttttaattgcactgtttatgtgaggttaaataagcctagtggtaggaacttatgcacctctttggctctctgcccaggctgggttccagctcagaccaagctcctcatgaaagtgtccttttcctttgccaaccctcaaataaatatttctatattctgaggaagagtgtttttattcttatgtagaatctgaccctgtaagagagtttcctcacccataaatcacagaacagcttgtgtgtctgtcctagagtaaaacctccaggtagaaagagcagttgaggccaggcatggtggctcatgcctgcagtcccagcattttgggaggccaaggcgggcggatcacttgaggtcaggagttcaagaccagcctggccaacatggtgaaaccccatctctactaaaaatacaaaaattagctgggtgtcatggcgtatacctgtaatcccagctactcgggaggctgaggcacaagaattgcttcaacctgggaggcagaggttacagtgagccgagatcatgccactgcactccagcctgagcaacagagcaagactccatctaaaaagaaaaaaaaaaaaaaaaaaaaaaagagcagctgggccaggcagccagctgtgtcctggccgagcattcccgttcttagggtctgtgctgcagtcacatgctggccctctaggggaacatttcatgctctttaaagctctagcctgtgcacacaggatgcctccatttcatcttagaccagcggaggtgttctggaacacaagacaatttcttttttcacaaacagaagacaagagtgaaacaaagaaagtataagaggcataaaaacattctagcttataaatgacaagtttctggtttgtaagcccactcccagagggtcacatcctgttctacttcatgtcttatttatgaggatggctaaactctagctcttgagtcttgatgtggctttttctggtaccytctctgggattcttcttattccttagcaacagatctgtttatgaataagcgtactatctgaaattggttttctctttgcctcgtgttttgtaagcatggcttacctcccattcagtttctgttcccatctgagaaataggcctcttcctccattcaactgacagggctgaccccacaatgtcacaatgatgaatggactcttttttgacatgaggctctggcccagttacaaagggaagggtttagcttctttgttagctccgaaacacaagaccatagccatacgtgttagtcttttctgttattattgttgtgatgaggctgcataatgatgccctcagaactttcagtggtttacagaatcaaacattttgttttacaccatagttctataggttggctgaggttcagccacttctgactggaatcagctaagctcagctggcctaggctggactccaggtttcaagttgggttcaagtctgtttcacatgttttctttacaagagaaacagggagcaacagccccctagggcatattcttctaatggagacagtgaaaagtctggaggaggccagcagaaatttgccccagcccttcacacctgagacttgcctgcagccacttctgcccatgttctaccagcaaagcagatcagatggccaaacgagaagtcagtagggcaggatgtatcctccacccaccctgagggaggcactacaaggtcacgtggcaaagtggcaggatgtatataattctatcacagcgaagaaataaagagttgaaagcaataaatcagtcttccagttcatgaataagcataagagccatgtaactaaaattacagatgatcagttcctgtagggtcattccatcccagcgtctggttaaatccagttccgtaattatgagcgcttttttctttttttttttaagacagagtcttgctcttgtcgtccagactggagtgcaatggtgcaatttcagctcactgcaatctccaccgcctgggttcaagtgattctcctgcctcagcctcccgagtaactgggattacaggcacccgccaccacacccagctattttttgtatttttagtagagacggggtttcaccatgttggccagggtgctcttgaactcctgacctcaggtaatccacccgcctcagcctcccaaagtgctggcattacaggcatcagctaccacgcccgaccagctgttttcttataaaccagtggttggcaaactttttctgtaaagggccacatagtaaatattttaggctttgcaagccatataatatctgttgcaactactcaattctgcctttgtagagctaaagcagtcataggcaatactaagcaaaygggtatggctgtgtcccaataaaactttacttacaaaaatgagcagcagccagactggaccctcaggccatagttaactgacccctgttatgaacccttttgctgggaaatgcttattggatatatcttattaattgtttgtcactgttgcatatagaagatacatcttgaggcttaactaaaacagcctcctttccctcccatctaacactgacaaacttagatatagctttaattaactttgaaaaaatgtttacttgtccagtaaggcagtgaaaattgtcatcaactaaaaacataaaattcttccaaaaaatacctcatatcaagcactgagcatctttatgaaaatataatgataatttctatattagaaagcaaattttaaacaccactcctaaaagagacataactaccgtttgtttaatttccaatgccaaaatattgtggtttaactttttcttcctccctcccttcttagttgggttatgaattgacattttggaatcagtagccttaatgatattttggcagttgatgtaaggaatgacatattaagctgaaaaggtcactattcaactcttttttcaatttagggtttatgttgctgaatctcttatttccagtgctggagaaggacttttttcaaaggtagctgtgggacctaatactgttatgtctttttataatggagttcgaattacacaccaagaggtgagtggggctgacagtggaaaatcaactttgttggttaaagggctttgcttcaaacaaaatccctttaccttagtactcactagaaagttaaagaagcagattggcttttttgtaaaaatgattggacattttcatcctctttattttaagccttaatacgattttttttaaaagttccagagctattttatagagagtggggtaatgccatcaataagacagtaattggtatattagactgtaccaatgtcttaaaaattgagatccagtcagactctgtaaataactaactcatgaccttgggtggggtgctttataggaaggccccttacatcttcttgtgcaaaagccatgctatactatatcctacattttgtcaggaagagttcttttgtcaaaaaaattaaaaacaaaatgttaaagagttgaatcacctcttacctttaagatacaatctttgatatatgtcaaaggcttcatatatgttttctgtttttgtttcttcactttacagttaatttccctaagtgtctgcctaagggcaaaagttcaatgtttttagcacagcttatgcgctccttccttgtctgacttatattacgtgtatgggaccttaagcttatggctaatattccacatttatgttcacctttgcatttattccggtggaacagtaagagggaaaatgctgtgaaataataataaagttattacactttcaaagcagttgcacaggcaaaagagggcgacgtattcaaactgcactatggtctgtcagactacgtcccatgcaaaggccagacttctgtcagcaatccagagaaattcagcatacaaagggtgactttgggatattgatatatgatttacttactcattttacagatagggaaacggaagcctagagagattacacaacttgcttaaagtcaaaaatacagcaaatagcagagttcaagtaggatttcaaactgcagaatctggctttgtgctgaacctcaatatgctctattgtataaatgaatgtgacacccttcttgccctaatgaaatttagattctgttggggagataagaaaaatacacaactaatggcagcctaaggtagatggtaccaagtgccacatatcagtatcacatgactggttttgaatattaaggtccatgaggcttttttccacttttgatcactgctgtatcccctgcacctagaagagtgcccggcacatggtaccgcttagtaaacatcagttgagggactatcacatatgaataaaagcacaattacaatttaatagtgggggaaatggtataccttgagagtcaacagttttgtatgaaaatgtcatcctgttggcttcaaaaggctgggctgctgtcatcaccagctcctggggtgagttcatcaggagtggtttggagaagagaagcctgattgttacactgttagtaacccctgttgtagataagaaggcatgctggtaatcgatggctgcctcctggtcacagtgatttcccacctgtaacaaaggtggaggacttgcctagagtacattcttgcatcccttacatttctggttccatttgtgttcttactttgtttttttttcttttgcctcctcttctttatctacttttaatacaagctatccagttatatttgtgtgtgttttcatcagggactttaaatccttttttttcatatagaacaaggaaaaatgaataaatagttaagtcgagctgcctggcactgaccacacatgtcatttgcactctcagtgtgtggagacatgccttgttttgttttgttttatttcattttgtagtgctcaaaccttgaagttttggctgagtgtggtggcttacacctgtaatcccaacactttgggaggccaaggtgggcagatcatctgaggtcaggagttcgagaccagcctggccaacatggtgaaaccccgtctctacaaaatatacaaaaactagccaggcatggtggtgcacacctgtaattccagctgctcaggaggctgaggcacaagagtcgcttgaacytgggaggcagaggttgtggtgagccaagatcaygctacttgcgctccagcctaggtgacagagtgagaccctgtctcaaaaacaaaaataataataagataaatgagttaatatctctgatgtcctttgacctttggggagaaaggtcctctctaaggctcgctttcttgttttctgcaggttgacagcagggactgggcccttaatgggaacaycctctcccttgatgaagaaacggtcattgatgtgcctgagccctataaccacgtatccaagtactgtgcctccttgggacacaaggcaaatcactccttcactccaaactgcatctacgatatgtaagtattacccagagctgctggggcggatctatgcctcagggccctgagacggaggagggcagtaaaaagtgttattctgcctcagataaaggctgcttcatctgaatgaccatgggtcctctgctatcggcctcagggttatgacttgaaactcaaaatctaaacagcctcactctgtggctttggcaatctaagaaatggaaagtgctttgaagaggagaaatggtatggaaatagtataccacaccgaggggttgctgttttatagccgcttttcttgtccttcagttttctcgttttggacaattaaagatagtgttatttgaaataatagtaaaaatttaaattactctgcacagtggagaagatgaaggagcccttttttttttttgagatggattttccttcttgatgcccaggctggagtgcaatggcgagatctcagctcaccgcaacctctgcctcccaggttcaagcgattctcctgcctcagcctctcaagtagctgggattacaggcatgcgccaccgcacccagctaaattttgtatttttagtagagatgggttttcaccatgtcagtcaggctaatctcgaacttctgacctcaggtgatccaccagcctcggcctcccaaagtgttgggattacaggcgtgagccacctcgcccagccgggagcccttttatgatgtgaaagaaagaaggaaaataaagtcctaagcctagggcatgacatctcagcgttggaaaagacctataaaatcagagtccctattatttgatactaaaaaggaatgaagtactgacatattctacaacatggatgagaattgtagacactatgctaagtgaaagatgtatgattccatttatatgaaatgtccaaaatgtaggaaatccacagagatagaaagtagattagtggttccctagggctggggaggggtgataaggagtgtgtgctaatgggtatgggatctcactgcrgtctcattttggactgattaaaatgttctaaggcgggtgttctaaaattagatgatggtgatggttgccgaattttgtatgtatttgtgatattcagtggttgaaaggccactgaattatctacttcaaaaggtaaatatatataaaggagtacatatatttatactctgtatataaattatatattaacaaagctgtttttttttaaaaaatcaaataatcctcttagagtttgagccttctcttccatctgctcattgaacctcttcttggaaacctccattggtgtggagcttacattatccacaaaggtccagacaaatagacaaatgaaatagacattacaaaattagcttctgggctccaatgactagaaaattctttttcattgtttttttttttttttttttgagacagagtctcgctcagtctcccaagctggagtgcaatggtgagatctcggctcactgcaacctctgcctcccaggttcaagcaattctcccacctcagcctcccgaatagctgggattacaggcacctgccattatgcatggctaattgttgtatttttgtagagatggggtttcaccatgttggccaggctggtcttgaactcctgacctcaggggatccacccgcctcagcctcccaaagtgctaggattacaggtgtgagccaccgcccccggcctagaaagttctttataataagcccaaatgggtttccctgaaatattcagcccttggctctaattgtctccctttttttcctgtgtcccatgtcagactctcttttacatggtagccctacaaacactttagtagtttttacatgacccctgaacgtgttcttcccaaagccaaacatctctgactgtgctctagaggatataattgggattctttgtgccatcatcgttgctctccttagcttggcctgagaatgccagctcttcctgggagccagtgagctgcctgcaaccttttctgttcagttatagcttgcagtccctcggtcatcttgcttgttagcataagcaaaatcagatcatgtgcatttaatctgtaggcaaattgccaggatttggaggttcctcaagaatgtccatccctgcatccttgaaatggcttaaaaattttcctggcaacgacttgctctccttggcagcccttaacaagcactgaagctacaacttctgtttaaaggacgggtagaaatggcaaaggacatgtgtcatgtgaaatgaaactgacactgtgattaactccaaggctttcatggccagggtgaattaggccaaagtgtcattccaagctgcacacagcttaacaacaaccctttaaaggggtggtaacaaacaatcataaatgctacttaagacyactcctttaaaacaaaccaggttgttgatttcattgcaaggacatgatttttctcaccaaaaggaagacagcacaggagacaagagaagatttcatttgtacaaaaccaagtccctgtactctgcaggttttcattttgtttattgttgtttgttagtttgtttgcaagcaagcccagggtgaccaaatcttagttatttggggtaatgagaagactacttgaataataaccaaatatgaaattcagataccaatttatggtattcatttgtttcaaaaatcattggtattgatatgtacccttttttttttttttttttgaggtggagttttgctcttgttgcccaggctagaggtgcaatggtgcgatctcagctcactgtaacctccacctcccaggttcaagtggttatcctgcctcagcctcccaagtagctgggattacaggcatgcgccatcacgcctggctgatttttgtatttttagtagagacgggtttatgccatgttggtaagggtggcctcaaactccttacctcatgtgatccacctgcctcggcctcctgaagtgctgggattacaggtgtgggccaccatgcctggccctgatatgtacactttaacataaacaaaacacttccataagctgtttgaaacgcaatctagtacaaaatgccaaatggacaaatagataagagctgctttcctagacaacctgtagacaagaggctaagccacttggcacagaggtttggtttgactgctaatcgtgtagctcacgtttatagaccactcactacgggctggtgctgtgctagatgctcttcatgcattgtctcattcagtcctcccagtaactcagtgaggccactgctatcaccattgagatcacagacaggaaaagcaggtctccaaggcagagcagttaaggctcttaaccactgtgcctttgggtcatcttcaacaatcaacacctgaaattgaattctttcttttcagtctgtcccttatctacactctgaaaatgatgatgataatgaacaggaaaatgtaaataaaagaggattataagagaagctctaggcmtggaaattcaacacagggtctgttttttggttttttttcagtgtaccagaggttaaccaacctgtatttcaggaacattttttttagtgaaatatgttaatttactttaattttttttttctgagatgggttctctgtcatccaaactggagtgcagtggcataatgtcagctcactgcaacctctgcctcccagtctcgagcgatcctcccaccttagcctcccaagtagctggtaccracaggtgcacaccaccacccctggctamttttttgtatttttggtagaggtggggtttcaccatgttgcccaggctagtcttgaactcccgagctcaggtgatctatccgcctcagcctcccaaagtggtgggaatacaggcatgggccactgcacccagccaagtgaaatattttaatttaagcaaagagttgtgattttcataaggaattcctgaatccacagtccacgcatctctttgtggtggagtacaggctgataactgttcacttttgtgttcacacatgcatgctcacaggcaggcagtaaccaatattagttgaatcctactttgtgccaggcactgtataaggtgctttctatatgtgaccccattttgtcatgacaaagaccctatgggataactattactagtattatcatgattttacagatgaggaaagtgagattcagagatataaggtgaactttccaagaggatgcagtaaaaatgtgttgaatcaggactcacaccaaagtcttctgacaccaagtgtcctttccacaaaacatgatatgatacccaagagggtggacatagaggcccctttggtgtgaggtaaaggttgttcctttttactccacataaaagaagtcccaaagctatagacatgcccattcctccaccactgatagaaggaaccagccaagtacttactatcatgccccaagcaccaatcttttttttctttttttttttttttgagacaaagtctcactctgtcatccaggctggagtgcagtggagcaatctcagctcactgcaatctccacctcttgggtccaagcgattctcgtgcttcagcctcccaagtagctgggattacaggtgtgcgccaccacacccagctaatttttgcatttttagtagagatggggtttcaccacattggccaggctggtctccaactcctgacctcaagtgatccacccccctcagcctcccaaagtgctgggattacagaggtgagccaccatgtccagccgccaagcaccaatctaacttagggcctggaaccttctcctttgctgtctcaccaaccctttgtgcaaaatatgactataaactgggcacagtggctcacacctgtaatcccagcactttagaaggccaagtgggccaatcacttgaggccaggagttcaagaccaggctggccaacatagcaaaaccctgtctgtactaaaaatacaaaaaatcttctggccatggtagcgcacacctgtaatcccagctgcttgggaggctgagacatgagaattgctggaacctggaaggtggaagttgcagtgagccaagatcatgccactgcacttcagcctgggcaacagagcaagactctgtctcaaaaaaaaaaaaaaaaaaaagaataagaaaaaaaaagactctaaatgaatgagattgatttgaccagatgcatataaaaataaagctgatttcttctggccatgccttacatgtatccatttcagcagctgttaggtgagctaagtctatttattgcttatttatctgcctgttctgcagggagctgtgcagatgaacaggattgggagccttcggcaaatgaacatagccatagtgttaacctcgtttctggtcccaagaggacttgttgtaggaaggagatactgctytcttcataggatgcttcacagggaaatactaaataaacaggttggcagagaggtctagacttccctcttgggaagaaatcttcatctactttcatgctagaaaataatatttcctctctatgtatagggtggaatacagagtttttgcctttgaaaatccacagggctctttcttacaactccaaaagcactctggtgaagccttctccctgagatacagccacgtaatctgatgctgctggccagacaagctcaaatgctggcgggctgcactggatctgatttctcattaacgacagatttttgttgttgatcatgattgttggtttataaatgcaaggtgccaaatatgctttaaaaaacagagcagtgcttttcaaactttaatacaccagtggatcgcctgggggtgtcgctaaaatgcagattgcaatccagcaggtctgggatggggccgagatgctccatgtctaataagctctcgggtgaaactgatgctgggtgaccacactttgggcacataccaggtgtgcccagggaagagtgcctgggggtgattcctgtatcagcccctccctagcctttgcttccaacctcctggtctggcccgggaatgactgtgtgcatcttgatgtttaggtttgtccacccccgttttgggcccatcaaatgcatccgcaccctgagagcagtggaggccgatgaagagctcaccgttgcctatggctatgaccacagcccccccgggaagagtgggcctgaagcccctgagtggtaccaggtggagctgaaggccttccaggccacccagcaaaagtgaaaggcctggctttggggttcagagacctggaatagaaacttggatctatgcactacgtttatctgacaatgggacaaccagggactgctcatgctgtgacgtcacatcctctcaccatgcgttagcaacgactttctcgcatactaactaggtttgactgtattactcataccagatttaaaattagctagccttgcaacaacgtcctactgagaggtattgtcgagcatttgacataagacagcgtgatgttctttggtggttcaagtctaaatctgtaccacattcggagatgccaaatgattagactgaaacagggaaacggggtttttcagtcatttttagtcagtggtttttccatagtgcttttttcctatggccagtgcaaattgtgttagcacacttgcatatgtgccgtattaagggttgacaattactacatctttattctctaaatgtagtataatttgccttttaacctttgatctgtatcttgcaatagaatggctttggtttttttcttagtaaataggagcccacttctaaagtcatttcacccctcagccctattctctttcttagataccctttacaagagaaaacttccaaatggatttttgcatcaatagcagtgtgtaggtctctctggttctttctatatcatcattttattattatgtcctaatataaagtactggctcatagggccagggtattattatagaatattattctcgcatgtaaacaaagatatctttgctttaagatgtgagaagaaatgaatttactttgtttgcattaagttatggaagagttgtaatatatactttaagaaagaagagaagaaaactagtatctctaagcggtaactatggcaattttgcaatattttcagtagtgctagtaattttttcctccttgagtacacattaaatgtacataacatagcgcggtcaggcttgtggcacagtgcattgaattcaaaagtcaaacagcaaatttgaattctaacagaattcaaaaaaaaatttttttagtcagtactactaaggcagacacactgattactaggtacaaatcaaaccttgatgctaaaactcttcatcattgtaatttcaaagcacttacctgcttcaaaacattgtaaactaagactgaacacctgtatagtttaaaagcaacactatcaatagcatttcagccattttgccagccatgtgtaatcacaactgcagaaataaggagaaaacccctgtttttttagtttagctaattagatctgtaacatcactgggattgctctgaatgaatcctgagagttttgttttttataagcaccctcaccacatgccatagctttgtctcttttagacacctcgatgcagcggctggaaggactggagagcagtagctgtcagctgtgattcctgtcacctgagtcagtttggtctggaaagcgaaggccttccaagctgtagcagatagtgagctccagctgatgagagaaggcttcagtggaagaagagtgaggacataggcagaaggaagtttgctatttcttgtcagttgcacattgctttatgaagactacaacaaaagtgcttaatcccaggctgctcatgactttcatttcaggtggcccttgggcacattgacagagttgcccttcccttctttgcaacaccaggcttcctagagcacccggttgcatgctttgcagctaggtggcagtggtttcagggagatccagttggatccctgcttgaaagcttaagccaatggttcacccatgagaggaagttgtcagtgcttccaggaagattgcccaccaaaggaactgaatagtttttagatttaaaggcaccaggatagggtcactcttactctgtagaaagagaccgttctatacactgtgacggatgggccagggcctctggacttgcattctgataggtgctttaatttaaatgtgcccaaagggagtgactgtcttcaggagaaagatggcttgcattaacctcgatcaagtgggttgtgcagccaggtcagggaatgcggtcagggagaggatagtgctggtcatgcccccgatgcagctatgctctgaatgatttcattcctgagagtgatagcattctggtcctggctgcagtggggtacaatttacgtcctaagggggggctactctaattatcccattcaaatggaatttttttcaaaattggatagaaggaattgaagagttgtaagtagtgattagtctgctaatcagttcttcagatgagatattgaatggtaacactctgagcttaaaactcagcagtgtgtctgtgacctccacgcaaatcagaggaagcaatgcatccacgctgagcctcaccatgtcttcctcccaactctcttcatactctctgtgtcttccagctcttctttctctggccggctctctttcctcttctctctgcatatgtgagaacgcctgggcatcctgggtaacagcagccccagctgccctctcctgttccctgttccaagtcccctgcactgacctttcttgagtctctctggctctgtgcatgtctttgggactctgctcatctggcttttcctctgtgtgtgcctctctgtttgcttatgtctctggctctgtcttccccacccctcccctcacacacacacatactcccaaatgtaaggctctgtggcaggttggaatcggagtaaggcttgagattcactgagttctgtaggtagggaaagaagtcaagggagtggaggttctataaggaattaacagctgaggacggaagggtttgtttcccgtttgaacctaaacgcaagtggaaaagaatactcagaatgtatttttctactttacatctgctggggaaggaaatgtgtcaggaagccgctgcatctggtcatttcatcgcatcagaatcacagcagacgtggaagattccatgtggtggggaataaagaaataactttatgctctcctgaaaaacagcgggagcctatgtgtgtgtgcgacactgtaatctcaaggagattcactcagagctgtctcagtccaactcctgcatgaccagatcttcccttagcatcttttctgtgatgaaatattatcttgtgttagagttaggaataggaactaacctgtaggagcatgtccccaaatggacatttgaatggactaacaaaaacaactggaaagactgaatttccgacacaaaggaatgatgggatcaaaaagaaagcagtgaggagttcttgagtcttgtagtacctattcttattttaacttgcttcatccttgatctacctgagacactaagaaggaaattagttttccaagagctctttgaacctgtctaggactgtagttaaacctatttgccctatgggggttcttcacactcgaaaaactatttccttatcaccaacgacccacccagaaaggccaatgaggccaaatgtaacaatttttaacatttaaatataactattaaaattgcattaattgtgaacagtgaattaaagggttgtcttctccaggagacagtatgtggcacttttcgtaaatttcatttaatatataaaaatttaaatcactcactgcaacatgcatttaaaatcttccaagaaggtagaggtatcattttctgttttgctttgttttaaaacagttgcctcaagcttctgtcttaagagtagtgacttagaatccagatatcttttgttttagaaaaacaagcaaaactatgttgcaagactgacagttgtaatgtttatttgccacagatcaaaggttcacaaagtatatcaaatttacatctacttggggtaccttgatagattattattgtttttcttttatctttcccttcaggaatttggaaactcgttgtcactttttttaattttaaaaatactaaattgtaatagttttcttttgccaaatgtgtgcgtacatattcaaagcaatgaaactatttcaagccatacaaccacaggggtgggaacccttttcacaaattttaatgtgtttgtatgtaaatagatgtttgtatgaaatattttcatgatagaatgaatatatttaaatgaagttgaattattccagtgctacttaaacacattacaaaaattttggtgagaattatctgagtctattgagatgtaatgcagatcaattttgatttttaaaaatcaaaagcctacaataactctgactctcagcaacttcctcggcgttgttgcacctgacgtggagagagctcgtaggcttccccagtgcctcagccgcttcctggtggaagttaggtgctaatggaggtgtgttcaccttttagtgatatcactgcaggcctttgaggggcctgagagtgaatcagaggcattagagacaccggtgcagttatctggagcacaatttctttgcagggcagcagaatcagaagccagacttggccatgtgaacctcgaaactcggtttcccggccgccatcaaccgccacccttactgcctagtcacacacgtcagggaggctgccctcagtggagttggggttgagaccccagggtgggacttcacagttttgccagcaatctctaccttctgacttctgcctcgcagagaggaaggagaggggagcatctggcaaggggcccatttctcagcacagtacatttcctgtctcagctctggaagactatgcacccaagcaccaaacttccaaccagagagagagacgtcctccgataacaaaaatccttgcttcctctgtctgtgactttacacacagttgttcaaagttgttaaatgtcaagagtcaatcacatccctaggacatacctcccaactctcctgactcttatgttattgaaaaaacaaacaaacaaaaactcctttatgatgatattcaacttgagtggggttttttttccactttggtcctggatataatgaaatgatacatattaggataaattttcactgtgtatagtagcaatacgaacacacatgccaatgtatcaacatatctacttggttacattttggtttatgataattaaccttgattcatgtattgggaagctacagggactacgtaatacctgcttatcacataggaaaattatgtccatgattctgagctcccttcttcaaaagtttcctcctgggtgttctatgttctctctttatcctgaaatacatttattaggttgtgaggtatgttgaagaagtagaagccaggggtatgctttcagcatttattgcaaccaaaagttaaccccatcacggttaacgagcatctttggtctcttgtggaatttgaactaaaactatgagccttattcaatatctataattctatgatttttttaaattatgggaaattaatgaaagatgtttacatgaataatgtttgcccttactgtgttatgaatgagttttttgtagtgtgtctgggtgcatgatgcaagagagtaggaaaaatgtttctgaaacaaaacttgacaaatatttgtaatgaaagtaaatttaaagattgctataattgcgctatagaaacaatgcaagtattaaacaaaatatacaatcatctgtcattgtcttcctttggtcatctaggttagaaaagcaataatggttttcttataatgtgtctacctgtatatttaaattactaagtgaactttacattttaagttgttttaaaatattattagccatttatcattttcagagcattctagtaagagcggaggatttgatatgattccacatacacccataaatccagaaggattagccacaccaacagaaagtgtcggattgaatacatacatggtaagggtatggaatgcaaatgagatgatcagggcaaatagctgaaaggaaacttcaattcatgatttaaagaaaatatagaaattttgttagacgttgtggtagattttggcagtctgaggatgagtctgagctgagaaccctggcaatcccttattcctgccctaatcacagtcaacatttccgttttttttttaatctgagatgaagtctcactctgtcacccaggctggagtgcagtggtgcaatcttggctcactgcagcctccacctccgggattcaagcgactctcctgcctcagcctcccaagtagctgggattacaggcgcttaccaccacactcagctcatttttgtatttttagtaaagacggggtttcaccatgttggcgaggctggtcttgaactcctgacctcaagtgatctgcctgccttggcctcccaaagtgctgggattacaggcatgagtcaccgtgcccagccagtcaacatttgtaaagcacaaaagccagtgacaaaaggagtcaacatagtacctcattattagctgggccttctgcccaggaccccaaagaagtgaattctaggaagtttggcagggctacacgaggcacagttaggcctcaaactgaagcaggccatgagatctcctgctttattttacctccctcagttgcccaatccttgattttatcacacttccttccatggaaggaaggaaacagaaacgagtgagatgactgggtccaaactgatgttggatcagcttttccacctgcacagacacattcacatgctagatctttcaggcaaggcttcaccctctaacacgcatgggtcaaatcacaatattaatattcttcttccttgtgggaaaggggaatacaggattaaaaatttaatacagactgagggaagcttaagaagctaaccttgaaagtgaaagattgggcaactttcatgggttaagatgattgatttgggcccaaatgttgtagaatgaggtaatgtgaaaattaagacaaaattatgttagaccaaattagtaaccatcccagctatactaatgggatggttaccaatatctgcctttgggtttaaatgtttggaatcattcaga

SEQ ID NO: 95719 - DNA, 57082 bp, Homo sapiens
  misc_feature (1)...(57082): n = A,T,C or G
aatcaccatcaatctctcctctgaattcttatcagtttgtcttttaagctctctttcttcttgtctgtcaaggactcggggtctgttaacgtacacagtgcctcatactagcaggcattctacgaaacgagcactgccgtgatttataagggacttgtagacgtctattcttccttcagggttttattttgttttatttgtttgggcctaaatggaaaatttgggcataaacacattaaagttgaggctttgatatgagtccccaaggggccctgcctccctgttcagccctgaattatgaatatcatcatcaccaggatccgtaacaacagtctcctaaacaaaaaacccaattgtgagcctcccagaggcacaggtttcactgaattgaaggattcattagagatagtgaggcatagtagttaagaccagggcctctgctgtcagaaagaactgggttcagatcctgttgtggccacttgtaggctgtgttacaagtttattagcctctctaagcctctggtttcttatgtagaaaatggaatgctaatacctataccctagggcggcttcacattgaccaatgtggagctctcagcacagagcatggcttcaggaatggtggcccaccacatggacacgtgtattcacctcccggagcgccttgtactctgagggtgttcctaggaatggcactaatagagttaggcatctgacaggtggcacaggcatgtttgaaaggctcggaggtaagaagtcaatgcattttgtcttttacaaggggcttttacctgtgtcatctcatgattccacacgacactctacagggtgggcaggacaggtatcatcatgcccatttttcagaggagaaaacttaggctcagaaaggttgagtgactggcccagtgaggtggttcatacagctagactgtgtccctgagacttaaacctgggtttgcttgttttgctacaactcctctttccacaacaacacactgggatgctcaagaggaatggagctttgctttgggacttggtgacaatgagacctgcatacataaggaatagggtggctgtcccaggcaggaacactttacaaacaggtgtagagtgagggagcatcatgttgggctccaggagaaagaattagacatgtatcactgagcaggggagttcatgtaagagtagtagaaaatggctgggtgtgatggcttctgcctgtaatcccagcactttgggaggctgaggcaggtggatcacctgaggtcaggagttcgagacaagcctgagcaacatggtgaaaccctgtctctactaaaaatacaaaaattagccgggcatggtggtgggcacctgtaatctcagctaatcgggaggctgaggcaggagaatctcttgaacctgggaggcggagcttgcagtgagccaagatcacgccactgcactccagcgtgggcgacagagcgagacactgtctcaaaaaaaaaaaaaagtaatataaaataatggaattaagattgaacatattctgaaaggtctcaacwsccaaactaaggaattggggctctattaggccatgaggagccactgaagctcccttcccagaggaaggacatggcacaatccacagggcaacagatagttgaggacaacatggtggcttccaaaacttgactcaccaggaatggctgaagaaactgaacgtttgacctagaaaagtgaaaacttttgggagggaaagagtatttgccagacttgggggagaacacaatcattgttggaccaaggaaaagacagctttgttttatgtggtctctgtgagtgtctaggggagcagtgaaggtcagtgggtgaaagctctagggaaataaatgttcagttcaaataaggaagacttttctggtccttttagtgcactttaacccaagtttttttattcatttatgtgtttgttttttgtaaagatgaggtcttactatggtgcccaggctagtctcgaattcctggcctcaaatgatgctctcacctcagcctcccgaagtgttgggatgacaggggtgagcccctgcacctggccaaacctgagttttgtgagagcccacctgcaaaacactgggagggaacagtgactggtacagacaaaatccctgccctcctggagctcatatgaaatggggggaagataggccttaaacagaaccatcctagaaattaatgttatagccagagcttctcaagtacaagtattggctgctttgagaagtgtaaaatccatccaggcacagtggcttacatctgtaatcccagcactttgggaggccaaggcgggtggatcacctgaggtcaggagtttgagaccagcctggccaacatggtgaaaccccatctctactaaaaatacaaaaattagccaggcgtggtggcaggtgcatataatctcagctagatgggaggctgaggcagaagaatcgcttgaacccaggaggcgaaggttgcagtgagctgagactgtgccattgcactccagcctggtcaagaagagtgaaactcccatctcaaaaaaaaaaaaaaatcccccatcttaggagttgtcaagagacatgtgtcgtgctggaaagggctggatgatttctcagaagattctctgtctctacacatgttgtgaaatcttcagcaaccctaaatcccttaattagagggagagaaaaggcaagtgatcaattggcttcttttaaaagcccryatctgcatgcttcgtcttcactgcggtctgaggcgcagagtgtggccaagcaggaatttcatcctgtgtgtagctgggtggctccacctatgaattgaaaatcatttagctgaaattgtgacacagctgcaaattacagtctgcctgcaggctggggctgtggctgcggccatggtgcaatcctccagtacccaacattaagtaactcagggcagactcttactggggccctactgctggtcagttgcaaagactacaggcagcttggctggaggagctgtggagggtagaagggaagctggctgtgtaacactagcctgtctacagaggagcatcatacccgcaatgtcaccatggctttcagcctcatgacagccctggaaggtgtgtgcatcatgctgatgaggataccgagggccaaagaagtaaaagaattcagccaacatcacacagtggacaagttccaaagcctggctttgaatccaggtcttttgactccaactcaggggtctttttactacattactctgggatcaagaccagctacagaccctcctagagaagaccaggtggtcagtggtcggacaccactgtccaaacccgtgggaccccttgcaaaacctgtggcactcggggcctttcaggctaataatatgattttttttttttttttgagacaaggtctcactctgccacccaggctggagtgcagtggtgcgatttcggctcactgcaacctccacctcccggattcaagtgattctcgtgcctcagactcccgagtagctaggattataggcacgcaccatcatgcctggctaatttttgtatttttagtacagacagggttttaccatgttccccaggctggtctcaaactcctgacctcaaggtcccacctcggcctcccaaagtgctgggattacagaagcgagccaccgcacccggccaggctaataatataatattattaatactaactttttacactgagctgtgcccagcgccgtgctgaaccttttacacttgctgtctcctttgattctcagagcaattccactcagttttacagttgaggaaacaaagcctacgagaggtgaggagacttggcagagccaagactgtgtgtcttcaggttcccttttaaggggagcaccacctccctgtcacctctgcagctttccttgtcaggtcattgaaaggagtgcccggggtctgattttccttggctcccaggccaacagcaacaaccacaataataagcaaaacccctcctttcctttagaccacacacagaagcatacagagcactttcacacccattcatcccatgccattcatggagctgtcctccagctttctggcaggatgaacttggcgtcatgaggcctcgcccagagtcacagctagtgcccgtggtaagagccaagaccacacatgagtctcctcttgggtccaggctctttccatgtccctctctaccctctgctcttttcttagtcatctgccagagccaacagtgcatcccattctgcctggcatgggtgcacagccagctgtcttagagccccagaggcctgggaaaggctgcctcatttaggcgctgacctccaaggttaagcaaacacaggctctggagccatttacatatgggtatgaatctcgtggttggagactcaggttaatctctctgtcccccataagatggaaataataatagcccctttgcatagggttgctatgaagatgagaaaagctaatatatgtaaagtgtttagccagtgcctgcccacagtaaacactaaatcaattagttattattagtaagcactaaatcggtagttatgattcccatctttacagtgatattgattcacttattcaagaatgtgcatgttccagccacgtgtcaagccctgtgctagattctgagaagaagatttgaatgatatgcaacctgtaccttcaaggagctcagtctggagatggggacatatataaacagatagttccagtgcagtggatacatacggtaatagaggttctaagatgtacaaaaggctgtaggggcctaaaggacggagaaaggacactgatttctctttttcaattttccaagccacctgcctattccgtcttttctttctcgagatcaaacattctcacttctctctaaagacccaaccttgtcatcatggtgctcaatcttccttccacactgtgatgctggggaaagccttggggcatttctgttctctcgtgaatccttgaagcctcactttaaaaaatatatactcactcctttgtccatcgtaaaccttgatatttgtaaatatcgataataggaactttgaaaaaacatacgcccttagaaacaagcaagcaaacaaaaacacgtagaatgtcagagcttctccccactccacaccctttctttaaactgatgtcaaggtgggcccagtgagggtcagtgacggaccctgcagtctgagaaagacatggcagaagcataaggttagaggctgttcctgctgcctcattaaaaacaacaattttcccccaaatctggactgaaactgacattcaatgccaagtgtgatctcagtttaacctgccctggtagatatgcatacacttcccatgcgcaccatctcatgtgatcgtgtccacagctttgtgagttgagaggggtgggagtgattatccccaaccacaagcaaggcttccgggcttcaagggttggagaccacccagggctcggccagcatcagaaccaacggcttctaattccaaatcaaatgatggtttatgccacactacaaccctaaacaaatgaactgtgatgtgtctcacttccctgtgcaagtggaagatgctaatacatgtgtatcatgagaaaggacctcacaattttcttcttctgggttctgctgagacgtttctttgattcagagagaacttcccaggatcagcaagaaaagcatgtcatcatttcctaaaccctacaatccaggaaatagtccatcattttataaaattataaaagcgaactatttgagtttctttattatctgcccccttctccccaagctggtcttgtacaaacatgatgcacgtccattgggtgacaagtctgtcgtaagtgaaacgtttacaggcactacaggaatgacctggtgcctcgcccacttcattagaattctaattggggtgtgtaggagaggattctataaatggtaaggcaatccttggcagcctgtctgtcagcactgtccgtgccattcccagaggagcctgagaagaggcagaggaaggcgaaacatggctggtgagtgcatggcatcttctccatcaggtccttgccagaagcctgtgcttcccctgggccagcctgccaagccagagtgtcyggccaggacagctgcctgccttgggggctctgaaggccagacttcctattttagggtgctagccagaggcggctctttctcagtggtggttgggtccctctagcatattcttggggtagaacatcattggaatgtagctctgaataatgggcagggtgttcagtgcagctggacatcgcatctccttaggcagaggacaagctttgccttgtttgtgtttgygtttcttttacacatccgtcgccacccgtaaagccaaagcagacaggactcgggtctcgtgtttctcagtgtagctgtatccagctgtcagcagtgtcagcaaagaagcacatctcagaactaccagggagtgagagtggtaacatgtaagttgatttgaaagaaaccattgtttatttcaaatcaacttacttaggagcattaggaatgctcctaagtaagctacacatcagaagcatcagacaggctctgtgtaagtgacttgatgagctgaagcctccccgtagcaggagcaggtgtgccacaagatgtcctggtccacaggagagcaccagggaacaggggttacaaagaacaacaggaagtgcaggttcccccactctatgcttactgtcgaggatatgggcctttgttaatcagcacccctgctaagcagcatgctaattattatctgtcttgtgtgctcagcctagtaggttgacagggacgccaaatccaaacaagatatgagtcaaacttgtaaaatattgtgaatggcgattagggctgctggaagattggccaaagacatcactgagccaaatgcaacaggcaaatgctggctacttcagaagccacaaaaactgggacaggtgattgcacattaggccccctcccctgtctcccattccttgctgtaatgtacagcatggctgggatgctaagaagaggagctctggaccctacacactgcagcaagaggggaggtcagatgtcatctagcccatctccctccctccaggaggtggctgaggcccaggaaggggtggaaccttacacacagtgaatccatcgcagagccagctaggtctcagcagtgccctttccaccaygtcctgctgccagagctgagctcctacataagtgcacataacatctggaacataaaaaagcaattctgaacctggcttctcatttgagctttgtgaccaactgcttgtgtgttctctgccacccctgagcctcaarttttcaagatgaaagctttgaaatgaatgcgttttgaggttccttccagtaccgacttttctttctccacaaaaagaaaccagagccagggagtggacaggcacgtgcccagcccccaggaatgtgcacctcccatccctgtgcaggacctcccgtggactctcaggaatggcctgcccgctgtgaggcatgattaaatgtctctgttaacaaccagagatgttctaaagtcacaacagaatgaggctggtggggagaaaatcaattttgaaaaggtggtggagagacaggygaatacattcagtcccttaaatttgtcccacttgcagttccyagctcagctccgagtcactcagccaggaagttcccaatcagtgtttcttggatgaatgaatttattcactgaacacctaagggagaagagctgtgccaggtgcagtgggaaatatggaggtgaatgagatgtggttctgtcctcggtagcttttagtctgatattttttggtaccaccggttttttaggtragcagcatgcaaggcagactgttattaagctgcatgacaaatacaaaacaagtgctacggggaccaacaagagaaggagattagtcttgtctggaatttgggatagggaagactctgaaaaatggtcacagacaatgagttggacttggtctggagaggttttgcagggcagagggaacaggaaaataaatgtcagtgtgagcaggtgtgacccaggggactatcgggatgacaggtgtgctgctttgagaggactctgtgtccagctcctaatttaaggttcttgttgcaatcagaaggggttccattattccaccccttggtggagaaggcagcctgggctgtggctggaaatgaaggtagtggaggaaggcctggcagtgatccgcaccaagtggcctggcatccccagagtgggtgggagagcagtttgtgagcrcagaggagggccccagtgtggaggggaggcaagattccccatccccaaagccacttggaagccctgggttagtggcagagttctcaggratacacacctgaaccacaggcttctgcctgcaaatgaccagaacctctgttttggggactaatggctctgtccctctggggcagtgagctttcttgccaactacttttccaggcagagcactggccttggcttcagggacttcccatctcaaggcctcatttcctccacccccaaaggacctgtaccattcccagcgtctgggtctaccaccaaaccgttctccttggagctgggacaccagtcgcccctcctcccatggaagcggtcaggaattgctcttgggttctggcctccttctcttctgtaaatcttctaggtgcttcctggaccctcctcatatttttgtgtctggcrctgggaccaaggcaatatctactctctctctctctgaaaaggagatggcccctctgggctcagagtcttgtgactccagctgctcattgtttgaaatgaggaccagctgcctcctgtctgcccggctccatggccttcttccacytgggacagcggctactccctgttccttagagacagcccatgagcagcttcattccaccgggaatgacagctgcccgtatttcagcgtttgttcctgtaggattccttacaggatagctgatgggttaagagtgcaggttcagaggtgctctctggatcaaggctccactctgccccttacgagaagagtggtcttgggcaggtcacttaacttgtgtgtctcagtttcctcatctccaaaatggggttattgcagtatccacctcatgggtgcttacgattacctggaaattttttcatgagcctgttttctcyttgtcttggggggayttaagaaaaaccctatgagaggaattacattttctaatcaggggcgattcccaggggaccctctccattaagcgcctcagcacaagtcctccccactcccgcttcatccattcccaagtccaaagtcctcatgcctgagcactccccttgttcacctcaagtaacttcatgcggctccaccccgcagggctgtctctgcagatggagcaatcattctcctccccagggcccacgtgccaggctggggtgtgtgctgaagttaggaaatctcgcttagcagtggagggcacaaggccctaggatcttggtaggagctgagagatgggagtcagaaggagtcagccttcccctccctcagcctgattttccttatttgtaaaaagaggacagygactcctcccctgcctccttcctatagctgccgggtggctctggtcaggtaattyatgtgaaggagcttttataagtgtagatgataaacrggcctaaggtagtgaggtctcagtccctgctgcacattagaatcaccaggaaagctttaaagaaaatgctggccgggtgcaatggctcacgcctgtaatcccagcacattgggaggtcaaggcgggtagattatctgaggtcaggagttcgagaccagcctggccaatacgacaaaatctcatctactaaaaatacaaaaattagtgggrcatgctggcacgcrcttgtagtcccagctacttgggaggctgaggttacagtgaggcaagagaactgcttgaacccaggaggcaggggttgcagtgagctgagatcacaccactacactccagcttgggcaacagagagagactccatttaaaaaaaaataaagaaagaaaggaagaaagaaaggaawggagggagggagggaaggaaggaaggaaaagaaagagaaagagaaagaaatagaaagagaaagaaagaaagagaagaaagaaagaaagaaaaaaagaaagaaagaaagaaagaaaagagaggagaagagaagagaagaaaagaaagaaaatgccagtgtcatccctaaccaaagattctaattgaatttgcctgggatgggtctcagaccartagaacattccaggtgattcttctgggcagctggggttgagagcctctggtctcagagattctaaactctctcttaggaagagaagtccttctgtcctctccttttgccctgaccatagggtgtctaggcagggagtaggctgtggatggcccctccaggacctgtgtctaagtcattgctgccttggttggctacagggcggcagcttggggtcatatctggtcaggcaaaattgactttcagtctgggcttkagtccagcctctgcctgagtgtttgatattgmgtaagtgacttcacctgactggacttccaaagccctcatctgtgaaatggggacagcaacaccattttgatagtcagtatttcgtgactattaaaaaacataacgcaggtgaaatgcttagctcagtgtctgacacataagaggtcctcaatagcagcccattaaaagctcaaagcctcttctgctcttgggttgtttttgccattacatatgggatcccaacagtattagtttcccccaatctctgggggccccggtgctagtgatgggtatatgttgaatcccaacaataaccctaagagagaagatgttccaggtctcactgtccctcttctacaggtgagaaaagtacaattcagagacattgagacccttgctcagggcctctcaccggttcaggcaccaatctggggctcatttctcttcatcctcaccagccccttactctccctgaatgccaagaaattgtgccacctgtgctgcacagagcttgaaaatgtcatgatatgtgggggaagttaaaaggaaatgacacaggctagaaagagagaaaggagagagagatgggtgctgagcaggaaagcacgtgtgtccttggagccagaggaggggccagccaggagctaaagatgttcccagtgtctaggggtgggaagtgggatgactcacagcctgtcggtgaccargatctgagacccggcttctgggctaagatctgcttcaactccgtgacttcccctttcatgaaggggagatggcttcccmtttcagggcctcagctttctgacctgtcatgtgggcatactagattacatcactgtttttcaagctgccagttgccatccattagcaggttgtgaaatcagtttagtggactgtgaccagccattaagaaaaaaaaaaaaagcagaagagaaaatatcagagtatattgatacatagtaagcattagccgtgtgaaaccttgtgtcagttccagatccatgtatgtaaagactattagatagatttcttgatttggcttctctcaatagagcttaaaaaccactcagctagatactttttagcatttttttttttgagacggagtctccctctgtcgcccaggcaggagtgcagtggtgagatctcagcccactgcaacctccacctccccagttcaagccattctcctgcctcagcctaccaagtagctggaactacaggcatgtgtcaccacgtccggctaatttttgtatttttagtagagacagggttttgccatgttggccaggctggtcttgaactcctgacctcaggtgatcttcctgcctcggcctcccaaagtgttrggattacaggtgtgagccaccgtgcccagccactttttagcatttctgtyagccctcattaactctagacttctgtaaaataaaaatgcatctatgtctagagaaaaggtgtgggaagtagagtctggttgggggctagggatagtcccagccactagagtagcatcactccatgttgggccccctgtcagcccctctgtggtgtggtcctccctggaacaggagatgggagccccatcacacacccagcgaccaagtcattctcacccgtgtgctgcaggtgattcaattatacagccaggctgacaaggattgagacggctgactagcaacttccctttcacagtctggagtctttctctgtgcttttcatgtgaaagagggaccacagaataaatgggcaggggttatattaacatatttgtgattatgtttggctgtgattaacagtgaacccccccaaaaaacaatagcttagaaaaataagacagaagcttatttcttccttacacgaaaggcctggaaccaggcagttctgggcaggccaggtggtggcaccatcctcaggccctagctctgtccagtctcctctccaccatcgctagggtacgtatggccctgcatggtctaagatgtccgctagaggcttgtccctgtcacacccacactccagacagcagaatggaagaagaggaagaaaacaggcaaagggcatttgccaactgtttatataaagaggttttctaaaaaaaaaaaaaaaaaaaaaaaaatttaaaacargtattcaaacaaatattaccatgtgcacattcatagcagcactactcacagtagctaaaatgtagggacaayccagatgtccatcagctgatgaatgcatcgacaaaacatggaatattcatataatagactctcattcagccataagaaaagaatgagctactgatgcatcctccaacatgaccgarccttgaaaacattatgctaagtaaaataagtcagacccaaatcacatattgtgtggttccatttgttaatttatgaaatgcccagaayagggcygagcgaggtggctcacractgtaatcccagcactttggaggctgaggtgggcggatcatttgaggtcgggagttcgacaacaggatggccaacatggcgaaaccctgtctctattaaaaatacaaaaaaattagccgggcgtrgtggtgcatgcctgtaatcccagctactcaggaggctgaggcaggagaatcacttgaacccggaaggcggaggttgcagtgagccaagatcgtacctctgcactccagcctgggcgacagagggagactccatctcaaaaaaaaagaaaagaaaaaaaagaaaaagaaatgcccagaataggcaaatccacagagacagaaagagttggggttggcaggggctggggataggcggaaatggggagttcctgctaatggagttgggggattctttgaggagtgatgaaaaagctctgccactagatagtggagataattgcatattgtgagtgtactaaatgcccctgaattgtacattttaaaatggtttaaatggcaatttttatgttgtgaattttacctcgattttttaaaagagagagttcctggaagttaatacctgtaacttctgccraaagcttttggcctaaatttaccccatggccaccgagccagagtggagcctgggaaagtagtgcctgcacatatgggggatttcattaccaggaaagaaggaacgagtgaacgttgggatagatatttatctggcagtccaccacattagaattgctgctggcactgatgttctcrggaaaaaaaatctgggaaattgccccaggcctgacactggagttaagcattaactcagggaggtggcacggaatcagagtttggagatgtcacactgtgggcaaaccacctctctggcctccatgtgctcacatctggaataaaggttaggagtatgtgattgttctctaaggtttttcccgctgatgtcttttaagtgtgtacgttgatgagtcagttataagaatcatgcgactcctgtctcttcttctcctcccttcacccagactgtgcagaagacataaggtgcagaagacagccctgaggctcgtaaatatacaaaaagctgtaaacctgagaaccttagacagctgagtaccttcccctcctctcctttcctacacattctgacagggtgggctgtgatgagtgacatgtcaagggctttgggattggggagacaggatcattggatccttgaattggrggctggcagagcaatcctagggttaagggacaggacgatgactgagggaggcagccagtgaagggttyagaaccacactggaagcttgatgagcacgctctcagctggcagcccctactcagggatgcrgggcaggctgtcccctttgtccagctcccctgaagacggctcttttggaagagatgttttccttccaggagctcgctctctcccctctgtcggaatccaaatgctagcaggtggacgatgcagcatgagggcccctcaccacttagggcaccttctggactcaaaatcctgcatgagaccctcttccagaaggaggtttcgggaccacagtgacagggtagagtcagtaagtcctggtgaaaaggaaacaccattttttcttccagactactcttaatacttcttaaccgccaaatgtgtggggtttgttctcataccaagcgatttgcagtggacacccaccgggtgtcctacccttcaactcaattctcacactgtttggagttagcacacagcctacagggagtgcacacacccctcagtcccacaacactgcccccacttcagatgccagtgcttcagaagttgtcacctgtgcttctgactgaccagatttaaatcgggagttcccaccagcccattctcaggtttgaagatttgctagaacagctcacaggactcaggaaaacagacgaccagcttatggtaaaaggatacaactcagaagcagccagatggaaaagatgcctgagacaaggtgtggggaggggcacagagcccccatgccccyctcccagcacttccatgagttcagcctggaagctcctcaggccccatcctttggggtttgggtttttatgaagacttcatttataggcatgattcattaagtcatcagtcattggtgatgaaatcaacctccagtccctctcccctctgtggacgtgggtagtgggcataaggctgaaagtcccaagtctctagttggttcccctggcaaccagctcccatcctgaggctatccaggagctgccagtaccagtcatctcattagcatacaagaagtcactcatcattttggaggttccaaggctttcaggaactttgtgccaagaaaaagcagagatcaaatacrtgtttctcattatgccacacctgggttcaggatcctggctctgccaatttccaggtatgtgacctcagttaaactacctggtctctctgagcctttgttcctcattgtaagatttcactgaccacatacataasatgttctgtggactgcgcatagcagttggcataaagaaggctgatgacaaaagtgagccccacttttcctcctcctccagctcggagcagtctcgcacatcccacagccaccctaacagggagcaaggctcgttggtgctgccggggctcamgcttggtgtcagaaaaggcagagatgatgagtgcaaatgcgagctctggagcctgcagtcctccactgtggagtggggtgacaacgaccaaggcacctggtttctctacaccttggcttccttgtctgtaaaacaggacgtctacaagtgcctgcctyatggagttaatgagctaatgcacgtaaacactttgaaagatggctggcacacaaatgcccagtaaacttcaactaatagtatgatcaccaccaccacagtcaycccaggtctgacctagtgtggcgtgcaaaatacscctcatattcttcctgcaggtttccctgttgggaggcaccctggagctcagttttttctttttcakcctctctagggacaagacattggtctctgggatgaatgggaggagcctctactattgacacagccacagcaaacaatgcatgarctttgctggagcaaagaagggtgtgggcctgttgggagaggcaggtgccagcaagagatgctgagtaccccgcccctctttccttaccactgtgctggacaaacagccatctggagcagactttctactttcaaagaactcatggtctagaatgagctttatctggaaaaggacatgcatcctttgggatttggaggtggggtgaaaaatctctaaggctcaagtgctctgaaaccacatgttccatagagttcctgtttcctaaaaatatatatttccagaggttcttatttgagaggtcttcttttttctttttcttttcctttcttttttttttttttttttcattttgagatggaatctcgctctgttacccaggctggagtgcagtggcatgatctcaactcactacaagctctgcttctcaggttcaagtgattctcttgcctcaayctcctgagtagctgggattacaggcgtgcgccaccatgccaggctaatttttaaatttttagtagagacggggttttgccatattgtccaggctggtctcaaactcctgacctcaaatgatccacccaccttggcctcccaaaatgctgggattacaggtgtgagccactgtaccccgccagcccttcttttttctaaagtgagtaaagttttaccaaatctcaactggctgggatgcacagaaagtagtgagcaaggttggcaggaggagaggggagaaagttgggggccatttccctagagagatctggcatctatcagctgtacacagccatctagggctcagtgtttgccagtgtctgagttctgggctgtctctgttggttattcaggtacagaatgctcattttccccctgctccctctgtcctttctgtcctcccttatttcttcccttcattcaacagacccttgttgattgcacaaatgtctcagtttccctgaatttgtgcaaaaacctattaatttattctttcaatgaatatttgttaaatgaatgagtgagtggatgtttgaatgaatgaattttagcaccctcagctgggagtaagctcacctcttgagtcccctctctccagtggcaggttggctcaccatcccagggagcctgcattttactggagagggtacctatggtgaccctctgccccatctccagtgctcttgagtggaagcccctccgcagtcctgccccaacccccactctctcctgtctcacctttctctcttctccacgcagcgcccctgctccagacaagtaacatcactccttctcttgtgcctttgggcctctccttcccactgtctagaatgcaggcagctctatgggcacccggcaaaattctctctcctttcaaggcccagcattttcagtgtagcttttcctgatccctacaactgaaagtgactttttttgcctgcctgcatctctcatacacctttcctggatttatcccattccaccattcatgatcacttatgcttgtcttatccactgctgaagctcttggagagttataactacacttcatacacgtgtacactcccaacattgtgcctcacacaatgtcctatgaataatagctgctgtaatatttttattgaatgaatacttcatattcacttttccttgtagactaaattttcagctgtcgtcatgatggtcatcgcatgatattagtcttttctttctttgttcatttattccttcatccatttatttacctaattatcctaatacagtcaagcagtgtgctaggcatcagaatataaagatcaagagggggccrggtgcagtggctcatgcctgtaatcccagcactttgggatgccaagacgtgcagatcacttgagcccaggagtttgagacaagcttgggcaacatggcaaaaccctgtctctacaaaaaatacagaagttagctgggagtggtggctcaggcctgtagtcccagttactagggaggctgaagtgggagaatcccttgagcccaggagccagaggttgcagtgagccgagatcacaccactgagctccagcctggggcaatagagccagactctgcctcaaaaataaaatagaataaaagattaagaagggatgttctgatgcagagagatggacacaaataaaaaagagctgtgtctggcactggaatgcaccttcacactctcatcagagccatggcctctgtaaagacagagaccagtttggtttgcagaagaatgggtgatgtaacctcttaaacataactcataggaagatttcccaaaaagtttatatcagcgaacacctggtacatcatggcatctctcataaacccttctcagtttagctccgtcatcttcacaaccatgtgagagtaaatcaggagggtggattttgagatgtttgtcctcgggtcttatccaggtcattcatggcctttgacctgctcctataaatagctcttgccagtgagcatttgcaagtcccctctgggctgaggattccccaattgctaggcctagaaacactgctcagagtctccgccagcctccctagcatcagaggcccaggccaataccgaggcattgcaaatacagggaaggtaaaggatgcaaaagtaaacatttgctggatactggagaggcgaaacatgcttggtgtctggggacacacaaggggacaacaaagaagccaaaccacggtgatgggggtgagagaggtatcctcccttcagttcttttttttttttttgagacagagttttgctgttgatgcccaggctgtagtgcaatggcgtgaccttggctcactgcaacctccgcctcccagattcaagtgattctcctgcctcaccctcttgagtagctgggattacaggtgtgaaccaccatgmccagctaattatttgtatttttagtagagatggggtttcaccatgttggccagtctggtctcaaactcctgatctcaggtgatctgcctgcctcagccacacaaagtgctgggattactggcgtgagccaccacacccggcgcctcccttcgtttctgttggagcccccatccacaaagcaatgagaaatgctgaaagcagacagaacgtaggtgctctggtgacatgtactcctcattgattggatggagctccactgaacatttggcccgttccttaagggccgagtgacagctcagcagatggaggggggaaagacactctcagctgtgggaacaggatgcacagaggttcagctgtctgaaagggcagagcattttctatgatcttgcatcctgtgagctggcataactgagtctggaaagattgagtgggaataggttgtgatgttcttgctatgcaagatcaaggtctttggattttaatgtgattctttctaggaatttggctctgcccttgacaagcctcaccccaaagctgctctttggtaacttacacccttcccccacaccaccatcccttgcctcctaggacttcaggttctcctttctgcctcacagctctaggagtccagagtatcaactggcagamggccttcaaccgacaagcgcatcacacagacaagttctccagccaggagctcatcttgcggagaggccaaaacttccaggtcttaatgatcatgaacaaaggccttggctctaacgaaagactggagttcattgtctccacaggtacctgctcattcccctccttgcccaaacacacacatacttgagtagcccttgtkcattcaaggactgayggggaccacactggggccactggcattgggttctagccttgctctgtcattgattcagtgtggccttgggcaagttgctgtccatctctgagcctgagagtcaccatcctcaaatcaagagggatctggcctgtatgtttgttccagttacttccagtggtagaatatggcgcttcattggctcatgtcccccagaggggggttgtattggaacctggtctctccacagtctgaccagtgcttgttggttttctcaacctctgtcttctttgacagggccttacccctcagagtcggccatgacgaaggctgtgtttccactctccaatggcagtagtggtggctggagtgcggtgcttcaggccagcaatggcaatactctgactatcagcatctccagtcctgccagcgcacccataggacggtacacaatggccctccagatcttctcccagggcggcatctcctctgtgaaacttgggacgttcatactgctttttaacccctggctgaatggtaggtgtctagccacccacactctcagccctggcctaagctagaaaagaaaaaggggatgggggaaatgatcttcacaggctcaagtttgattagggaaagtccatgggctgtggaaagggcgcagaagctagaaatgaggagctctgacacttaagcagctgtctgagtgtgggcagtccttctatctctccaagccccaatgtcctcaccattaaatggacatcctgctgtttcttctgggaatattgtggagatcacattgagcttttacaaactgcatagcatggttcattttaagggacaataccacagtataattccacagcatggagatagctttctgccagaaagagcaggtgtcttatccctggggtctcattttcagaccctcgggtcatcctagcttctctttccagctcatagttcccacaattggagttggaagagttacagcccaagggtcaggggagggctaaaggtggggcttgctccaacccccaggccggttcaggagtgggaggagaggaggaacgatccctacagtcctccgaggattctagtcgctggtgtctgctttttgtatcaaatagtggatagcgtctttatgggtaaccacgctgagagagaagagtatgttcaggaagatgccggcatcmtctttgtgggaagcacaaaccgaattggcatgattggctggaactttggacaggtaaaagggtcataaggaagctaagggtaatgtccctgttacccaagaagctcagcagcttgccccacagatcaatgggaagtcccacatctgtccatctgcctgcccttctwtttgttcatgtattcagaagactttcattggccacctattatgtgtcagaccctgggatccacactaaggataaaggagatgaataagacagatccatctttgagggggttgcaatctagtgggcaagacagaacacacacataactcaattgatgcaatgaagtagtattggtgccaggatgcacaaataaatataaggcccccaagagacactggggacagtaatgtagcttctgtttttcattccatgtaacaatgcgatgacacttccttagtgtgcccactcagcctttccaagccacacccttttgttcctttattacagcaatccccatttgagtctacagagttctcagatttggtcagtttagaaaactttcaagratgccctccaccttttagtttatccaccagacaaaggcattagaataaagcacctcgggcggggtgccttggatatcagaaagatgtgtgcttggaccatctacagaccctgtctgtagtcaactggagcaagttgggaggaagaaaaaagagaaggataggacatagagtgcacctaggagtggaagagaggctatttttttttatggcatggttagggagggcctcacttagaaaggagcctttgatcaggaacctgaaggagatgagggcaccagacagagatcttgggaaagagcatcaggcagaaggaaaagcaaatgcaaagacctaaggcaagaggagctcggccttctcagtttgagaagcaatgacttcaattaagtcttattttgtgaaaatcacttcaaatacatatactttagcaagagattttatttttataactagttctccaggagtctcaataacgtgctcaagattgcaggcaggccaggtgcagtggctcatgcctgtaatcccagcactttgggaggctgaggcgggtggatcacctgaggtcaggaattcgagaccagcctggcctatatggcaaaaccctgtctctactaaaaatacaaaaattggccaggtgtggtggcacgggcctgtaatcccagctacttgggaggctgaggcgggagaattacttcccaggaggtggaggtcacgatgagccgagatcataccactgcactccagcctgggtgacagagcaagactccgtctcaaaaaaaaaaaaaaaaaaaaaaaaaaggatgggaggcagagctagaaggaaactctgagatgagtttggcctaattatacagatggagaaatcgaggccagacaggctaaacagcttgctcttgaggtttgtggcagccggggcgtcggctagaccaagccacctcccatgcattcactttaagagagtttgcacaaggtcttatgcttttttatttttaataattttttatttattatccttttctgtctcttttttgttgttgttgtttcaaaagctgcctttgaggaaatacacagggtcttgtgtgtagtgagtgctctggatgagtttgcggggttgagggctgggcatggtggctgtcctcagtagctctcagttccagaggccacagagtcaaaggatctgatagttcctgtggttcttgccagtgcagttcccttcttgagccaactctccttgtcatttctttaattgtaatgtatggtctcgttctgaacagtttgaagaagacattctcagcatctgcctctcaatcttggataggagtctgaatttccgccgtgacgctgctactgatgtggccagcagaaatgaccccaaatacgttggccgggtgctgagtgccatggtgagtaacaggaaaacgatcacagctagttgtcatcatatattgaacaccacctatgagctaggcacgcacactctttacatatgtcatctcattaaagcctcaccaattacagctggtggttagaaccatccacattttactaacttggagcacaaggcccctctaagttacagggcttgcctgaggcacacagtgagtatgtggcagaagcagagccagacccaggtccagccagcttcaaagccctttccaccacatcatgaagcctttctcagaggaaaagggagcttgctctttgagtgcctgccaaggatgggagaatgcaaagctagggctctgctccatcattgggcctcctgggaaaggaagcgagaccctgattgagctggaggtggtgacctcctttgcctaactcatctcttccacagcccagagcacagcccagagtgtcagatggtaggctgcctcattcatggtctagatggggaaacaagcttggagagctgaagtggcttgctcaaggcacacggcatgcaagtcagaccagaacaaggcctccatggaaaaggcctgtgcccctacaacacacacaaacacacacacactcacacaatcacacacactctctctctctctctcagacacacacacacaygagctagatcccctagaaggcatctatggctctgcactcattgtgtagagaatatctccaaccagtctgggcgtggtggctcacgcctctcatcccagtgctttgggagatggaggtgggaagatggcttgagcccaggagtttgccaccagcctgggtaacgtagtgagacctcgtctctacagaaattaaaaaaaaactagccaggcataggcagacacggtggctcacacctgtaatcccagcactttggtggggagatgacttgagcccaggagttcaagactagcctggacaacatggcaaaaccctgtctctacaacaacaacaaaaaaaattagcagggcatggtagcatgtgacagtagtcccagctacttgggagactgaggtggaaggatcacttgagccaaggaggtggagattgtggtgagccaagatcatgccactgcgctccagcctgggtgacagagtaagaccctatctcaaacaaacaaacaaaaattagccaagcatggtggtacatacctgtattcccagctactcaggaggctgaggcagggggattacttgaacccaggagcttgaggttacagtcagctatgatggcaccactgcactcaggcctgggttatagagcaagaccctgtttccaaaaatattcatccagaatatctaaacctagatcaacctgctcaaaagttgtaagttaagatgcaaaaagtcgtgatcaggcasagtggttcacacctgtaatcccaggactttgggaggctaaggcagagaatcacttgagcccaggagtgtgagaccagcctggacaacatagtgagacctcatctacacatacacacacacacacacacacacacacacacacacaggagccaggcatcgtgacacatgcctgtagtcccagctacttgggaggctgagctgggrgaattgcatgagtccgttagttgcaggctgcagtgatctgtgattgcgccactgcacttcagcctgggtgacacagcaaaagcctatctccaaaaaaaaaggcgaaaagtcaaagtgaattctttactttaatcctcttaaactaagtaattacccagaaatcctgtaacctttatttatttatttctatgtttcatggtttaggcatttcttgatctcttgacttttgagttggatatgtccatgctaatgagctagttacttggttaaaaatgtgaacaacttctcagctgcatgataaatatccggggtgcatctgagagggcttttggaaagagctgagtcttagactgagcctggcaagaaaggagtaaggtgggcccagggaacttagtagccgagggagagtatggagaggaagtgagcctggaacaraatcttgaaaccaaatggcctggaagaggtgggattaaagccctggtgacttagaaggctgagtctctttggcctaggagagagtgggtgaggccagcggctcctgcagctgctgactcactcgcaccccagggccaaaccactttatcgtggagccaatttcctcagctgcacctcccagatgctctattcagacctcccagctgggctgggccatgaactaattatggcctgtgcggagctttgaagtgctcagctttcagccagagatgaccgtgctgatagccactttggaggctggagcaccagtgactcaggagatggggaagggctgcgcaaccttccatctctaaggaggccctgtcttgcctgactctgccatgacagcycaggacctcctggaaggggtgcagaactcactactgcactgagggcctggcaaggctgggcatggcytgtcctgggcaaggatccctctgtgtccagactgtccattctcatwggccttgccrcttacaggcactccaaggagaaggggtaggacacacaggctggaggagccttcagagatcctggtccagcctctcattgcacagttcagataaacgacagccaaagtttcataaaccctgacccttgactacaaaagacacctcagagcacctttgtcctaactttcccttgaaaattcccttccctattggaaggtgaagaactaaggcctagagaggtgaacagacctttgtgcaatcatcaagttggcaagtggcaaggtggggcttgtaacctcagtgtctccttctctcttttaacttttattatggaaaagttcagacctacataaaagtagagagaaaagcataatgaactcctgtgtctgcatcacaagcttcagcaattacctcttcaaggctggtgtcatttcatctgcgaccctctctttcacagatgatttgataaatcttagacattacacatttgtcataatttcacctgtaaatatttccaagtgtgtccctaaaagacaatggaactcaggtctcgatttctagtccagtgatctttccaggctgcctcttggttgtgtcacttagattagaaccttaaattgaataaatgaatgagtaaactaacaaatgaacaaatagctgaatgaatgaaagaaaagaaatactctatctttattctttccaagaagaagttagttgctaaagttctaaagtgatctttttggccgggtgtggtggctcacacctgtaatcccagcactttgggagctgatgtgggcagatcacttgaggtcagcctaagcaacatggtgaaaccccgtctctattaaaaatacaaaagctagccgggcatggtggcacgcataacaccagttactcaggaggctgagccaggagaattgcttgaatccaggagrcgaagcttgcagtgagccaagatcacgccactgcactccagccagggcgacagagagagactctgtatcagaaaataataatartaataaataataataaataaataaaataaaaataaataaaataaataaagtgatcttttcgtaagaccatacaccaaaaaagagtttcaaaccatggactcccaggcagactgtgacagcagtgatagcctgtggattcttacctgccagaagtcctctgcaagctggagttgtgccctgccttgccacagcacaagctgtgctgtctgtttcccatgtcaggctgctgcacaggaatgacgtatggatcaaggacaatcaaacatggcctgtttgggaaagcacctctaaactcgtaaaccactccatacccctaagggttaagtgttacaatgatcatccccaagtcacctagaaagacaaagaaaagttcaatcatggcctttggcttccttcctcatctccccaccttgtcctctgaattctgcatgtcagtctccctaggaaaggcattagtgctgactcattttgggggggtggtttctgcccagatcaatagcaatgatgacaatggtgtgcttgctgggaattggagcggcacttacaccggtggccgggacccaaggarctggaacggcagcgtggagatcctcaaaaattggaaaaaatctggcttcagcccagtccgatatggccagtgctgggtctttgctgggaccctcaacacaggtaccttgggtgtggtgtgccttggctgggtcagtgggtggcagtgggctatgccaaggtaccatctccaccacctgagtcctcacgcccaccctgacttgcagcgctgcggtctttggggattccttcccgggtgatcaccaacttcaactcagctcatgacacagaccgaaatctcagtgtggatgtgtactacgaccccatgggaaaccccctggacaagggtagtgatagcgtatggtaagtatctcaccttttccctgaacttcgagcaccacatttgagtggcttctcgctctcaccatccttctgggacccaggtccaaacaggtgttgcaaggcaagtaacatgtcatcacagggtgtagaatggaactgctggcaatgctgattacacacttagcagcacccaagacacctcttctcggtgctctgcggtctgctagtctggtctatcttgctgccgtcagacaaaggatctgatcccagtgaaagacagggctcctaaattcactctgaatttatgggatccattggaccttatactactatagaatatacaagttgaaactattgcttttccagcaagaaatatacatttgtttcatttcaagtaatccatatgacttacaaactttcttaaagagaataagaaaagcaacacatcttctcttagcatatatatatatatatatmwcatatatatatatatatatacacctattgyataccttggttgacatcaaaagttcagagtttattctggattccggatgaaaacaattatttttttgagatggagtttcattcttgttgcccaggctggagtgcaatggyacaatcttggctcactgcaacctcaggctcccaggttcaagtgattctcctgcctcagcctcccaagtagctgagattacaggcatgcaccaccatgcccggctaatttttgtattttagtagagacaggctttcaccatgttggtcaggctggtcttgaactcctgacctcaggccatccacctgcytcagcttcccaaagtgctgggattacaggcgtaagccactgcacccggccaaaatgttttatatatatttgggcatttatattcctaaccataagtatgccatgtgcacactatcaatacacacacacacgtaatttaatgatagatgccactggaagtaggaaatgtgtagacatatatctgtaactgcatagagcactagatagatagatattatatagataaaaatagacaytgttacaactgtttaaggttatatcatataccaagttattaccggatggcaattggcaatgatgtctatatctgtagatacacagagatatctatgtatctatataaagtacccatctatctattgttttaatccatttcaaaggctacacacacacataattgctcacatgcatgtatrtggctagataatcgtatgacagatgtaatcttattttcagatgttcaattttgagatagtctacataaaatgtttgtattacttatcattcccagaataagtatatctaacttatctgaaatgtgcttaatgtaactaagggtataaaatgaaacgaaaatagataataatggaaaacactgttaaaacaaataaataacaactccatgccagcaaccgagttgagtaataaaagcatcccttcccttctgaaggagagtgaggtttatgtaactcaccccagagtcaatggattctggggttttactaggggagagaaagcttatttaaggagtttctttcttgatctgcacatacacaactttctctctaatgatattgcttacttgtggccagactttgttttccaacttctcatgaatgagtgtcttcttttccctgggcttttctttgttcttgtgtccaaaatcccatcgcaaccagctctgatcactggggctatgccattcctaactttagtttcttctacaaaaggagatggttggtgagacaagttgggggtcccctcggcataccctttctgtgattatcctgtacattaggaactgcagggacgtggaaagcttaagtctcagttcctccactgaaagcatttttatggtgctgttaggaggcacggggtggggargccactagtagaggctaattagcaacacagcatggtgtgtgatgcccaggcaagtgactgagacagggataccaggaactcggaggaaatcctcaaggaaggcgtcctggaaacaggaaagtgaggcttttaagctaaatttagaattagaacccaggtctcctggttagtgattcacactgccccccacatcagcttaacatcacctttgggacaagtaggagctgatggagacattccagggtggctctgtggtcatttctgtggcctcatgggagggggccaggcgcagaagctctgactgttcctgaggatcttgtcacccctcccttcctctccccttttctgaaccttctcagaaagccaagggagctgatagttactccctacaccattccctacagctgatggttgggggagccagccctggagggcatgaggacagggagtcccaagcactagctccagccctaccacccaattgctgtgaggcttgcgcaaggcaatttatcctcctggtcccaagtttcttcatatgtgaaatataagggttggcctaggactagatgatttcttaagtcctttgccagyttaaatgtttaaattctcgggagcttcagcccactccactttctataagggagctagccctcccaagggagccctgctgttccttcctccttgaatcccatgcaggggagagctaaaccaagagccagtttctgcctggcgtgaaattactaagctattcttataagggcaaccggagtttggacagaaaacctctgacatgaatctttgtatgttaccaaaaagtgttgaaagctttagaaccgtgcccagatttgcctaaagtaatagaatgtgagaatcaagggagattaagcattagaagtgcttagtaatagtaacagcagcaactaataatttgttgagcagttgttgtgtgccaggtactgttataagtgcttagatttcatcttcacaaatgacgtaggcattgttattttcatccccaatttatttttcatggatgagaaaacaaaggccccgagagaagtaacttgtctaagggtaaacaccgggagacatgtagacattctaagcgcataacattatgtaagttccttgcctttgctacacctcaatttcccacttgtaaaacaaagggccagatcaggggacctcagtgacattttctaggcctttcttttaatcagattcacagcagccagtggggtaaatttttttctaagccactctgctcrtgccaatggtttggcttaagagkcacgcagttccggagtattcactctcttcagagtgaggacacttttcgggggagcttagtttgggatgcttctttgagatgtcctccttcgggtccactgcaaaggaagtctctggagcctattcagccaccgagcagcagccgaatgatttggaacagtttagccaaagttatcttgacttttctggcttgttttcttcattcatttggcttgatcccccaatttctagagtcatagatctgactctacctgtagactttgcagaactctgaggtagaaggtgcctagagactgcccagccctgccagggaggtgaagtcaggcagtgcctccagctgtcagcacccacacctcagccaagcccctggctcctcatgcaatctctccacggcctctgcctctgaatacctgcttccactaatcctgaactggctcctaggcccttagtgaggaagtgacagagagtggtttcagcccagaaacaactcaattcagcaaacatgattccatgcacatctgcactggactccgggcaccaagaggaacaagatgcaggaactgtgctggaggagggtttttgtttgtttgttttgttttataactaggccttagagactgaatagacgagtttacagctgcattaaaagcttggcaattatggagtagcaatgaaatcaatgaattatttgcaagagtcagagacagcacagaggtattattggcactctcttggcgtgtcaggaaaggcttttttggcagaggtagtatctgaacaaactttgggaggacaaatgggagtttacctacagaagggcagggtttggggccactttctaggcaaggtctcctaactctgtgatttcaaaggtaagcatagctcagttggtgtctgtagagcagtgttttataaacgtcaaagactgcatgagaattaatttgtgtggggaaagatgagagcagcggaaatctgcactttttaataaatgccttggatagttctgatgcccgcagcctgtcctctcctgagcttatgctcctgaaaccctcaggaaaggagtggagcccgaggttggggggtgggagacagcgtggcacacaaccagaaacccacaccggaatttccacatggcgccactgggcattggaaagatgcacatcccaaatatttctgtgtaactgaagtggctggcttttgcatgagggaggaaccaggatgcagttgttatctgctctgccttaaattcctgccttgcaagcaagtattaaaatacagctacttatcaattttttttttttaaccagcctgcccttccccttgggtgctctgccaggagcaaattgagtgtgaaacttggtgtccttattcactttctcatccctcccttgcycctctcacccacctgggaccatcttcccacactccttcccttgccttctccttggtgagttctaaccgatcatgaaggcctgttcaaaaagactccctggatcctggagatcatttttatgatgcccttttaaaaataattataaaaaaattcaaaatacatacagaaataaaaatcatttctgatcttattcacatatcttcaacacttggtagttttccattcatcttttctctmtgagttattgttatttacagaattgggatgatacattttccaaggcatgagtagaagacggagcatataatagacacatcccactttttcccacacctcgaaaccaatcacttcaccattagttttagtcatgtgttttttactaaacattatatcatgagcattctccctatgtcattaaaaaatcttcaaaaataagatcatttcaaatacgtcgtaagtgcatcatattctmttatatggaatggaacctatgtaaagtcaggttacataaaatggaatctactgttaacctgtttcccttttttaaccccagctgcctggattcaaatcccactctgcttaattactcactgtaagaccttctcaagtcacttaacttccctgaacctcagtttccagagttgttgaatggggaataataatcatttctgtcttttagggtgttgtaaggattaaataagttaatatatgcaataacacaggactcaactttctgtgttaacactgtgttagctatgatcatccaacttacatatattttctaattatagaagtaatgagtaattsacatgatagaaaataaaaacattatagaaataagtaacataaaacttagtttgtatgcactatatatataacacatacaccaaactgttaatggtggatatctaagaaaatagaattattgtagactttctccaawgttttatgtataattttttaatgaacrgctttatcatacatctacatatatacacataggtttttttctttttccttttttatttccataggtttttggggaacaggtggtattcggttacataagttctttagtggcaatttgtgagattttgttgcacccatctcctgagcagtataccctgaacccaatttgtagtcttttatccctcacccccttcccaccttttctctctgagtccccaaagtccattgcgtcattcttatgcctttgcattctcatagcttagccttgacttatgagtgtgaacacacaatgtttggtcatactgattttcttatttcatgatatctcttagacatctctccatgtaagtactagattgattttgcttgtcctttttgacagctgtttgatatcccattccatggctctgccaccatttatctgccaattcccttattgatgaacttttgctccaacatttttgctgttacaaacaatgcctyggtggacacctttagatatacatgtatgtgcacttacgtgagtttttccatgggagaaattccctgatgtggacttactggctcagtgagtatgtagatttttacaagtttttatattcattgccaaattgctttccacaaggtcatagcaatttaaactcccaccagtggggtatgacagtgcttgttttcccacctggaaatgagcaccacaacgagtatcaccrtatgctttaatctctgtcagtctaataggtgtcatctatgtatctctgtcatgttatctctttgtcattttaattttcttttcatagtactgaggttaaaactattttcatatgtttggtggttatttgtatttcttataaaaattgcctgctcgttgctatttatgggcatgtttttctttttctatttcttattttttcatcacttagttcaaggaaagtatgctttctcttatcaatttgtaagtacattacaatattgatacagtaaatctctatctagcatgtatgttggatatattttctctgctttattgatttttttcaatcatttgtctcactttgccttcaaattggataatttctagtcatctatctycaaatttattgactctttcctctgtcatctctatcctgctattaagtttatttatcatttaatttcagatatttgtsctttttccagttaaaatttttccatttggttctttttttcatattttctatttctctgcccaaagtttatctcttttcattagttatgagcatattttcctttatttcgttgagcctcgctctagtagctgctttagtctttgtctgacaattccaacatctggattattttatggtgggtttctgtggattatcttttcccttgaggataaaccacattttcctggttctttgtttgttgagtgattttggctcataccccagacgctggatgtgtctgaattctgttctcttgttttggctgcctatcttgggtcactcaacatgcaaactgtctcccttgcagtaggcagtggctctgctctcagttcagggcttttatctccagctgaacagctcatggtctgcctcatccatgcatgattgagggtcacctagaggtttgggcagcttccttgactcttttcagaattcccccctcactctccagcaacccaggttggttcaggctctgctcctggttcctcagatcagaaagctgtgggctgcctgtcgagttcttgctccatgtactttaccccaactgtggcctttccttagagcaaactcataaaaagtgcagcttcctctacgttctgattcctctctaaaatcatagtgctttgatcatgctcaggtgtctttcctagtttttcatttttttccccacagtttatcattatatgcaaaaggattcatctgttttgagcttatcctccacaccagaaacagaactacaggtttgtttgtttacatgtaacttcaatatttttacatactcaaatatatgagtctcttcctttatgctttctgaaatgggtggtctgcttagaactatcttttccacctcatgagtatagaaatatttttttccacgttgactagaacttggatttatgtcgaacttatattttcttcatgttgaactgaaaagtgccaagaccagtgtgactgtagtttccatgggagtggagaggagagaagagggcagaattgggggacagaatgagtaagaccttggctacctggctgtgcccggtgaggggtgagtggtgactgaggcttactaattgagacataagacaaagaacatttgaggactggcaggtgtcattcttcagttcagatcccagccaagagacggtgtggctcttagataagtcagccactcctgcagcaaccycattcattttcggccaacaccaagcacagaagcataccccgccaggcagagggagaaagctgtgtgggtttgcccctgggtggctggctccaatctggattcgttctgctccttagaaaggtgcatgctggtcaaggctttgacttttgagttaggcatacatgggtccacattttgaccctgccattgttagatgcttaacttctctgagcccaagtttccctttttataaaacgggcataaaaatggtacctattncacagtgctgtgaggatttccacgagacgatgctcaccagggcttagcataaccgccgtcacagggcaaactcactcgatgcatgttgtcatgctgcactgttggggcaaagatgtgctgtcttgccactcatctgctgtgtggtcttgggcaagcgctgcagtctctggttctatctgcaggaatttccatgtctggaatgaaggctggtttgtgaggtctgacctgggcccctcgtacggtggatggcaggtgttggatgctaccccgcaggaaagaagccaaggtaacttctctgggtgtggttctgagtcgtgagcctcacagttatttacagccatggacagcagcatagggaagtaactccaaagccctctccctctggaatgcatgatgggattaaaacaaaaatagtttaaaaatagatctcccctgctaattttgcttggctcgggctgctgtttaaatgagtgcctgccctgcacccacaatggccactgttgctgcacagagccttggcacaggccaggtgggcagagagagcagccttcctctgccagtaatgattttccttcaccaactgcagcagcctctccttcccagcacagaaaattcatggttccctgttgcccttggggtttagtccacattctccactggtcaccamccacagcagctctctctgccacaccaagctccccsttaggcaggctgcctctgccatccctatcccgggcctctgcttcctcctctggcctccctctgtctcctgccccatcaggggttgggtcccaggctctcctggagcctttcctcttcccttctctgacctctagagcatgacttgtctgttaccctcattttcagttgttctttgaaacattaaaaagtgatttatggggctgggagtggtggctcacacctgtaatctcagcrctttgggaggccaaggagggtggatctgttgagatcaggagttcaagaccagcctgaccaacatggtgaaaccccgtctctagtaaaaatacaarattagtcgggcatgatagtacatgccttaatcccagctacttgggaggctgaggtgggagaatcgctggaactcaggaaacggaggtaaagccgtgagccgagatcatgccgtggcactccggcctgggagacagagcaagactccgtctaaaaaaaaaaaatgtgatatatgaagtaatatgtgcatgtagttgaaaaaaattcaaactattctaaaaggactaacaataaaacttaagtcttaccacacccccaacccctagctcctctaccagaatcagtgcacgttactagatttgggggcttggaggtaactgagacatttgctaggccacaattttccaaaagtttcattgcaacccattagtggttataaaatctagttagtgggctgtgtccatcattttaggaaaagaaaatgaaatggaatggaacggaaagcagggaaaagaacataaactatcaaggctcattagatatagttagactaggctgggcgcagtggctcacgcctgtaatcccagcactttgggaggccgaggtgggtggatcacgaggtcaggagatcgagaccatcctggctaacatggtgaaaccccgtctctactaaaattacaaaaaaaaaaaattagccgggcgtggtggcgggcgcctgtagtcccagctactgagagaggctgaggcaggagaatggcgtgaacccgggaggcggagcttgcaatgagtcgagattgcaccactgcactccagackgggcgacagagcacgactgcatctcaaaaaaacaaacaaacaaasaaaaaagatatagttagactaaagaccattgtcctgtgaaacttttgtttctgtatcatatgtgtgccaagatgtcaaatgtatttctttctaggggttgtggtgaaaaaagctgaaagtcactgacatctgtctatctatctatctaagcttcctatgctgagagctaagaagagggaagaaatggtcaggcttgggagctcagaggaacaagaggtccctgcaggctgcctgttcagggaagtcttcctggactaggaaggtgatgagcttctaggccagaatgacttgcagaggtagaaaagaggcagccaccctgagcacgagaaagcaagactttcctctttaggaaacagaccaaggacagtgggtcagcatggattaggcgcccggaatgcggaattgtgtagtcttatgtagaggttgagttcgaccagcaagagaatcatagcccgggagggtctctgcagaatgccaaatgagtgggacacacagtcaggggtgaaggaatttgggcggggcagaggcagggggttgcagtggtcctggaaggccctggggaatcgggcactgggtaggttgtggccttggcatatatccagcctctgcatcttggcctccaggggtgttccagtgcggccccgcttcggtcattggtgttcgagagggtgatgtgcagctgaacttcgacatgccctttatcttcgcggaggttaatgccgaccgcatcacctggctgtacgacaacaccactggcaaacagtggaagaattccgtgaacagtcacaccattggcaggtacatcagcaccaaggckgtgggcagcaatgctcgcatggacgtcacggacaagtacaagtacccagaaggtaggagggacgctggcggggcagtgcygcgagaggttctattgtgggaggatggctctgaggctggagaggagaaaagtcctcacctcccccgcactggcagccagttctgcctgaatgataggattgctccctagcacctaacatccacctcccaggactgtttccggagggaacaaaaccatcacgggcagctgttgtgccagtggaagtttgctgcagggcacaggtggctgtcaacccagcccatctccagctgtgtccctgtctcaactacacagctagggtgacagcaccgtgactgaacatcacagggagagacatggcccccatgaaaggcccccaagggctttgggagagatttctccatcagtctgctcccttagcctctgagaaactcagggagaaaaccatctgaacgaagaaagggacaaagaaacccagagacctgagcttgcactgtgcacatttggaggtctcccaagaagccagatgaggtgtgattacatggtgtgaatgcctgagctcctgaaatctcaggcatgctacattgctcgtccccctgaagtcaccttggaaagccagttgctgcgaggctgcctcgactcaattatattcactgcccagagtttcttttgaaaccagcagcgcatctcttggagcattctcaatgatgataaaagttctgcatttgaagacaaagttcatttttagaaacagccaaaagtaatttagtgcttgctcttgcaggccacagtcactcctaaatggggtcaacatttcacactttctaaaatgctttgaaattgctcattccattgatcttcacagttggttctgaggggtcaagaaaagcatcctcataaaggtgcacacagtacccacaaagtaagccctgaatctctaagtgacggttggctaatggtgttggccgagtttacaaaaaaggaaagctgagcgcaggtgatggggtctgacttcaagtccaagtgggtgcccccccaggtgctggtatttgtgaacatttggaggcacagttttagggttatgagattggtggcctcaatttggccccagtcttcctctgcaggtcattcccaggactgagctcagatagacctttgctcagtcaataaacatattctgagccccatactgagtgcctgcttcaygctgggccttggggatgcaacagaggacactgyagatgggctggaggtgtggggatgtaggacaagtattttcaacaatgttatgacgtagaaacaagcatagggggycagggagcaaaaactcgggggcggaaggtgaactctagccctaccagccataattgtgtgacctcgagcaagtttcctctgatctctgagccctcgcttcctcacccgaagaatgagaagagcaatgcctgtcttcagcgggatttaaatgagctaaggtatacaaagtgccaagtgcaatgcctggcatatagtcaagacttgataaatagcagtggtgatctttatcaatttgaacctctatagcctcactggaacaatgacttcccaaggtgactattttgcaggcgctgcttacatgactgtacgatcctgtggggttccttaccttaccccacaccttgatctctggctgtctcagccaaacttcctaaacaatggagaatgggcaggtcygttgtgggggtgggggagggggtccctgaaggactcccagcaatgccccagcccttatgcgacaggacagatcaccctgcctgatgttgcccagatcttcttacctaatgactctagcttctctctgagggccccagagaggaaaagctcataaaatatgttgctaagtattgatgcaatagcaacagcaaagggagaaaacagcaggaggaagcttagtcttgagtaaacccagcaggtgacctatataggcatcaaggctccaagcctcattgtgcaaacacacctgcttcaaggtcccaggcacagaaggctcagatccgtgcactgccttcagctctgggttgaacttacagctggactagaggatgggaaggcatcaaaaggaacccagcccaccaggaactaccagcttaggtaatctggctgcctgccttctttttagcagggtgtgtgggaggaaacttagaccaggggtccagacaccagggaactggccccctctctgcctctgcagatgactggcccagtccatctcagagtggtctggacaagttgtgtctcttcttagggccttaacttgataggcatggacgagttggcctctgaagtctctgcaaatcacatgtaatttatgggaaggggcttgctgtatcgtaaaatgcttacaataagtcatctgggccaggtgaagtggctcatgcctgtaatcccagcactttgagaggccaaggtgagcagatcacctgaggtcaggagtttgagaccagcctggccaacatggtgaaaccctgtctctaccaaaaaggcaaaaattagctgggcttggtggcgggcacctgtaatcccagctactcgggaggctgaagcaggagaacctcttgaacccaggaggtggatgttgcagtgagttgagatcatgccactgcactccagcttgggtgacagagtgagaccctgtcacaaaaaaaaaaaaaaaaaaaaaagagagagaaaaaaaataaaaaaagaaaagaaagtcatccagtgccttaagcatttcacaggttgttggggaaggtgggagaatgtaagtgtggtctgcagacgtcaacatggtcactcttccttgtgtacctgtgttcctggaaggtcamcaccttctcctagatctatcttcaggtcaagccttttgtgaactgctcagtcagccctggctcagaggcttgcagtcggttactcagctctgtgtgccctcagagccattttcaggtacatccctgtcattctctgtgggctacttacgccatcacactcagcagcacccatagcctgagtcagagtcagaaaacccatctttttatccagtctttgcagttttgaaaactgaaatctctggacaatttcaactagtcataacttggaaccacaccgaccatgggaagtccttgtcaaccggcacagatcaaaatgtcactccttgactctcaaagcacctttagaaacaaggcagaagaacatggtttaccaaaaaaaattttttaattaagtcagttctaaatcatcaccttgctttttggcttatgaatgtattctaatctttttcagctcagttcttatgatttattttgaaattatctgttttttaagtctcacaaaagacattttatcagaaaaaaatggaatctaacctaattaacgcaagcaaatgatcaagccacatagtaattgtgtgcaggtgtgataaagcttttctacagattttgggaaatttagagctgattagaaaagcgccagagaccaactggtctgtgagtctccggttaagacaggcgagctggagacctgtgaaagtcgaatgcctgctagggcagcaatggagccagcaccagtcctaggccgcctgtccaggcagggtactgtcctttgcccaggttgccatcacatccctggcatgtttctgtcttttcccaccacacaggctctgaccaggaaagacaagtgttccaaaaggctttggggaaacttaaacccaacacgccatttgccgcgacgtcttcratgggtttggaaacagaggaacaggagcccagcatcatcgggaagctgaaggtcgctggcatgctggcagtaggcaaagaagtcaacctggtcctactgctcaaaaacctgagcagggatacgaagacagtgacagtgaacatgacagcctggaccatcatctacaayggcacgcttgtacatgaagtgtggaaggactctgccacaatgtccctggaccctgaggaaggtaayrcatcccgcagttggaggagatccacgaatccraggtagccaatggccttctggggctgcagggtgtctgctgggctccaggttagtcagctacgaakggagcagccagcggcccctgtggttaagccatgtattaatgctttggaagtttctgtctctatgaacagagtgatgccaaccaaatgtcagggtggtgccaaccaaaatccttttacgccccaagggaggaaggagggaggctttggcagttcatagctatggcacaatatcccttacaagtatataccacctcacacagtttgaccgtctaaaaaaaggcagattttcagtgtccatcttatagaagcagaaagtgaggctgggagagatttgtgacttgcttcrgagataaagtatcatagatagtagtggtagtgctgagtcttggtcctaggtttcctgatactgagtccagagccaccccctgttttctatgttgtattgttcttacccacctcacccccactcccacaacaaatcgcttttcaaatttgacctcaggagggtggcaatgaccacgggaccctaaaccttggcccatggccctcccacagctgccacggggtgggtggaccttctggaatcctgacaacagtgacaggttttcttagaagtctgagcgtttgggaggaacagtgactccttgcccttgggtagcagggatgggaagggaacaaggtggagcagataaaggttgtgctgtggaaggattagaatgcaggtgtgcccacattggtaaaatccttcaagctgtcatgaaaagtttggacttacaagccggattaacagggcagggtggttatttgcttcacataaggaactaatagaaactgattaattatactgcccatcttgaaagaattctgtctccagagaaactgagaggtgtcacacctgtcagaaagmagcatcccctagcaatctgtcttctggcagaattttagcagaaatcttttcaatatmwgaagcaactgcctggctgttattgaccttagaaactcaaagaaagggctttttttgtttgtttgtttgtttttgtttatttgttttgtttttagacaggatcttgctctgtctgccaggctgaagtgatcatagctcactgcagcctcaaactctgggctcaagcaatcctcctgcctcagccccccaagtagctgtagtcccaagtaactaggactacaggcatgccattatgcccagctaacttttaaagttttttgtagagatagggtctcactatgttgcccaggctagtctcaaactcctggcctcaagcaattttcccgccttggcttcccaaagtgctgggattacaggcataagccaccatgcctggccaaaagagctaattttggaaatcaaaaaaaattcacaggatggaaatagttaaaaaaaaaccgttttgcagaatggaatggaaaagagagagaaggcaggtgtagtggtcttagagtctggtcgtctgccaagtagttgctagatgaccctggttaagtctccctccctttctgaacctcggaggtcactgacggtgagggttggaccagctgatgcaagggcctgtcctctccacatttggggcagggatggcaaattccttcagtgctaaaagcagaggcagcttcctcctcacagtcttacctacaagagtatgtaatactgtgggtgctggggcatccccaggccacccagcatgacagcctgagggaagggagcacctaagcccatcagggtagggaaagggccccgcggcccacagggtcagaagagaggacttaaagcgtggggaaggagccggatgcatggagagaagccaggggaggcatttccatctgggggaaccatgtgagtcaaaatatgggggcgaaaaggtgcctgttttgtctgcagaacaagaagtgtggaaggttcttttaagggacaggtgatgcagggccaggttgaggggtctgaactttatctaaggcaatgaggagccacggaagatttttgaagtcacatgtgacacagaagaagagtgatttagaaaacaaaacagaacaaaacgaaaaacagctttccaaagctttgtctggctggtgtgtggatgatttagaagaactagagaccagaccagaggaatgaaggggatgctgtggcagtagaaccccaggctattagatgacggggaggatcctaagcgtttgtttagccaataccctggcttcccttcctacctattattgtgttactgtcatgattgctactgttgttggcaatcaggtggcatttgtattcttccactgcccctcagaaggacacctgtggctgggagcagtgctcacgcctgtaatcccaacactttgggaggccaaggcgggaggatcccttgagtccaggagtttgagaccagcctggacaacatagagagaccccatctctacaaataatttaaaaaattttaaaaaaaaaggacacttgccctccmacatttttcggagtcgggaggaagcagcggtatctttagcccctgtgagcccatcctcctgggaatctgcccrgccagagagagtcctggggcctcnttgycccctgctcnggagcccaccctgaccgggggacgcttcccacaggacctggcccaaggagggctcagtcaagcccggggctgcagatcctcccaccagctcaccctgccttggcttggcatctgttctgaggaaggttcagaagccatccccactccccctcactcggatcccctggcttctccttccagaggcagaacatcccataaagatctcgtacgctcagtatgagargtacctgaagtcagacaacatgatccggatcacagcggtgtgcaaggtcccagatgagtctgaggtggtggtggagcgggacatcatcctggacaaccccaccttgaccctggaggtaatggggntccccatcctgtgggaaggggttctgcccccagccagcccagctcccaggagccccactgtccctgtgagccacagctctcccagagggcaaaggagagttttttcttgctgggaggggcagagaactgggcccagcttcggtccagcctctgccaaatagccaagagctcccactcaggcccgtgttcctgctccctgtctggtgagataaacgcgtgcatttgcctggctgcttctcagattctagttcagaaccactgggggcatcagctgaggaggggcctgggggactcttttcagctcattcccttctcactcagctactgagcatttgctgtgttctgggccatgccaggcttgagatctgctgtgttctgggccatgccaggcttgagaatcacagacaggcacaggtgtaggtctcacacacagccagctgatgtgccagggccacagcccagccctctgtcatggacagatcagaaataggcctgacccacagcatctctcccctgtctagaccctggagttacagaattgtggactcttaggagcctagtcacatgctcctgtactctcatttcacacaagtaaaccaaggcccagagagaagggaacagctggccaccgccagagtcaaggctaggcctcagaacctgggactcccagcccatgcccctccaaggcrtcctggtacatcaccagccagcaacagcatcttcaaagtggctgagaacaaagacccctctttctctgctcatagggcttcctttactttgcagcattcactcccaggctccttctcaggagcccaggaaggtggggcttgcaggtctgtgggaggcccctcgtgccactctgtgtcttcctcagcmctggtaggagcacctgtgcggactccaagcctgtccctcaccctgtagccccctgtgcctgatccccacagcccagggtgaagggtgctggaaccagggagtataggtctgaagggtaaaaggctggacaaggacaggcagacaaacggacagagaacatgaggttttcccttggggcccaatcaagagcctcatgggccaggccctgccctctctcatctgctgtacccaccgtctgccccagttgtctagatagaaattgcctttccctgtacaatcacaatgccacaggtttcccaagccccagaaaccaggaagagccagataatcatggctgccctggcccgcccctccttaagctgtaagctggctgcaggcgttcctgacctcagaaagggcagggggatctaggatgctggctctgatgcsgggcctggttctcccacatagctggcctgcaattgcacccttttactgtcctggttagtttggactgtgcttcaggatgggggagttggtcccctaccttaggggctagagagtcagtgactgggcagccagtctgggggctgagamgggcagtcgttcaggccttgggccatgtaaccaaatggatctggcattgtatctaaacccctccattgatcagtggtgacactgagcaggtcccttaatctgagtctcakttgctccaactctgtcactgggacaataaattacttcccttgcagagtgtcatttcctcagggaagcctttcctgagctcccaaattaggctcccaaattcatctcaattatacaccctcagaacattctgtccttttccttcaaggcatttgtcccagctggaatattatccttctttgtgcaattatttggttgtgaatccctacccaaccgtaaactccatgagggcaggcattacctctgttctgagttcatcactgtctcccttagcacaatgtcttagtggatagccactatttgtaaaagagaaatagccccttgctcggggcatgactggaacagatccccttggctctggacttgcattcttccctgcacaggaaagtcagtccaggcttgtgccctgcgtgtgacagcctctcctgcttcacaagacatttctgagaaacactccccatctctctagacatggtggacagcagagtgcccattccaactcctgaggctagaaaatgatactgggtggctgccagttcagttatgagaacattctgtactaaagtgatcagtgtttaaaagaacttagtttttggccaggcgcggtggctcactcttgcaatcccagcactttgggaagccgaggcaggtggagcacctgaggtcaggagttcaagaccagcctggccaacatggtgaaaccccgtctctactaaaaatagaaaaaattagccaggcatggtggcgggcacctataatcccagctacttgggaggctgaggcaggagaattgcttgaacccgagaggcagcggttgcagtgagccgagatcacaccactgcactccagcctggctgacagagtgagactccgtcaaaaaaaaaaaaaattagtgtttttccccagtgtattccccattatgttcccttatccaatgtcctcaaaccttcttccagcattatcttttattcaacacttttgctatacatcttccagatttccatggcaagtctacttatctttaagatactacaatatctttagaaaggaaatcagaatatataaggctagaaatgtgccatcactgactctttttaaaaatttaatctttttaaatgactcctgatcttccttcttcgaggcaagttctttcctccacctaagccttcacctaatcgagacattcttgtctctattgaacggatcaatgcctagctcactcagagcagggcacsgatttttaaactggagaaggtgatctgtatgaaaagataataatttgggtaaaaccccattatctaacctggtactgactggcaattagcactgaggaccttagaccacaaaaccaggccaaaaacaatctgaacattgtttccaaagggtgatgtcctcccaattgatccatcatctgtgacaagcaaactcaggtttttrgtggcttttatcctttcctctgggtacatttacagagttgggtcaataggagagagtggtaagcggcattaaaaaaagaaaaaaaagcatggaaatctcaaattaaatatcaccatgaaaaatgtggcaacatctgtatagctttcttataacccaatagcataaaattatgctgcactcttcaaattatgtcatacacttaaatgagtttcatggaagaaatgaaaatatagaccatgatgtgtaaaatgcttcaattactcacaaattactgggaggtattgcagacctatcagaaacagcaaaggctttagatccagctgggctctgctgtttccttgtgtgtgaatgttccaggttattgaatcagcctgaacctcagctctgtcactgtaaaatggttgctctgaggattagtgacaagaaaaacaaaacacagcaacaacaaaacccagcaacctccggtcatcctcaaaagaagaagaaatccaatagccataaaatgtccatttctatgtccaaaatgctttcttccccatccttgatctcatttgaccccttctgggagggaagagatgattgtccttctttaccagatgaggaagttgaggcgcaaagagatgacttgtctgcccagaatgaattacggctgtttcttggcagaaacacaacagctttcatcttttggtctgaataaatagtccaaattgcttttctgaccccaaacccagccttcayctgttctgatcactgagcaaggaccgtgtggtattagagctccgctcagactataaatggtgcacagggaacctctgggctctagaagtttagaaggacattggtagactggggtgtcagcagaggagagtagcctgggttgagctggggggacccaacccctrgaaaaagagttaagggagctacagtgtgagccagggtgtgagcagctgtrgggcctggggctgcccttttcaacacctgtggggcctcccagagacggaggttcaagctttaagggaagaaacaggacccataagcaggaaagccaaggaaagtaatattaaayccagcaagtggctgggcacagtgacttacatctgtaatcccagtgctttgggaggccaaggcaggaagatcacttgaggccaggagttcgaggccagcctgggcaacacagcaagaccctgtccttgcaaaaaataaattcagcatgaaaaatgtcctgaccctcacagagcccacagtggggttgggctgtcctgggaagcagggtctgaactggagtcggggcagggaagtaacagtgttgttggctgctgcagggggccccttccccctcaaagctgaggttctcatccacagcacaggataatgtcctgggaccatcctgtgtattggggggcagggggcgtcagacacaatgtgcctggcacctaggagggctaaatggtctccccttcttcatcctcagtgacatcacccccttcactcagtcaccctgcccagccctcaccaaggtgcaggcaggggctgagcagctggagtcctgactcggcagcccctctcccmcataggtgctgaacgaggctcgtgtgcggaagcctgtgaacgtgcagatgctcttctccaatccactggatgagccggtgagggactgcgtgctgatggtggagggaagcggcctgctgttgggtaacctgaagatcgagtgagtcctgggcctaagtggccsgtgcaggagggcgggagggggcgggggggccctccagatcccctgggtgggacagacagagctccctctgaccttgggttctttactcttttgggggtcttggaactctagaatctgcttttgcatttggtttgggggttcaccaaacttgaactcctgagaagaacaggtcaccagagctaagagctggccttcagggcttagaatatttgggagatcatgggacccccccctcctgcttcccctgctgaagagttccagggctggaggggccccgtaacccagagagacagctagagggagctaaagaagcagtggccttgcccagcctccatcagaacaggacaggaggtcacaggaggcccgtccagcccaaggtccgtgtgtctcgtatcaacactgatctgtgccctccccatcagcgtgccgaccctagggcccaaggagsggtcccgggtccgttttgatatcctgccctcccggagtggcaccaagcaactgctcgccgacttctcctgcaacaagttccctgcaatcaaggccatgttgtccatcgaygtagccgaatgaagggcgctggtggcctcccgtacaaacttggacaacacggagcagggagagctcaccatggaatgaaccccccgcccatgctgtccggcctgggaaaccctctccatctcccaaggctgccagacatggacctccrggctccagcacatccccctctcctctcccccaggttggggctgggtccaccctgtcctatgacttgatcacttttgcacattccctggccgyttctccccagagctgcctgctctgtgagccccacagccctgctcattcctcacgcccttcaatgctgcaggatggactggcccctgacccagggactctccaaacgggatacaggagagaagctggtctagactgtttgctgatccccaacctgcacggggcattcctgcttctctctcaggccaccacagagggcaggggatggttagycacctgccccagcactcacaccctaactcaaaataaatgttaaataagtgcgatcacacagcaccgactctacctgactgctgttgcacctaaggtggtgaaggagagaggaggctgtggccgtgaccttctggagcagggaataaatttgaggaggccatgttctctgtgtttcaatgtccaaagggagtgggcttgatctgcaaggctgtagatgcaaaactagggaaacatttcaagccagtttaggaaaactttctaacatgatgtccaaaaatagatgaggctgccttgggaggtagctcctggtcacagaaggcttcaaacattctctgtgtggttgggcaaacttttcaggcctctctacatgcatcagagtgagaggggacgtcacagtttttgctggaaccctctggcagagctggtcccgggggtggcccagcctctgctcacatggggctccacgctcctcttgtggccaggagcaaatgcgtccttccgccagccacagcgctgttaactcaacctgaaccttctctgcctttatacacactctgatggttcctcagcctttgtcccttaaaataacctcaaacaaatcccattagctttcctgtcgcttgtgctgactaatcccattttgacaactctgcctcattttctgaactcaggagacaagtagaatctaaatagaaacctcaacctcacatccagctcaaagcttctcccctgggtgcagcgcaggccttacttacgcctgcagagcaggcactgtccatctctcaccttccttcccttccttccccgaactggggagttgctagatccctcagagttggagcagagagagaagaagaaaagtgacagttgtctgtatcactggtgctgatgtaatgcagccaatgatggtctctgtgtcgccagtgtttaaatgcaggctttctgtactgcttgttgcctgagcccaggagttcaaggctgcagtgagctatgattgtgtcactgtacttcagcttgaatgacacaataagaccccatctcttaaaaaaaaaaaaaagcggtcagtaaattagggatttggggttgaatcacttaccatccagctgccttgaacccatcctcatcccatattatcccaggcaatatggattgggtacatctgggtggatgccctcaaacgttttgacttccaaactcctctggaccctcagagcccatagacaggcctggcctccttcctattaagatccagtaacttctctccccacctcctatcccatatgggaagacactgaagaattctctctcctgcagcaggggccctactcaggatttatttctgcctcttctcttggcctccaggctgatgtcatgttaagttgcagtgtaactcagttggggatgtgccatatctgataaagaaataaagagactatagtccaaaggatccgaaaaactaggatcatgtgacagcaggatcacgggagaactctgggagtggatttgagggtgcttaatcaaggaagccataacaggaacctaaacaatgaagaatttattgacttggggccattcttttgtgatacgagatttaatacccaggtgaggatcctgagagctggtgcaaactggcttagtggctccaaacatctggaagaagtgatgacttacgctaagtacagttgaaatggctgaattcctatgctgcatgatagaggaaagaattaaaaggctcagggaaatgggcgtgctggggttgacatattatgaggggccaggagacatcttccaaaggattgtgttccctcagagggcccaggggacccacccaccattcaccaaggccatcagaaatgagtagtgacagaggcatcaacatcactaagaaattcagtggtggcatcctctacatttaaagcaaaaataatagcaacattgtagaagtaaaatgtatgaaaataataacacaatggccaggaaggaaaaaaaatacactgatgtaaatttcttatataatacatgaagtaataaaatattaattgaagatagactgtgacaagttaaagatctgtattataaacctaaagaaaccagtaaaagaaaagaaggccggcgtggtggctcacacctgcaatctcagtactttgggaggccaagatgggtagatcacttgaggccaagagttcaagaccagcctggccaatatggtgaaaccccatttctactttaaaaaaaaaaaaattatccaggcgtggtggcacatgcctgtagtcccagctactcaggagactgaggcaggggagttacttgaacttgagaggcagaagttgcagtgagccgagatggtgccactgcacttcagcctggttgacagagtgaaaccctgtttcaaaaaagaaagagaagaaaaagaaaagaaaacaagctggccatggtggctcacgcctgtaatcccagaacttcaggagtctgaagcaggcaggtcacctgaggtcaggagtttgagaccagcctggccaacatgtcaaaaccccgtctctactaaaaatacagaaattagctgggtgtggtggtgcatacctgtaatcccaactacttgggaggctgaggcaggaaaatctcttgaacctgggaggtggaggctgcagtgagctgagatcgcaccactgcactccatcctggacaacagagtgagactccatctaaaaaaaaaagaaaacaacaagaaaacccagttatcagtaacaaaccaacaaagtaaacgcaatgtaatagtaaagaatactcaattaatagaaaaagaaggcagaaaaggagaaaagggaacaaagaatagttgagacagattttaaaaataagtagcaatatggtagattaaacccaaccatactaataatcacattaaatgtaaatggcccaaacacccaaataaaaggcagctattgtcagattgggtaaaaaagcaagacccaactatatactgctacaaaaaatcaaatttgaatatagaatagaaattggttaaatgtaaaagaatacaaattatataccatacaaatagtaaccataacaaacctggagtggctatacaaatattaaacaaaatagccaaagattgttactaaagaaaaagaatatttttgaatgataaaagaatcaatccatcaagaataaaaattataagtagtctcaatgttctttgaatgcaaagaaattaaattagatgacaataacataaatatatctggaaatctccaaacatttggaaactaaagaaaagacttctgaataacctatgggtcaaaggagaaatttttaaagagaattataaagtattttaaactaaaaacacagcatataaaaatgcataggatgcagcagaggaatatttatagcactaaaatgtctatattagaaacgaaaaaaatcaatgaactcaccttccaccttaggcagccaaaaagtgaagaaattaaaccaggccgggcgcggcggctcacgcctgtaatcccagcactttgaaaggccaaggcccgtggattacctgaggtcgggagatcgagaccagcctgagcaacatggagaaaccccgtctctattaaaactaaaaaattagctgggcgtggtggcaggcacctgtaataccagctactcaggaggctgaagcaggagaatctcttgaacctgggaggcagaggttgtggtgagcaaagattgcgccattgcactccagcctgggcaacaagagcaaaactccgtctcataaaaaaagaaagaaatgaagaaattaaacctaaaatctaaaataaatggaaaaggaaataccaaacagcataaatcaataaaacagaaaatagaaaaacaaaatagtaattcaatgtaactaaaagtgggttctttcggaacatgaataacattgataagtctctagccagactgatcagcaaaaaataagaaagacacaaattactaatatcaggaataagagaccctatagctatttgaagaataatttagaaatattatggacaaacttatgcataaaaagcttgacaacttagctgggcatggtggctcatgcctgtagtcttgggaggccaaggctggaggatcacttgagctcaggagttcaagaccagcctgggcaacatggcaagaccttgtctgtatcaaaaaaaatagccaggcacggtggcacacacctgtagtcccagctattcagaaggctgaggtgagaggatggtttgagcccaggaggcagaagttgcagtgagccaagattgggccattgcactctaacctgggtaatagagccagaccctgtctcaaaaaaaaaaaaaaaaaaaaaaaaaaggttgacaacttagataaaatgaataaattccttgaaagacacaaactatcaaaacccattgaggaagaaatagatatccaaagtatccctatatctattttaaaatttgagtttggagtgaagttcagtagaaaactctccagccgagcctaacacaaattgctggccatagaactggttgtcgtcttgtcaccacattttcatgtggtttgttatacagcataggatattatttattgttgtattatattaattatcaccacgaaaatatttattcactctccagtgctcagttcaaatgtttcctctcctgcaaaaccttccccatcttcctcccacatcactgcatccaaacacacgaggtctctttttttctctctatgctttcccttcattgtctttttggaccacttggcttaaagtcgtctggcctacgtctctcctcccctgtcctagactttgtgcttgtcatgggcaaaaaccatgtcttctttagccctacattctccacacttagcataatacctggtgtagataagcacccataagaattcataaaagagccaaaaagtaaatgaaattggtaatgaatgaatgaatgaagtgactgattgaattttaatatgtaatattcattgagagtataaaatatgctagtcacttttctaaggttatcataagtatttatttaatccttccaacaatcctttgaggaaagtactaatattattcccattttacaaatgaggaagcagagatttcgagagttacttagatcacaaaatagtaaatgacagagctgggactcatacccaggtagactggctctagtgcctaatctgtatgttatgcagtactacctacacaaattctaaagaggtatccagtgataaatcccatcacaggcttacaaagagatacagaggaaaaatgaagcagaaacaaggaagtgtgtctgtgctgtggtacccagccctagggaggcattcttggacgcctcctcccaatctcctttcctgcaactgcttagtttattggctctctcattcctatgctgatgagcatccctattcccagaagcagcctcttcacccgtcctatgtctggctctaaaccactcctcctcccaaccttgatcacacttgcctggggaagccagcctcaaagagctgaattcaacatatcccattacaatgaatgttagtaccagggactccccctgacattatgtcatttctcctcccagcaaccttcaaaggtggaattattacacactggtactggtggggaagctgaggcttagagcaaattctctacattccttgctctcatactagtcttcacatacctttataatcacttaccatactttattgcaatcatttgtttatgtgtcaacggttgccaatctgcaggtggaaacacaggtaaatatatataaaatgatgtattgatgtcacattacaatagattatatgttcagtgaccttaacatgatacgttcaatgtgttgtccctcctcagggcataattggttgtgctgtgcaaaactgcaatggaagtggagtgatacgcagcaactccatcattctcacagactgccttggatgatctgtgcctctgagtttcatggaataaacctgcagttttagtatgcctcagaagatgtaatcaaggcggttcaatctggaacaaaattaagtaa

SEQ ID NO: 95720 - DNA, 62822 bp, Homo sapiens
  misc_feature (1)...(62822): n = A,T,C or G
atggtggcacacacttgtggtcccagctactcaggaagctgaggtgggaggatcacttgagcccagggagtcaaggctgcaggaagccatgatcatgccactgtactccagcctgggcaacagagcaagactgtctcaaaaaaagggtggggggtatgcagggagggatgaaacttccataaatacaccatagcatttaaatcaggggacttggattcttttccttggagatatactctgaagaccccagttttgtgactgacattagtgagttcagcataaaattattttttttagcagcaggcagtggcagcttacaaagggccttgcctgccctgccaattcagagattctggcttgcagagaaaacaaggtaatttcctattattcttgggcgggtaggaattggttgggaactatgatagaaaacattaaaaggtttagccctggagcagaattatgctagccttgtaattaaggcaaatttttggtggacgatatcaaatctacttgttttaaactttaaatccattttacaaagaattgaatctaaagaatagaatgtactagaacaacttcagtgaaactctgaaatgtggaattgtaaagtgcagctcctcagtgacccaacaactcagtgggggaagattgacgtaacacaggagactacatttgttcagaaaagcaaacaatcagtgtggcctacatttgttcagaaaagcaaacaatcagtgtggcctagactagtgaggggcaagtttggaactaacatggcaggatgtagaggattgggagagtgagtgggagggaggtgatcccaggagcctagaacaaccctcatgaaggcccagggtttttcatgggcaggagggttcagggcctgaagtgactgtagtagaaacactgaatgggccaaacagccaagatgagcaggatggcagctccttttgtggggacttgaaagtcagacagaattgggagatagtttggttttcttcacagcatattaatgctctgaaattaaaattgccttttaatacagcatatacttagttataatcctgcttcatgagaagaaaatgctcatttgtaaagtcatctctgactggtttatcattttgcccttttccaaaacacttggaaagtaaccagtttccctgaaagaaaaggcaaagttttgagcagttgttattaaattagaggaggtgcttctgtacaaggggaagtcggtagctgggaagctgatagcacagatcccaccatagtccatttcatagacatttaattcagtaaccctgcctccgaggagacctgtagtgaaactgaccacaaagctaatggaatatttaagtttgggcttcttaaaggaaaaaatatgtgacaactcattctcatctatggggcagcagacatccagtccactgctgacagactacctgcccctttcagaatccggtctctcttactccctgattcagatccttagcctcattccgaagtgctttgagaccactctgtgcctttagacaaattacatgtcaactataattcacataccataaaattcatcctcttaaagtgtacaattcagtggttttaaatgtattcacagagttacacaaccatcaccagaacatttgcagtcccagctatttgtgagatggaagtaggaagatcgcttgagcccaggaggttgaggctgcagtgaaccatgatcatgccactgcactccagcctgggtaacagagtgagaccctgtttcaaaaacaaacaaacaaacaaataaaaaactcaacttcttgtgtattgtatgtaatactctatgagtaacttcccttttttatcattgtatttgtttgttcagtattctgggtcttttaaagcagtggttcccaaaggttagtcacaaagtaatcttttagggtgctttataaaaatactgattcctgggccctacccctagagattctgatcactggtggaagaggcaggtctaggaagtggggactccaagatctgtattttgtaaagttttctaggtgcttctgatgtgcagcttggtttgtgaaagtatgtgatgttgcatagtgtggctgaaactggtttcatttaagggtcccatcattgccaactcctgaatatgtccactatttctctgagaattccaactgctcagaactttgcttaaggaggggaggggacagcctccatctttccattacatgcatgactggaccaagaatggagtcctgaaccagtctaggccagtacaattttctctcccaggaacttggaatttagaccaagacttgaaatgagtcatgagtgggcactaactggaaagattttttagagctagggaagccattttccaccaaatgttcactaatggagactctatcttaaaggaaaagtggagagaaggaaacagatgggcaaagaaaagtgtcagcaagagacttagagatggagaaccatcttgattacttactttccagttttcttgtccctgccccttgtgagacccaattttacctcctgcctttggagactataagttactgcttctagtaaattgtcttgtttgaatgagtttctgtttttacaattaaataacttgagattaaggtaatttaagcctaaaacaatttagatggcatctaaagaagcacttctaaatcctgcattcttatagaccaatactaaatgtcccacttcctatgtgactgtctggtcatgtccagccttatttctaattgctgagacagaagttaaacccctccagtcaaaaaaagaatcagtctttttatcatacacaggaaaaatatcatagctgaattacttccttgacttctatggagggaaaaactagctcatatgtctggaatttaatttttcctaatccatagttacatatcccactactttctccttattgatggaatagaatattagtaataaaatagtaataaaaatgagtgataaataaaatagaaaatgtctgtacaatgttaaaggattttcattttttatactcttcacaaccctatgggatagacaaggatggtgtcattagcccaatttcttaatttgagaaaactaaaccaaaagtagttcattttatttatcaaatatctattgaatatttcttatgttccatgaatatacttccctgttctcaggagcttatcttttagcagggaaggcagataagctattaccataaggtaatctgtgagttaagagaagaaccagaacaggccttctaaagtgaaggcccctatcccttggctctagctatacccacagtcatctaattcattctaagtacatgatgagaatcttaaaagatgaggtaccagatataacttacttgagggaaatttaatttcttttgtttttttctaccctactgcaaattcaaaatgctccacatttaacacatttcgtattctcattccccacccaaaagaactgttgttccccgttcacagttccacatggctggggaggtctcaggaaacttacaatcatggtggaaggggaagaggcatgtcttacatggtggcaggcatgagagagcaaacaagtgaagggggaagagttccttataaaaccatcagatctcatgagaactcacctcatagatttcctgattcatggtattgcagcaccatcagattcccaagcactgctcttcttctctcactctcccactttgaataagtgctgtcagctctccctcctttttgttccccattcctctgctggagccttttttgtgccaccatttcttacctgggcctttgcaataggctaaccaacattccagctctaggcgtctttactgatttctggcacaaaaatcggatcataccattccagcacttaaaaagtcatgtttctctgtttttaaggattataaaattcaaaatctttagcataccacaaaaaaccctttgtaagtttaggataccagccagacccctctcctgtcatgtcctactgcaagtagcctcttttcacggggtgtctcacacctctgcatatatcattcccttattccctcttcctcatatgatcctgtactcctctcctcttttaggtaaactccttacttctagtgcttcaaagcacaatttgaatatcaactctttttaaagccattgtattagtctgttttcacactgttacaaagacatacccaagactgggtaatttataaagaaaagagatttagatgattcacagtttcacatggctggggaggtttcaggaaacttacaatcatggtggaaggggaagaggcaagtcttacatggtggcaggcaggagaaagcaaaccagtgaagggggaagagtcccttataaaaccaccagatctcataagaactcactatcacgagaacagcatgggggaaacagtcccatgatccaatcacctcccatcaggtcccaccctccataggtggggattatgggaattacaattcaaggtgagatttgggtggggacacaaagtcaaaccatttcagccatccctgaatgtctggccatcccattctttagtattcatcacatggtattgtaattatttgctcatatatctctctcttccataaggctgtgaactcagctatgtcttcttccacacccagggaatgcttggctgtctcagtccattttgtgctgctaaaacacaataacacagactggataatttttaaataatagaaatttatttctcacagttctagaggctaggaagtccaagatcaaggtgccagcatctggtgagggctttcttgctgtatcctcacgtggtggaagggcagaagagcagaagagaacacccacctccacaaaccttttgatagcagcattaatctattcatgagggtcactctattcataaaggtggagcactcttgacccaaatgcctcccattaggccccacctcccaatattcttgcattgggaattaagtttccaacatatgaattttgggggacatattcagaccatagcagtagccagtgtttaataaacaagaaaatgaataaataggcttagtagtgttatcagggacgacagaagggcatgatgcctttctgtgcccaacctcctatcaagtgctgccctcccaccacccagcactatgtgcctatgcaggaatgtgtcctttgagcaaaatacagcaaggaaagagggagaaaaatctgtgttttcactttttttctttttctttttaagaggtggggtcttgctgtgttgtccaggctggatttgaactcctgggctcaggtggttctcctgcctccacctacgagtagctgggactacaggcacacaccacagtgccaggtttttgtggtctctctttaaaggtgagtctgcattcacctttggaatagttctagttgtcatagattgaatatcctattttaaaatgcaatattcttacaactgcctttgatgaaagggagttgagatgggaccattggggaaacctccagatgactagggggcaagtaatttgattgcagtgccaaaatgcttccatttaaggagccaaagtttgcaaatgtgtgtaaactgatccaatctattcccaggatgtgcctgaagtaacaaacatatgtaagttgatccaacctatttccgaggtgtgcccgggatataaatggttaacattgacaaacacaccttatgaaatctaccagcagctgagggtgccaggcacctcttctacctccctggaaggcccagtggggcggcgtttcgaaggtgtcttcgcccctgtctccggcccctgtcccctcccgggacgtgggcgttccccctgaactcgagtcccgcctcttccaggctgccggggcctggtgggctggcccgccacgtggagcgctggcttgattctcgaaaggggcctacgccattgccgcgccgcagctccaggacaggccctcgccccacgtcaacagcgtagggccggctgcccaggtttactcttacgccactgacgtaacgtcatcgtgcgggacgtggacggaagaaaaaagagagtgagcgagcgccggaatcagcccggcgtggagtgcggacccgcggtagtgccagggggcgaaggcggcggtggtgaggaaggtacgcggcgagcggcggggatggctaggcgcccgcgtctctgcggaagctgttgcgcgcccaggctcaagcgcgaggggcgtgagcgccgggccgctggagcggggacgctgccggagcaggtgccggggcccggggatctggcccatgggtaggtgtgggcctcggccgagggatggcggctgcatcgggccgccagggcgcgctgcaagaccgtggcgcgctcccatatgccggtgcgcggcsgccccgggatctacggatggctacgggccctgacctccccggcctcccctgggtacaccatgtaaggaactgggccaagtggagacttcaggcatccgcgggccccttctttccaagagtatggagcctgcactggtgggtggcgtgggtggcggtggtggcagcgccgggatgccgcgggttttagctggccgcacgcygactctcaggggcctgggtccctagttccccgcggccctccaggcgttcatcatcccctcctcaaagccagactccctttgcagtatggcattctgtgtatgctggggtcttcctgttacagcaggacgcacccacataccccacctcgtccttcccccatcattrtcccctgccctctgaggtggtgaggcccatcggatctttgtatttaagtggtgagccatataccgagcatgtgtttgtgggtgaactgtgctgggactgaggttcacttctctgttcaaatcagttagataagggcattctgtttagtctgtaaagagatattgagaaatgtcttgagtcaaaacgtgaaaactttcttcaactgatgatatggagtctaaacacacacacagagtcgagacacagtcacacaaatctagacacgagtctagatacacacacacacacacacacacactctctttgctccttgggatcaactgtgtgcttctcgagggcgtaatacactctgctggtcagtcagagatggtggtacaggggagaggtcaggaggcttggtttctacgtcagtcttcaatctctatttcagtgaccgtaggtgttcagagctttcaatgactcttggttaatagagaggtaaacagtcagtcaatatatgtgtgtgattgtatctaatagtgaatattcgttgaattctttgttcccgtgatgggtcttgaaggaaattaaggaaaaaataattgtaaggcatcattagtgcctaaaagacaaaaggaggaaaactgacatttactgaccatttgttgtacccaagcactttccacgcattctctcttttaattctcactataatttcatgaggtccatagtgttagtatccctgatttataagtgaggaaacagaggcttagaaaaattgggtaactcttacatatgtaactaacctgcacattgtgcacatgtaccctaaaacttaaagtataataataataataataataataaagaaaaattgggtaactctccacaagacacacagcaagtgcagagctcgaacccaaatctgaccaacttcaaaggccttgttcctcatcgtttttgccatattgtcaatggaaagtttgtaatccagatgggaaaagcagtagtcatgagctatttaaaagctaacctatagaattatatccagctgtgaagactagccttgctggggaaggtttcttagggaggtggaactggaatttgattgttttaccctttggctcttctgtagttattttggagaattcacatgtaaataattgtttagcagccattattgaaggaatttatataagcagcaaacttagatcacgtgctaaaatcatacttcagtgttatgaaaaaattgaaataacaaagatcaattaatactttctgttgcctactagatgccatatgttttagaacagctgcatcctgccagtctcttctctgtcccatttcagtgcctttgtgcagtataaattgtaaagcaatgacaccattcctaatttttcttcactatggggctaaatgctagtcttctgaggcacatttaagagggctgggatatatccaccaatccatggaacaaaagttaaaaggaggcccacaaacaaagaaagtgaagtatttttcttaccttgtgaaaatagcagtgtctctgtagcataaaaagagctacaatattgggaggccgaggtgggtggatcacaaggtcaggagatcgagaccatcctggccaacatggtgaaaccccgtctctgctaaaatacaaaatattagccaggcatggtagcgcgtgcctgtagtcccagctactcgggaggctgaggcaggggaatcacttgaacccgggagacagaggttgcagtgagccgagatcgctccattgtactccagcctggcaacagaacaagactccatcttaaaaaaaaaaaaaaaaagctacaataatgaatggcttgttctccctgtacatataggaaggagttccctacttttttgtgaaataaactattctttgtctaaagtctcaaatttgacccagggtgaggaaatgcccataactgccttatgttctcaaccgagatttgtagccatattctcttcctccacaggattaagatgttagccagttgtaggcattgccactgccttccaggggtacaagagttattttgtmatcctgtgggcatcaggaagaaagacatggcagcagcctctggcctttcctcttgcttttcatggctggctggcaaggatcaagctgacatttcaaataggtgcatttcctggttctgttgggagatgttagcagaaaggtggacatgattgctttaggatgttggatctgttacaggaattatatgaagatttagtattaacacataagcattgcacctgaaagattttttttaaatttggaagataccaaaaagagcaggtgttttttgtgtctcaaaatattcctaactctgcattattatttgctwacataaaaactaagatggttgaggcctagaaaggagccacttactttttctctcttttctataatatagaggaggtgggagtttccctaatacagaggagtttggagcaggagagtcagatttttactccragggtaaggggaagtagagggaaataaaatgaattgtccagtatttttcattactcactttttaaaaaatgtattctgcagatactttggttagtgaccacatcgcagcatgttgagtcaagtttaccgctgtgggttccagcccttcaaccaacatcttctgccctgggtcaagtgtacaaccgtcttcagatctcgtatgtaccatagaaaacttatgagtatgtgggacgtttgatagtcaaagtatgtttcaacaaggttttcaaagagaaaaaagatgtttgtttgtttgtttggagacagggtctcattttgtcacccaggctggagtgcagtggcacaaacatagctccatgcagtccagacctcttggactcaagcaatcctcctgcctcagcccaccaagtacttgggactacaggcacacaccaccgcgctgactctaacttttttattttttgtcgagatgcgattttgccatgttgcccaggctggtcttgaactcttgagatcaagcaatctgcctgccttggcctcccaaagtgctgggattacaggcgtgagccatcgtgcccagccaagaaaaaaggtttaaaagagagagagagaaaaaaaagatgtaatttggcagaattggacaaaattctgccaaatagcaaggaggcaaagaggtagtctcctggtgaaatgttctcagtgtttgtgtcaataaagttgacccccaaataaatttttacatgctttttttttttcttgagtctcactctgtctcccaggttggagtgcagtggtgtaatctcagctcactgcaacctctgcttcccaggttcaagcgattctcctgcctcagcctcccagttagctgggattacaggtgtgcatcaccatacccagctaattttgtatttttagtagaaatagggtttcgccatgttggccaggctggtctcgaactcctgacctcaggtgatctgcccgcctcggcctccctcccaaagtgttgggattacaggcgttagccactgtgcccggccccatgctatttttgttcattactctttttttgtaattaagttttagattttgagctaattataaattcacttgcaattttaagaaatagtacaaaaaggtcccttataccctttacccaatttcacccagtatctgaaccaaggtattgacgttgatacgatcaagatacagaacatttcaatcaccacaggattttttatttctctttaacagccactgtcctcttccctattactaacccctggccaacattaatctggtctacatttttataattttgtccttataaaaatgttatataaatggaattatccagtatgtaaccttttggaattctgttttcttcagcataattctctggagattcattcaagttgctgtgtgtatcagttagttcctttttattactgagaagtatgtaatgctatgagtgtatcacagttagtgtaaccattcacccattaaaggacatctgggttgytctcattttttggctgttatgaataaggctggtatgaacattgatgtacaggattttgtgtgaacatagttttcatttctgtgggataaatgcctaagagtgtagttgctgggtcagattgtagctacatgtttagttttttacatagtttgaatgtatgtccctaccaaatctcatattgaattgtaatccccagtgttggaggtggggcctgtgggaggtgtttgagtcatgggggtgaatccctcatgccttggtgctgtccttgagatagtgagtgacttctcacaagatctggttaagtgtgtggcaccaccccctcactctctcttcttgttccctctctcgccattggagatgcctgcttcccctttgccttctgccatgattataagcttcctgaggcctcaccagaagctgagcagatgccagcaccatgcttcctgtacagcccacagaactatgagccagttaaacctcttttctttataaattacctagcctcaggtatttctttayagcaatgcaagaatggcctaacacagttttataagaaactgtcaaactgtctttgcagagtgacagtaccattttacattcctactagcactgtatgagtgatgcactttctctgcatctttaccgtcatttgatgtggtcactcttttttattttagccattttgataggtatgtagtgataatcacattgtggctttaatgtgcctttccctaatagctaatgatattgaacatcttttcatgtgtttatatcctcttcagtgaaatgttagttcatgtctttagctcattctttttgtttttttttgttttttgagatggagtcttgccytgtcacccaggctggagtgtagtggcgcaatctcagctcactgcaacctctgcctcccgggttcaagcgattctcctgcctcagttcctgagtagctgggattacaggtgcccaccaccatgcccagccagtttttgtatttttagtagaaacagggttttaccatgttggccaggctggtgtcaaactcctgacctcaagtgatccccccacctcagcctcccaaagtcctgggattataggcatgagcctccacacctggccttcagctcagtttgaattggaaagttgttttttttttaaactattgaattttgagaattctctatatcttcctgtcttagtccatttttattgctataaaggaatatctgaggctgggtaatgtataaagaaaagaggtttatttgtcatggttctgcaggctgcacaaaaagcatggcaccaaaaactgcattgggtgaatgcctcaggctgcttctgctcttggaagaggatgaaggggagctgttgtgtgcaaaatcagatggccagagaggaagcaagagagagaaaagaaagggccaggctctttttaacaaccatgtctcatgggaactaagagtgaggactcatgcattccctctgagactggcaccaggctgttcatcagggatctgcccccgtaattcaaacacttcctaccaggccccacctccaacactggggatcagatttcaacctgagacttggaagggccaaaccatatccaaaccatagcacttccaggtattagtcctttgttggataggtggtttgcaaatgttttctcccagtctcatagcttgtcattttattctcttaagagggtctttcatataggaaaagtttttcttttgatgacgtcaaatttatcagcttttgtttttatggattgtacttttggggtcaagtctaagaactctttgtataaccccgtattctgaagattttctcgtatgtttttttcccgaaagttcgatagttttatattttatacttaaatccatgatccattttttttttgttttcttgagacaagatcttgctctgttgttacccagggctrgagcatagtggcacgatcaaggctcactgcagcctcaacctccagggctcaagtgatcctcctatgtcagcctcccaggtagctaggactatgggttgcaccaccacagctggctaatttttttctttgttttttttttttattttttgagacagggtgtcactctgtcacccaggctagagagcagtggtgcaatcattactcactgcagcctcaacgtcccaggctcaagcgattctcctgcctcagcctcccaagtagctgggactataggcgtgcaccaccatatccagctaatttttatattttttgttgagacagggttttgccatgttgcccagtcttggcacatttaattttttaaaaagttttttggttgggcctggtggctcacgcctgtaatcccagcactttgggaggccgaggtgggcagatcacgaggtcaggatatcgagaccatcctgactaacacagtgaaaccccgtctgtactaaaaaacacaaaaaattagccgggtgtggtggcrggtgcctgtagtcccagctgcttgggaggctgaggcaggagaatggcattaacccgggaggaggagcttgcagtgagccaagatagcgccactgcactctagcctgggtgacagagtgagactccgtttcaaaaaaaaaaaaaaaaaaaaatctgtaaaaatggagtctatgttgctctggctggtctcgaacttctgggctcaaaagatcctcccaccttgacctcccaacctgcaggaattacaggtgtgagccactgcacccaacttcgtgatctattttgagttaatttttgtataaggtgtgaggtttaggtcaatgttcatctttcaacttttaatactagttgttccagcatcatttgttgaaaggctgtttgtgatgttttgagttggctagctccttgatatcacctaaatcttatcagtagtccatttccaagcttcattgcaagatgacttgccaatcaactaatcaagcttgtcattagacagaaaaatctctttcctattaatgtagagtataagggctgaaagttcaggttttggaaccagttcctgggtttttaaaactagcccttctgcttatgaagtaacttcgtagcttaaaacaactgtctgtttaggtcacaattctgtgggatggtattttggackgggctcagctgcacagtggttctgtgtctgtgtcaggtctcagattgacttagggctgattgttggggatgaaggggcctctgctgggatgatacatcatgtacattccctgtggcttctcattctccagcaggctgttcattgctgctttgcatgatgcttgcagggtccccagaacaggaagcatggtagctacaagtcctcttgagatgtaaactcagaatttatgcactgttccttctgccacatttgtcaaagcaagttacggggccagctcaaatttaagaagtttggaagattgactcacctgttaatggagaagctgcaaaaggattgtggccatttttgtaatctggcaatgctggtaaattactcagttactctgagcatcagtttccttatttataaaatggggataataataataatgaactcataataatacctaacttatgaggcttaattcatgagaattcagtaagatgatgatgatgatgatgatgatgatgatgatgatgatgaaggtagaatatggaaaagctcaaactatttttcctctgctctcactccataacaacaatcaacacagaagacttctgtgaccaaatgtacggggttgcagtggacatcagttgggtatcctccaattcaattctgacactgtctccctgaggacagcccacaggttgagggctcagtccctcaagatcatccccatcttcctagtagtcctgagtccaggcttctggaacttctgactgactggcttcaagttggggttcccacagtaccctctttgggcttgattgatttgctagagtgatgcagagaactcagggaaacacttagatttaccaatttattacaaaggaaacagatgaagagatatgtagggtgaggtgtgtggtaagaggcacagatcttccatgcccttccggggcacgccaccctccaggaacctccacatgttcagccatctggaagctctccgaaccttgtccccttggacctcttatggagacttattggataggcatgattgaagcatgggcaactgtgtcgaaatgtgattgaacaaaaagaatgtgacctgatactaatagactgagtggggtaacccagcaaggcctgtctgttcagattttgtcttggtcttcctgtgcaatatttcttcctccaaggtatggggcaggaccctctctggactgagggtcttacaacccacaatcaaattagagtcctgccttgagtaggtgaaaggagttcaggagaatatcagagagattctgtttccttacaccaacattataacaaaagactgtaaaaaggattattagagttataagccagggaccatggatatatatgtcatgtcacagtaagtaacactttttttacagtaccagttaatattcattgagtattttgtgccaatctctgttcatgcatgaacttgttttatccaccctaccaaccttatgagatagttaaggagacagcaagtaagtgaaggggttgaaatttcactcaggcagtctggctccagagccaacacttgtcctttttactcctgtagaaggtgtatgaatacttagcacaactcctggtatatagtaagtgttcacttcagtatttttattgatacttatcctcattagactcattcacagaaggaggcactttctaattgtttccctaggtttttgaatttggggatttggatttttctggaacgtggagctctttcactgaccatgataagcagaatagcagagggaaaaaaaaagaaaagaaaggcaaaatgagaacgcttgtggagataaacagagaaggcaatggaaggccagagagaaaaagagtagtcatgtctgggtcccttcttgttgaggcctggaacacagcctcattggttactgggcataaggattctgatgctgaagaagtaaagggttctcctctgtcagagtggtaagagtataatccgtggcccttaagaagaacatggacaacccctcccatcccccaccatgccacatctgtacacacatacacttcagtatgccctcatacctactaagaggggacagattttctttggaacttagagcctaaaagttccttagaagatgggaaacaattatttctctagaagccttgaattttcctaactaatcaaggccttctcagttttcaatatggaccctaacaagtataatacattgtagaacattaaaaaaatacccccaagaaaggtagggtcagccttggaaggtaaaaggcgttgttcaataggaaacccaacaagccctgagtcccctgaagctctcctttgtgctagaacctactggatttgactgagtcaactgcatgaaaccttgttgttagtggtgacctcctcttgaaccctaacaggccttatctactgctgttaccctattgtctccagccagaatgacccttgactacctggcactgaaccatgcgacccaccctcttctcctgatacagactgtgggttagcctccttcatgctagcctggctgctggattctgattggcttctaccatttgatcacctggacagacatgcatgccactgcctgtgttcctaaggtaccctctcaggctgctccacccatgctcaccacccttccaggtcaggataggccctccagcagacaggagagaaagccagaaagcctagatctgacagctaccaaaaggataatacatgatacttggcatagctctaagctctgcaaacagccactgatgatccctggtccaaaccctaggggagtaagcctgtccctccaccacccttctctctggcagatcagtaagaccaaaccattaggcatacaacttttaaacttaagacttagttgtacatattgcttaggataatattcctgaaagcagagtagggtacctatattattaataattaacccaatgaaggaaagtagcactccataaaacttagcctcaacaacaaaccagtcttttagtcccagggactcccacagcaggaagagaccgtgcacctgtggatccagcaatgccatcggaatcccagttccatcccagatgatggcttaccaagcagctctgtgccaggatctagatgccaagcctgttgtgaaaaaaaatcatattatctttcttatatctccacaaacctgaaacatagtcacttgaaaaacggttatttaaggaaaggcagaaatgactattacttcattagaaatgttctttctaagatatgtgtgtgaaggaggcaggaagggaggagaacccatagtcgccttcccattcatgagaataaggtcctgcctgctttacccaccatcagtagattgtggttagggagtgagttagcggccaggagatagtcagaaggtctaaagaaattttgagaaaattgtctgtaatttatagacagacaatataaagggaagtgatagtggttcaagtgaaggtagttaactctctaataaagttatagaacagtggttcaaaaggtggcttggaatgataattttagtaattcattcaaatatttatgagttgcttgtaatgagatatagaaaagtctttccagggaattgcttaaagcttagtcctgctgagaacctatgttacccaccttgtcttgcttcttgctatcagggaggaacgtctatttgcttaagtgctcctctaccccccactgattgacagcatcttatctcccatgtaggcctcacacagtccatctgcctatgcactcattgtccttctgtgtcagttacaattatgtgcatgtagcaggaaactcagaatattcatggctcaaacaggatagaaatgtttttctctctttctcctgaaggaagcctagcagccctgcaagaaggtaggcagtccagggcttccagaatagcactgtgaaatccatcagggatccctgctcgttctttcttgttgcttcacagttccttctagtccaaaatgaatgaatgagctccagccttcatacccatgttccaagaagcagtggggatgaagggaagaaagcatgtctcttttaagttcctagaaatcccacataacattttcacatgtatcttgttagccagacttggtcacattgtcctgtctacctgagcaagaaaggctgggaaatgtagtctttcgactggtggcagtgtgcctggctaatacttggggatctggtaattgtgtgagaaaggkcgaatgggtaagtagtaagcagctaagcaggaggtgttgggcccataagaagtattgaaggggttctgtgcctgacattcagcttttactcttttacttttggctttatgcaggtatctatttggcttttaatgaagatttttttcctccttagaaatcttgtagaatttttgtttgtttgttcatctgtacaaattatctgtaatcttgtacagtgttacaagaaaaagaatcaggaaagaattggttagaggcagatgtccaaggggatagaaagtatctgactctaacattgcttttccttcagaaagctgtctggtttctttgatcattgttacaggcatctggattcatcaaagagagaaattgtaggtagaatagttgagattttgtattattcatacacttactttgttctttactgtctttgctaatcaggctcttccctctttttttgtttttttgagaaggagtcttgctctgttgcctgggctggagtgcagtggcacgatcttggctcactgcaacctctgcctcccgggttcaagcgattctcctgcctcagccacctgagtagctgggattataggtgcccaccaccatgctcggctaagttttgcattttagtagagacggggtttcaccatgttgtccaggctggtctcgaactcctgacctcaggtgatccttctgcctcggcctcccagagtgctgggattataggcatgagctgccatgcctggccggctttttcctctttttatagtaatatggtttctttagaaacacccatatttttctgattatgaaaaaaaaatgcatctttactgcataaacttggaaaatctaagaaagaacaaagaagaaaatttaaaattgcttataatcctatcaagagataaaatattaatttttcattaattttatccatctatgtgtttatacatgtatatgaaattaacatgtatttttctacattattaaaaattctaaaaatgttaatctttttccctttatccaacatttactctgcttctgatttttctgataataaataacagtgatgaatagctttctgataaatctcttttttagagaacttttttaaggctttcgataaatttgccaacctgtcttcaagagagattaatttgtttgtactcttcaccaacagcatttgagtgtgcctatgacctgcatactgggtgtaaactccatacaatactaaaataagaatacgctagatagagcttttgatacactgtgctagttttacacagttaataatgataatgctattttttggtatctaaactggttaatactgagcatgtatatttttattgaaaaactatattgagtatttctttttttcttgcatttgactttgatggctacagattgtatccagccttcagtcatcagacatgttcgttcttggagcaacatcccgtttatcactgtacccctcagtcgtacacatggcaagtccttcgcccaccgcagtgagctgaagcatgccaagagaatcgtggtgaagctcggcagtgccgtggtgacccraggggatgaatgtggcctggccctggggcgcttggcatctattgttgagcaggtgattgccaagatagaaattatgctgtactaaaattgggtttttaagtcgctagttcagattaggtttaagttgctcatcaacttaaaaaaataattgtgatttcagtgcagtagatttaacccaatgtgaaaactgtttcccactgtagacgccagtgagagacgacatcttagggcaagaaaatgggatgttaaggagtaggggtgatttcatgcagttcatgtctcagacttcttagtgataaagagctgtttctgtcagagattcttagttctgactacgcagtagaatcatcttgggcctggagatgcttgggcttcacacctagccatttaagaagtatctctgggatgaagcagctgtgtttgtttgttttgagaggatctcactctgtcacccaggctggactgttgtggcatgatcatggctcactgcagcctggacctatcgagctcaagtgatactcccacctcagcctcccgagtagctgcagctacaggcacaaaccattatgcccagcaaatttttgtatttttcgtagagacaggggtcttgctatgttgctcaggctggtttccaactgctgggctcaagtgatcctcccaccttggcctcccaaagtgctgggcctgcaaactttttctgcaagaggccagatagtaaatattttagtttcgtaggttatatggtctttgtctcaactacacagctctgcagaagcaaccatagataatatataaatgaatgagcgtggccgtgagctgataaaatttcatttacaaaaaccagcagcatgccagatttggccaaaagtaaaaatccagacatccaggcatcccacagataaagcaagagctattccatggcagctgaaatcttacactaccttgtaattaaattttcagtttttaaaaaacaakttcctgaggtgttaatattgggaaattgctaacctgaaacttgatacaatttttttcttatattttctattctaaattatcaagcctgagcaacaaagtgagaccctgtctctacaaaaataaaatcggttgggtgtggtgacttgcgcctgtaatcccagcgctttggaaggctgaggcagaaggattgcttgagcccaggagttcgagaccagcctaagccacatagtgagacccccatctctacaaaaatttttttaaaaattagccaggcatgtggcacgttcctgtggccccggctactcgggaggctgaggtaggaggattgcttgagcctgggagattgaggctgcaatgagctatgatcatgcgactgcactccagccttggtgacagagcaagaccctgtctcaaaaagttctaacttcttggtaggctgagacaaggggattgctggagcccaggagctcaaggttgcagtgaactgtgataaagtcgctgcactacaacctgggcaacagagcaaaaccctgaccacccccccacccgcccctgcagaaaaaaaaaaacaaaaaacacccagaacaacagcaatgatcaaacccacctcccagattgagtccatcagataaattttaaaaatatttatcaagagactacactgtgaggggcactagcctctctaccctctctaccttagaaacataacagtctttaccctttgcgagccagaactgggactccccacacattaaggtgactgttcagggcagtaaatatccaaataagtgggcccaaatgacagtgagcgatgggtccagaggtgggaaactcagatgagagtatggttgttcctggggcttcctaggagagctggaactcagcctgggccttgacaactgatgggatttgcacaaacagaggggaaaagttccatgctactaagtacacagtgtgactggtgcccctgcagttgtgcaatccagtggttctggggaagggacaggctctaggagtgtattccaggtagaggacaggcaggaatgagtatggcatgctgtgggccagggaggagacaagctggaaagcagaggtggtggtctcattaggaagaatgaaaaataaagtggatcattccattaggcagagctctgaagccaactaggtgagttggagttcagtctcaaaagcaggctgaagattttgaacggaggagaaacttgatgaaaacggtaggaaaaacctggtaaaggtttgcgtaggttaccagctttctttctagggctgcgtgtggacctaatggaagagctgtctccatcagggcctgactaatagacatcttatcatgtcagatggactcaggagccaacttaaactggcttccactggccataaatgggatgatgtaaacatcaagaaagggaatcacagctgggcacagtggcttacacctgtaatcccaacaccttgggaggccaaggtgggcagatcacctgaggtcaggagttcaagactagcctggccaacatggtgaaacctcatctctactaaagatacaaaaattagccaggaatggtggcacctgcctgtaatcctagctacttggtaggctgaagcagtagaattgcttgaacctgggaggtggaggttgcagtgagacaagatcgcaccactgcwcttcagcctgggcgagagtgagactcagtctcaaaaaaaaaaagaaaaaagggaatcactgcacaatacaacaaaatatgtttaaatccatgagttcataattatacttaaaaaaaaaacttcattggccatttttggaggccactagagaagctactcatattgaaaatggatgagtaaaggggaagagacacacatttgtcctgcttttcatagacaaactgtacctcagggtaaccaaatagttggtaaaggagagtttcccttttggaattattccagattataaatgacraaggaatcattgagttagagtgtcagcattttgcatctcctaatggaataatggatcttggcaatgatcatcaacagatgctaacatcacaaaaagaaagataaccaggcattatgtatccccttgatgaacatgtacaccacaacttataaagacttgttggggaaaaaaaaaaaagccttcataccaaacagcagtttatagggtatacaaagagcagtattaataccataaggacacaattgggaaaatgtaggctgggaaatcctaaagaataaacaactcagtttaacaaaaaattacaagggggaaaactgatggagaagggaacccatgaatgaaagagacttgagagacacttcaattaatttgtaatgcagggtttaatttgcatctcaatttgagcaaggtaaaaaaaaattggaaaaatatgaacactggctatttgatatgaaggaaatcattgaaatattccagataatggatttgtggagagagaaagacatataattatatattatatataatatatatgattatcttttagcagttattactgagctatttacagatgaaataacatgtctgttgcctggaatttgtattaaaacaatggtgagggtatagaggggttattggagagtgggaagttggccatgagagatagttggtgaaactgggtggtatgtacatggggatttataatactattctcagcactttggttaagtattaaattttctttttctttttctttttatttattttagagagagggtcttgctctgtcacctagactggaatgcagtggtgtaatcatagttcactgcagccctgaactccagggctcagttgggatccttcttcagcctcctgagtagctgggactacaggcacatgctacttggctattattttttttaatttttcatagatatggggtcttactattttgctcaggctggtttcgaattcctggcctcaagcagtcgtcccacctcagccagctgaaactttctgtgataaaatattattgtcggggccaggcacagtggctcacacctgtaatcccagcactttgggaagccaaggtggctactcaaggggctgaggtcagggggttgcttgagtcctggaggtcagggctacagtgagccatgattgtgccactgtcctccagcatgggtgacaaagcaagactgtgtttcaaaaaaaaaaaagttattattgttttaaatcatggtttatcatagctgtttgttaaacagctggaccagttaaaaggtttcagacatcagaaggaaaggacagtttaggaatattgactttattacatcttgagtctttaattttttcatgtaggtctgcttaaggtaggaaacaaagtgaccgcatttggtcttgggcagacagagcagaacaaggtcagcatgtgcccctggtgtaggcagaggcaacccataggattagacatgccaccagaacagcctcctttacccgggttaagccttagaacctgagaagccatctactgagtctgcgttgcatttcctacctgcrgacttttattctgggcttcatttcttggaggaactaggccttctgcattacacactccctgcaaatattaggttggcacaaaagtaattgtggtttttgccattactgtcaatggtaaaactgcaattacttttgcaccaacctaatacagtcaagtcctatagatgtcaaacttggctacacaccagaatttcctcattaaaaatgtcttacttaggccaggcatggtggctcatgtctgtaatcccaatgctttgggaggccgtggcaggaggatggattaagaccagaagtttgaggccagcctgggcaacatagtgagactctgtttctacaaaaatgtgttaaaaaagaaaaattagctgggcatggtggcatgagcctgtagttccagctacttgtgaggctgaggcaggaggatcacttgagcctaggcagccaaggctgcagtgagccacattcatgccacggcactccagcctgggcgacagagcaagactctgccttaaaaaaatttttttcttagggtgttgttgttgttgttgttgttgttgttgttgttgttgttgtttttgagacagcatctctctcattctattgcccaggttggagtgtggtggtgcgatcatgggttactgcagtcttaacctccctgagctcaggtgatcctcctacctcagcctcccaagtagctggcatgcactaccatgcctggctaaattttgtactttttgtagagattgggtcttgccatgttgcctgggtggtcttgaacctcctgggctcaggcattgtgcctgccttggcctyccaaagtgctgggattacaggcatgagccaccatgcccagccaattgttttaattaaaaaataaattaaaatgtctgatttttgtctgccacctgctaaatagaaatttgagacaggatgtaggaatctgtgtttttaccaatctggctgattcttccagagccagccacatgctggttcataaaccagcatttgggatctactcgatagcccaccctacctccatcccttgtgaagagatgaaagagacagtacggtracttacagtcccctttcctttctcaatgcccaggtatcagtgctgcagaatcagggcagagagatgatgctggtgaccagtggagccgtagcctttggcaaacaacgcttgcgccatgagatccttctgtctcagagcgtgcggcaggccctccactcggggcagaaccagctgaaagaaatggtgagtgctgcttccccacacattgaaatggatcttcaggtcttcttccctcattccctaccacaccttgtctcattggtatattacaggcaattccagtcttagaggcacgagcctgtgcagctgccggacagagtgggctgatggccttgtatgaggctatgtttacccagtacagcatctgtgctgcccaggtgagaggctgggctttgaaatgggtgtgggacctgtgagggtggttgttgtggaacaaaggggtctggagccagactattggaatatggtgtcagcttcatcacttgctacttgagatctgaagaaagtttcttttcctttttgtgcctcagtttcctcatctgaaaatggggataatatcagtgcctatttcagataatttttggaagggctcagtgagaaaatatatgaaaagcatttagtatagtgtttggtacataatacattgtcagtaaatatcagttcttgttacactaataacttaggattccaagtgctaacacttctgaagacagagaagttaaatgtctttatttcactggcttctttgatttcaggkggcttgcttctctttgcacctggttggttgccttttatagcagatatttattaagctttgaagggaaagaggaatgctggtgattggttggtttttcactcattcagcaaatatttattgagcacctatggtgtacctagcagtcttgggcattggggatactgtggtgaacaaatcagacatgattccagtcctcatgggacttacgaatttttggtggctacycctaaatgttctagaaccttctttctacattgtttcatttttacctaaatctcctgaatttttttgaattatattcttaatcaactgtacaactacacactagagacatctcaataacagtcacttcaggaaacaactgaawaaaaaatctaactcccaaattattttattttgaaattcctttacctgtaaagatgtaaaatagctgttattttatattatggatattattttacatgtacactacatgcacagatgttattttacacaggtgatattgttatatatacatatattgtttcaggttttgcttcttcatttcctgttacttttttttgtttctccatcatttgcctgtttgtacccacagtgatgttctggtattacaccagagtgtcctcaagtcagtgaggtaaaacagaaaggcacggacttgtcccattgcctatggctggggaccccactttctgtagtcttagctttttttctgttagtataaatacagtataaatctctatttatatcactcttctttattatttggtttctcttcacagtccaatgacaactttggtctttaatttttttaaagtgcctggagccaggtgaggaagctcaagtcagggagctatggttttgctttggtttggtttttcccagggatgaaaccttttgagagtttgtttttgttttattttgttttgaatgatggtagcattaagagtccatgcagcatcagccattgtttccatttacattgagtgaaagaagagccctgccccctccagttcccaacaagcttcaacccctgggctctttcctctcacacctgtgtcttcccccaaggccatcatatctacagaaaatatttgccctttgtaccttttcctgtggttccttattttcttcagtaatcctatatagaagaccattgtcagtggcttttgaaaatttccagtaggtggtttgccaggttaaagacttaaacacttaaaacagcttgttttttcttcatagaagggaaactgattttccctcaacagattgcgcttgtctaaacacgtacttttccctcttgggactctttatctcctaccttcatgctgagatccccaggccatgtttgtgaagctattttggtgacaggtatttttcctggacctttagatctcctgcttgtctctcctacacacgggtttatattaattgtttgatctttcaccatcgtgactagaatctatatgttcagtttggacctagtcctgtgtccaacagcactaagcttttctgaaaaggagttcatgatcttccctttcaaaaatatgctccattttatttttccccaagacatcaacattcttattctccattccagcagctagacyctggcatttcagaggtactcaacaaattttttatcgagtgagtgaattatttttctatatgtatgtttcctgtgttttatataccattaaggctactgttttattgctatattcttctcagttaccatagccagacccttaaccatcctcactttgactgtttcagtgcctgctttctttactatttgcttccagctttccctacctcatcctgccctacacagcaagaacrctcttccgtaaacattagagagattgcattatttattgttgagcctcaaggtttgttgccatttagtttcttgctatctccattcacccatttatctttttctcctaaacattgcataaaattctgatttaagctagaaagcagagctgtttaccagcccacacaccagctctccattctacctttgagcaccttatgctcatctcctcccttgaaccaagttgtgttctgcccccctttcagcttgtgaccaaagactaacttccataaatttctcagactaaccccacatgctcacacacaatcttagttaactccagtaatagtctgctttagagcaagagcagtgacaacacmgccctattccattttgtctaacacactttcactcactcaccaaatatttaagggcctactatggccaggccctgaatcagatcctagaatacagagatattttagaaattgctggggcacagcggtgtgcatctttagtcccagttactcaggaggctgaggtgggaggatcacttgagagtaggagttcaagtccagcgtggacaacagagtaagaccctctctataaaaaaagaaaagaaattaatggataatcactgattcccccagtatccctctaaaatagatacattaattttcttaattttgtaaatggatgagattttggaatttggtagctctttgaggattaaagtacttttgcaagaagtcttgaacattcttaaataaatctttcagattattgtaattttttttatctctacaaaaattggggccaggtgcagtggatcacacctgtaatcccatcacttgaggccaggagtttgagaccagcctggccaacatggcgaaaccctgtctctactaaaaatacaaaaattagctgcgtgtgcctgtaatcctagctacttggaaagctgaggcatgagaaytgcttgaacccaggaggtggaggttgcagtgagcagasattatgccactgcattacggcctgagcgacagaatgagaccctgtctcaaaaaaaaaaaaaaaaaaaaaagaattggatagcacccagatatgtgtatttcattctaatcttctaatctgtgtggggccccagaaacctaaagtttaactcccctgctcttagcrtcttttgtatactgggaagtttagcgtttttctccctcatgcattttccatctatttaatccttttagattttggtgaccaatttggatttccatgatgagcagaagcgccggaacctcaatggaacacttcatgaactccttagaatgaacattgtccccattgtcaacacaaatgatgctgttgtccccccagctgagcccaacagtgacctgcagggggtaaatgtgggtaaagtatttctaagggtttagcatgctggagacactaacaccatgctatgctgcatgcactaacaccagaagtttggcataaacaagatggaaaagttgtgagagaaacttgtcatggagcagtgactgcataagctcttctgaactcgtggttgcattcaacagggtgaggtgctatagtcactgaagatggtgcgatgagcatggcttgtatatttcagtggctagaagactgcatgtttggaaaarggattgccagtagacagtgtgttytgcagacagaaggggcctgcaagagccgtcatctacatatttgggttcattggttttgcctgatcctagcttggttttgcctgagcttggctgtgttcttccatgaatttctttttggactgcttagctcactcacttatgactttttaatctgcattctaggttattagtgttaaagataatgatagcctggctgcccgactggctgtggaaatgaaaactgatctcttgattgttctttcagatgtagaaggtacaaagtaatgcttttttcctttatctgccctttgttttaaatgctacatatgtgagcacatgagtttccctctttctttgagtccctctgatgtttttttgctatagatcattagccatatgttctgacaaagggcttttatgactcaaaacagggtgggtgagtctaagagatgtcatttgaatcctgaaatgttacttccaggtgctttcagttgttttccttaaataacagctttatggagatgtaattcacataccatacaattcacttatttgaagtttacaattctgtcctggcrtggtggctcacacctataatcccaacactttgggaggccaaagcgggaggatcacttgagcccaggaattcaagatcaacctgggtaatatagtgagtccctgtttctacaaaaaatagaaaagtcagctggacatggtggtatgcrcctgcggttccagctactcggggctgaagcagaaggttcacttggagctgggagttccaggctgcagtgagctgttatcgtgccactgcactccagcctgggtgacagagcgagaccctatctcaaaaataaataaataaataaaagtttacaattcagtgatttttagtatattcacataattgtgcaaccaaaaccacagtcatttgtagaacactttccctttcatcacccaaataagaaattccataaccattagcagtcactccccacttctacccmaactccccatccctaggcagtctccagtatattttctgtttctatggattaacctgttctggaaattttatttaaatggcatcatatactatggtggccctttgtgaccggcttttttcacttagcatgttttcaaggttcatccattttacagcatgtatcaatacttcatttgtttttattgctgaataatattccactctgtggatgtaccatgttttatttatcagttcatctattgatggacattagctgtgaacattcatgacacgtttttgtgtgaacatgtttttatttcatctaagagtggaattgcagggtcatatggtaactctgtttaaaagacttttgaggagctactagactgttttccaaagtaaggccccttgtaccatttcacattctcaccagcattgtatgaaggttctaatgtgtttacatcattgctgttattcagttgttttttttttttttttttttttgaggcagagtcttatcctgtcacccaggcaggagtgtagtggcacaatatcggctcaccgcaacctccacttcccaggttcaagcgattctcctgcctcagcctcccgagtaactgggattataggcacctgccaccacacctggctaatttttgtatatttagtagagatggggtttcaccatttgggccaggctggttttgaactcctgaccttgtgatccacctgcctcagcctcccaaagtgctgggattacaggtgtgagccaccgcgcccggcctattcagttgtttttatctgccttttttattatagccatcctaatgggtgtgaagtaatatcttactgtggttttgattactttcagtttttaatgtaaaccatgggacagattgtggattttttttgtttttgtttttcctttgttgggacagattgttttaagttggagccaytgtagaagtctaggctatctgggtaccatattcttatatgttactctgttcttctctgctgttcccttcttcctggaggggccactcttggctctaatatgtctttccattcactcctctcaagctttcttaagctatttccatttcacagtctgacccataagaaatatagtagctgtgtccaaaatctaggattccaaaagtcccctgttaacactcccagaaggttagaaaacctctacttaattcccagcccacatcaaggcaggttaacatggcaggacctgttctctgttttacgctcaagcagttgtgaggtaagggcagggactacctagtggaggcaggggcagacatagatgaattgatctgtctctgcccatgtggaaagtcagagatacgacacctacatgtcaatatctttacctgtaagaagtcttagtcctgtgttatccactgtaatttgaagtcccaggatrggaacaggtaagttggggtaagtgtgagccaccctggagaaaaaaggcattttggttcatcaacaggttttctatttattcattctccccaccccccygagatggagtcttgctctgtcacccaggctggagtgcagtggcatgatctcagctcactgcaacctccgcctcctgggttcaagcgattctcctgtctcaccctccctagtagctgggattacaggtgtgcgctatcacgcctggctaatttttgtatttttagtagagaaggggtttcaccatgttggccaggctggtcttgaactcctcacctcgtgatcctcctgccttggcctcccaaagcactgggattacaggcatgagccacggcgcctggccaatcagcaggtttttattgaatttctagcatgagcacatagtgtgctaggtgcttgataaatgtaatttattcaatctttatagcaaccctacaaagtaggtagtgggtaggctaacccagttttacagatgaagaaattaaaaattaggttcaagctgggcacggtggcacatgcctgtaatcccagctacttgggagggctgaggcagtaagatcacttgagcccaggaagttgacgctgcagtcaactgtgatcatgccaccgcactgcagcctgagtgacagaaacagagaccctgtygggagaggggggggaaagaagaagaaatattttttttagtttaatttaaaattaaattcagatctattaaatggtgtatctgaagtcacatagcaagtgcttgacagaggccagtttcaaatctgagtctgttcaattaaaaaagctacactcttccttctctcttatactgcttgacaaggtaaaaaaaaaaatgtaaggttttgagattaatttataaaacccagtttgaacaagactctagcaaatcgttttgatgcagcttcaagcaccaaaatcgggtcattggtagactggcattcttattgtgattatcctaattcattttctactgagtgttgattttttagaacagtatctgaattttaactatgctcttggtggggtaaggggaaaagaggagtaggcacattatcagaatgctaggaacccctcactgtctttggagaaggtttggctagaattgtccaatctttcctgtactaatatatgaaactgaaacagcttccaaatctaaatctgtgatctcatagcactgtatcttctgggaagatcctaaccctaaatcctggagagttgtggagtagtaggttgagactgacagattgtgaaaggttattttttcttttcctgtaataatttgcactgcttatagttgccactgctttgctctacaatgggcattgatttcctcacttccctgattcacttactcctgcagagaggtagtatgtagcaagattgtcttaaagatttggaataatagaggggagaggtatattatagcacaggaaaagcagtaacttgagaccagaaaaatcactgcccaaaatgtccttcagccagtccccagcctccccatctgtgtccactttaggtcttgatttaactctagtttctcagccctttcttacccccactttttcttgtccaagctcctacttactctttttcaaagtgaaattgtgagggtttttcatcttggattgtatgcatgtaacatttcaggtaactattttatgtcactccacttagttataaaagggacatacactttatggtaataaatccagactgaatgccaagagtcacgcactctcctgctgactgagcctaacctctacagtgactcactcataaaactgggagtgtaaattagtgactgtttcaaagggtactgtgagagttaatgagtacctctgttgcatttcatcctgcttggaaacagtcacattaaacagtatatggctgctatgctgtttctgcaatagccacccttctttttcagttctgtccttaaagcacagcatcataagtagcaatggcagaattaaggacaccttgccaggaatatgggcagggctaataaatgttgtgctgaggatatggccatgatctgatgttgggaaacatttatttattaagccaggttatagaaataatgtaaggtgagtcttcctggagatgtttgtcagtgtcgaatcccttgttctctttttctggttaaagcaggtggtagtgcagtggaattcatttggatgagtaaagtacagagtgattggcaggtgccctggggaggcctgtcttggagacacttccatcaaagcagtattactgactcttgtctattttttaggcctttttgacagccccccaggttcagatgatgcaaagcttattgatatattttatcccggagatcagcagtctgtgacatttggamycaagtctagagtgggaatgggtggcatggaagccaaggtaagaatctggtgccttaactgcctataacaattttaaagcccaaactatattgtatcctttttacttttgtaattatttgggggttaatggttcagatagtaggcacatacacacttaaatatgtacatacctaaatacagatttaatgagtgttgcattccaacatttgsttatgtctgtgtatgtgggttttctcattaatattgtatgaacagtgtgttcatgttgtaaactctgcaagggcagggcctatatatttttcataattcataaatctctcatttatcagttcaaatatttcttgatgaaatctttcaaaaattgtgtcccattaattgttcttagaagttatacccgtaaggtacagcatcacatgtatcaacagcacagatgaggacaagacccccacttagaaaagccagaagtactcaagatcagactctggtcaaactccagcctgttggtctacttaattgtttctaagttgaggcacagtaaatcaaatgtagaagttatgagtcccatactagagagactgaagagagaacagactggaaacaaaggataggttggtttacctttaagtaacacaggccaaggttgagctggaaagtgtgtgaactgttatgtgttttcagagcttctaagcttttaaaaacattctctcatatacttaagttgttcaatatcaacttgtattttatatctttttgcaagtttaaaatgtgggtgaataggtctgaatctcatctttactggatctaacctgtctcattaggtgaaagcagccctctgggctttgcaaggtggcacttctgttgttattgccaatggaacccacccaaaggtgtctgggcacgtcatcacagacattgtggaggggaagaaagttggtaccttcttttcagaagtaaagcctgcaggtaaatagttcttcataaggtcccaaggcctgtgatgggaactagtgacacctggcttagttagagatcacaaaattgatatgctaatattatgaaatatggcattgttttgaacgctatttgcaaaatcggattttgctttgcttttgtgaaattctatctaacctgcctatctagacctattctctgcaaaatcactcggttaaaatatataagcattgattttctcaagaaacatttgctaggcctatgttagatgccaagtgctaaataagcactagagatgcaaagatgcatatgatacagtatgtgctctcgagtgttcacaaaggacagaattgcctcataatctgcattcagaagtgtaaacacattaaaaaatatcgccaaagtggaattcagaagaattctagaaaacaaagtatattgtctgccccagaaatacaggcaagttcttatgtttatacctgagtgaatctggcacattcttttgctattttattggtcatggtgatcccctgtgtgaaacaagcataccaagacatcatgtgttccttctgtgggcgtgatgagcttgtgcatgtgctggtagttctctctctagtagtagaactagagagagaactaaggtgaccatgacctgatatttgcacatattcttgcaggccctactgttgagcagcagggagaaatggcgcgatmtggaggaaggatgttggccaccttggaacctgagcaggtaataaccttaggtgataatattgttatagttttcagagtgagtcatgctgtgtagttacaggagtcaaacctgctgactccatctttattcctagtgagccacagagttatctgagttacaagtytgattcaaatttgctctgccttttttctttttcttaattttattttccgttttatcttttatagacagaggtccaagataacttttcatcactatgatgttttgatcaagagcatcataaaaatgatgagattagaaaggttacctaattctgccacatactgggcatggaaatgtgggaaaattacttatcccaccccattccaaatcccctgacttgcctagaagatgggaagctcgagagcctgctccatagttggtagccctgacctgtctggcttgaattagtctaagtagcagacatgatgaggctggaagtggtgaggaggtcaagtagaagctgggagctagtcccccaggggttatgttgtcaaggacggatttgagagtgaagatgtgtgtgggtttatactagtgaatcctttggcctgagaaaagaaaaagtaactccaatggcagagaaaggaaagcaaaggaggagcctagcttccctttcaaaccacttccctctgctcctccaataatcagcatactgatttgccacatttcctcatctagcagggtcaggtttggggtgtcttcaagtacctaggactgaattttttcactttgattaaatgcattaaataaataatttacaaggaagaaccagatgtaaaaacttacctggamataaactaactaatgatattaaatatgtaagactctatgtaacatgttaattcaaagtactggcccctgtacagttacataatctcctacagattatacagtctcctacagattgtatccatcatgccccttcccccccttttttttttcttatgactcctgattattaytattagccatggtttgctaattataataatcaggagtcataagaaaaaaaaaggaggaaaagtaagaagtgacctagaggttggcagtgagagaggaaggaagaaataaggggagcagtggtgggaataagtgatgggaagtcaggagatttcaactggtgatgaccgtggatgtgggagcaaggcctggcactctcagaagagtaggtttaaaaactgtggtgtgcattcttcttggattaacatctcygtttttttaatggtgtacctttcttctagagagcagaaattatccatcatctggctgatctgttgacggaccagcgtgatgagatcctgttagccaacaaaaaagacttggaggaggcagagggtaaagaccaggcaatttaaagtcaatgttgtggaggggtgtgcattattttggtttttagttttactaataattcttatgtctgcctaaagakaaggatttttrtaaaagaaattgtacattatgtatcatttctattgagggtaggtgggtggctggtattctccttccccaaatactttagtacaacccccagaggagcttttttcattccccacaggtcacaagctgtggctactatggcggtcaggacaaaaaagaacaagattgagaaccccactgcttaagacattcagctaatagctaacatttattgaggcctttctctattgacaggcactgtgctaatggctatgcagtcaggatgtcatttaatcttcataacatagtgcctctgagatagctactacttattatccccatttgacagagaaggaaactgaagctcagagaagttgtcacttgcccaaatccacatggtcagtgatggaccaggatttaaacacagatggactgtacatgtgaaagagttgtagaaatagtttgtgcagcctgtgaagaaagatagcttgtttcttagttaattaaccagtcttttgtcttccctgagttagcaccaggtgccatccagaaataccctagaggtgctaatggtaaagtaagatgttgaattcacattgtgaacacctagacatgtagagagtcagggccctgactctttctcctctttttcttaattctgtcttttcccccttaaaataatagggattgattttatggggttttgaatttcctttgcattatcttgaacatccatattaatggtgtttctttcaaagaaattttgcacggttcaacgttactttcattccttaaaacatttttgaaccattgttttagaacttcctctagaatttacatctcatttttatagtattacaaaacgtaaaatagattttcagaactggaagaaatctttgatactatccactcattaatttaaagtaaaagaattaagacccacagagggtaaacctgttgttgcccaaggttccacagcttgttgttggcagaagactcctgatcccagctatacctctctgaacatgcataaggacacatagtgggttaagaacaaagccgtgggtatacatgagcgtggcttagcaatcccagttcggggaatttatcckcaaaaactatttctaaagaaaataggtctttaggccaggcacagtggctcacgcccgtaatcccagcactttgagaggccaaggtgggcagatcacctgaggtctgagttcaagaccagcctgaccaacatggtgaaaccttgtctctaataaaaatacaaaaattactgctgggcgcagtggctcatgcctgtaatcccagcactttgagaggccaaggtgggcggatcagctgaggtcatgagttcgagaccagcctggccaacatggtgaaaccttgtctctataaaaatacaaaaattacagctaggcgcagtggctcacgcctgtaatcccagcactttcggaggcctaggtgggcggatcacctgaggttgggagctcaagaccagcctgaccaacatggagaaacctcatctctactaaaaatacaaaattagccgggcttggtggcgcatgcctgtaatcctagctactcaggaggctgaggcaggagaatcgcttgaactcgggaggcagaggttgccatgagccgaggtggcaccactgcactccagtctggacaacaagagcaaaactccatctcaaaaaaaaaaagccggccgtggtagctcacatttgtaatcccagttactcaggcagctgaggcaggagaatcgcttgaacctaggaggcagaggttgcagtgagccgagattgcgctactgcactccagcctgagcggcagagcaagacttcatctcaaaaaaaaaagaaagaaagaaagaaaagaaaatagctctttatctaaggattcttagagcaagatttatcacactgaaaaactggaaacaagctgagcatttaataacataggtgtggttaagtgcgttcagctgtatcaaattaatggaatatttagtagtaattaagataatttttgcaacatggaaaatatactcgcattgtgaggtgaaaagctaggatgtaacatttaacatatactataattaaaactttttttttagcatatggggaaaagtaaagaaaattaattaatttgtataattggttggtagaaagatggtttaatttttttttcttaatataaggtcagttgcttccccccaaggcagaaatctttttattattttatcttggtggctatgactgtaaaaaaaggaaagggaaaatttttgtaatctcaacattgaccacagtaatgatttgtgatatatgatttcaaatggtcttcctgagtatatacatgtatatatatgaagatgtacrtacatgtttgtgtgtggagagagggaatcacatcatgcatactactgttttttaaaaaaattctgggccgggtgcggtgtctcatgcctgtaatcccagcactttgggaggccgaggtgggcagatcacaaggtcaggagatggaraccatcctggctaacacagtgaaaccccgtctctactaaaaatacaaaaaattagccgggtgtggtggcgggcgcctgtagtcccagctactcagaaggctgaggcaggagaatggcttgaaccctggaggtggagcttgcagtgagccgagattgcgccactgcactccagcctgggcgacagagcgagactccgtctcaaaaaaatatagaaaattctgcgtatgagcttgccataatcctatttttttttcagccaagcatggtcgctcataccagtaatcccagcactttgggaagtggagacagaggaatcactttagcccaggagttcgagaccagcctgggcaacatagtgagaccccctatctctacaaaatatgttttaaaattagccagccatggtgatacgtgcctgtagtcctagctactctggagactgaagcaggaggatcacttgagccccggagttcaaggcttcagtgagctatgattgcaccactgcagtctagcctgggcggcacactgagaccctgtctctaaaagaaaaaaaggaaaaaagttttcttttttaaaattctgttctccttcccaaaatatttaacattttattttagaagaaaacatctttgttggttctgattataaaaataattcactcattataaaaaaaatagaaagatagattattactattctggatgcgttccagatttcttcccgtgcacacatatatgtgcagtgtttgataaataagatcatatcatacatgctgttttatagtttgcctttttcgtagactatatcctagacagctctccatgtcagtgaacctagatatattatttataataactgaattataaaccattgtctgaatatttaggtagaattcaatttctcagcattacaaaaatgccatgctaagtatccttattacatgcctttctgttcatacaaatgataaatttctggaactgaaattgctgggacaaagggtatcagggtacacagctttacatgatgctatgtactaccaaatggacccccaagaaagacagtttaagtggcatgtcattgtcttcccaagtctgttcctaatgcagtcccacatgttcagtaaaacatcaagacacatcagttgggccaggcacggtggctcgcacttgtaatcccagcactttgggaggtcgaggcaggtggatcacttgagttgaggagttcgagatcaacctggccaacctggtgaaacccccatctctacaaaaataagccaggcctggtggtgcatgcctgtagtcccagctactaaggaggctgaggtgggagaatcgcttgaacccaggaggcagaggttgcattgggcctagatcatgccactgcactccagcctgggcgtcagagtgagaccctgtctcaaaaaaaaaaaaaaaaagacacatcggttggtagctgtagcctgccaggtctgctactttatcatatcctcttaatggcttttcagggagacttgcagctcctctgctgaaacgtttaagcctctccacatccaaattgaacagcctggccatcggtctgcgacagatcgcagcctcctcccaggacagcgtgggacgtgttttgcgccgcacccgaatcgccaaaaacttggaactggaacaagtgactgtcccaattggagttctgctggtgatctttgaatctcgtcctgactgtctaccccaggtgtgtatataccccgggagaataaataccctgccattgggggctggtgtggatattggaggaagaatatattttcttttctttttttttttttttaatttaagttctagggtacatgtgcacaaygtgcaggtttgttacataggtatacatgtgccatattggtttgctgcacccatcaactcgtcatttacattagttatttctcctaatgctatccctcccccagtcccccaccccccgacaggccccagtgtgtgatgttccccaccctgtgtccaagtgttctcattgttcagttcccacctacgagtgagaacatgcattgtttggttttctgtgcttgtgagagtttgctgagattctctcaagagaatcatgcagcttcatccatgtccctgcaaaggacatgaacttacccttttttatggctgcatagtattccatggtgtatatgtgccacgttttcttaatccagtctatcattgatggacgtttgggttggttccaagtctttgctattgtgaatagtgccacaataaacatacgtgtgcatgtgtctttacagtagcatgatttataatcctttgggtatatacccagtaatgggatggctgggtcaaatcgtatttctagttctagatccttgaggaattgccacactgtcttccacaatggttgaactagtttacactcccaccaacagtgtaaaagtgttcctgtttctccacatcctctccagcatcttgtttcctgactttttaatgaatgccattctaacaggcatgagatggtatctcattgtggttttgatttgcatttctctgatgaccagtgacgatgaacattttttcatgtgtctgttggctgcataaatgtcttcttttgagaagtgtctgttcatatcctttgcmcactttttgatggggttgtttttttctcgtaaatttgtttgagttatttgaagattctggatattagccctttgtcaaataggtagattgcaaaaattttctccattctgtaggttgcctgttcactctcatggtagtttcttttgccatgcagaagctctttagtttaattagatcccatttgtctattttggcttttgctgtcattgcttttggtgttttagtcatgaagtccttgcccatgcctatgtcctgaatgatattgcctaggttttcttctagggtttttatggttttaggtctaacatttaagtttttaatccatcttgaattaatttttgtataaggtgtaaggaagggatccagtttcagctctctacatatggctagccagttttcccagcaccatttattaaatagggaatcctttccccatttcttgtttttgtcaggtttgtcaaaaatcagatggttgtagatgtgtggtgttatttcttaggcctctgttctgttccattggtctrtctctctgttttggtaccagtaccatgctgttttggttactgtagccttgtagtgtagtttgaagtcaggtagcatgatgcctccagctttgttctttttgcttaggattgtcttggcaatgcgggctcttttttggttctgtatgaactttaaagtagtttttccaattctgtgaagaaagtcattggtagcttgatggggatggcatcgaatctataaattaccttgggcagtatggccattttcatgatattgattcttcctatccatgagcatggaatgttcttccatttgtttgtgtcctcttttatttcgtggagcagtggtttgtagttctccttgaagaggtccttcacattccttgtaagttggattcctaggtattttattctctttgtagcaattgtgaatgggagttcactcatgatttggctgtttgtctgttactgatgtataggaatgcttgtgatttttgcacattgattttgtatcctgaagaatatattttcaatactggagataggtttcccaaagacaattgtgtgtgtgtgaaggtcttttaaycaaaaaaaagataatttttgagactttattctcaggttgttcttgaggtaatatacgttcttgattcctccagtatcctaaagtagttgttcatatgtccattttagacctggagaaactgaacctcatagaaggtaatattcctgtcacacctgtaaggtgcaactgggactggaacccaaatcaacctaccataccacagtgcaggagcaaatttccaaatatctyagcctgtggttcactttgttctctgaccacaagtctctgttagcctgctgctgtcattcatgaataactggcttggcccatgtgaaaaggacccctttattgtcagtatcactgatggcttcctataagtacatctgttaggaaaaagaactttcagtagttaatggaaattagaatgcaactgtcggycaggcacagtggctgacacctgtaatcccagcactttgggaggcccaggcaggtgaatcacgaggtcaagagattgagaccatcctggccaacatggtgaaaccttgtctctactaaaaaatacaaaattagttggcatggtgggacctgtagtcccagctactcaggaggctgagacaggggaatcacttgaacccaggaggcagaggttgcagtgagtcgagatcgtgccactgcattccagccttgcaacagggcgagataccatctcaaaaaagagaaaagaatgcaaccctctttaagcaagttgacatatcacagcctctggttgagaaagcatgcgttaaagttcttgccaagcagccatgctgggaaatacaaggtgtcattagagagtggccccactttattaccctaaactgcctcccagaattctgggagcatttcccccactggactgtcctatrggataccagctcttcctttgcactagccccaaagtctcaaagggaaattctactgtaaaaacaaaaaactagcacctctttactataagacatagttgactgtggaatctggaatgctctgtgaagggtactctctgacatcccctaaaaccagtgtgttcaccaagggactcccataccactgaggcctatcctcagtccctggctgatgctggcacactacctctctggccacatacctgtcttgcagaaatgccccagtgatgactgccagactcacctctgctagtagaaatgggcctaagtctctctgtggactgtatccgtgaaatttctttgctaccactcatccataccagctgatacctcacaaggagctgatacctcattagctaactacagctaaggctcctcatctggactcagccctggatggtttcacagaatccatgaatcctaaaaattgtgtgcaatattctgtgtgtttatgtctggagaaagtttacttaacttttgtaagaggtaggatgatcaggtcagtgtcactcactctttgctctaacaaggcaactagccctcctcctggatggtttacgttttcctccccagacaggcatgtgggaaaaagactctgttctcagcagtctctaccacagctgcccaggggctggcaggagctctggtcttctccaggttcttagcaccaagcacttagagctctcagaacaattccaaggccagagtaggatgtggccagaggagctgcccagcctcagcctgatcagatgaagcaagtgcttccttacagaggtggctgaagaccctgttctccacggtggggggtgccatgtggccctggccacttaactcagttctctttgctttatttgtttgtttgcgacggagtctcactctgttgcycaggctggagtgaagtggtgcaatctcggctgactgcagcctccgcctcccaggctcaagaaagtctcttgcctcagcctcctgggtagctgggactacaggcacctgccaccatgcccggctaatttttgtatttatagtagagatggggtttcaccatgttggtcaggctggtatcgaactcctgacctcaggtgatccacccacctcagcctcccaaattgctgagattacaggcrtgagccaccrtacctggccaactcagttctctttgctaatggtgctaaggaagccatatagtttagttgctaaaatccagtggtttgttctggagtcaaaccacctcagtctggctcccatccctgttatttataagctgtgtgacttcggggagtcatcagcctctctgggcttcagtgcccttatctgtaaagtaggggataaaacaggcacttaattcactgcagtgttgtgaagatgaaacagcataggccttctaaaatgatgaacacagtgcttagcacagaaggagtgcttgtgaatgctaacatcactgttgctattactgtttgtctcctttgatccactgctctccctttgatctgcaggtggcagctttggctatcgcaagtggcaatggcttgttactcaaaggagggaaggaggctgcacacagcaaccggattctccacctcctgacccaggaggctctctcaatccatggagtcaaggaggccgtgcaactggtaggtccctgggaatgcaccaagtcaggcccagaggggccagatcaggtgtttgggaatttaaagcaaaacttaggccacacagagccaagacactactacaagcagacytgacactycagcaggcctgtgagcctwcagactttaggccattctgcagagccagatgggtcctcagtggcttaggaaggcccctcccttacagctgcgtcttggcactatttatttacaagaatgtcaattagaccttcattctttgggtcacaaggcagcaggagtaccagaactagagtgtgaggcctaggttcctgtcattggcagagtgatctagggtaagtcagatgagaaactttacaaaagtttgtcataaactgtcatgcggtgtgttgagtatgagatcatgctgttatcactattattattaaggtcatcactttaactgaccatttctcattctcctcaactgtcaaatgaagtttgataataatagctactacttgttgagtacctactatgtgcaaggctcattttatccgttaactcatttgatcgtcacagcagtcccataaggaaaatatcattaattattagactcattttctacattgggaaaaaacagattcagaggtaaagtaattccccaagagtcacatggtgtgtgatagagtttagatttggacctaggctgactccagatccttttttttctttggctcatttgctccaacattccaggattctgttggctactgggaggatgtctacaaacctgctcattacacactcagtgaccagaatctggtttttttcttatgcccacatagtggttggaaagagcgcagattttagggattcaaatcccagccccaccacttcctagcttacacaggtgccctccctccttttcttcctattgatgtgtaacatacgtacagtaaagtatacagatcctgtgaaccactctgygactgttcacacacacacatgtataaccaccagccgtatcaagatacagaacagtccaacatcctggagggcccccttgtgcccttcccagtcaatrtgtagcccccttccccacaaactacttttttgacttctgtcacattaaattacttttgcctttttttttttttttgagacatggtcttgctctgttgcccagactggaattcagtggcacaatcttggctctcggctcactgcagcctcagcctcctaggctcaagcagtccacccacctcagctttcctagtagttgggactacaggtgtgtgcctccagacctgactaacttttgtggattttttgttttttgtagagacagggtttcaccatgttgcccaggctgctctcaaactcctgagctcaggcaatctgcctgcctcagcctcccaaagtgctgggaatgtgccaccacgccctgccttttgcctattcttgaaatttatataaatgagatcaaacaaaacacacgtttatgttgcctgtcatttgttcgttatgtctgtggcattcattcccattgttgcatctagcagtagttttctcatttaattgctgggtagtgttccatttacctgcatatactacagttcatcttttcttctcttgatgaatatttagattgtttccagttttgggctatgtggaataaagttgctgtgaacattctggcacacatatatatttgttataaaagtaatatgaccatgtggagaaaaattaaaaatcaagagaaaacaaaatgcccataatctcagtatcctctcacaggctctttaagtcattctaatccacatcccagggtagaagttgccatcagaagtcatgagaaccatgactccctagcaagaccaacccaacatttcctcaatgctgtgaatagaaaaccaacagagaagccactcccttttgtgatcttcatggcctggagtagtgtactgcatttaacctccatagatacccctttgtgctgcttctggcattttaaaaattgtctgccctgtattatggctagcagtaccctagtgctgccttccctacttgatgctgagctctttgacggcatgcagtgtcctgcgtgatatgtgatgtggagcacagcaccgagtatatagtgtttgataagcatttgctggacaactttttgattcccatgatcgggaacttaattttgtttttagaataagttttcacagtgtctcacttagttctcagagtgtacagatgtttatctgtaaaagggaagctrctgtttttatattntgtgtggtcagatgtcatctttatctttttcttctttccttctaaaggtgaataccagagaagaagttgaagatctttgccgcctagacaaaatgatagatctgatcattccacgtggctcttcccagctggtcagagacatccagaaagctgctaaggggattccagtgatggggcacagcgaagggatctgtcacatgtatgtggattccgaggccagtgttgataaggtcaccaggctaggtgagctggatggggtcttctctttcacaacggagaaatattacatcctctgcagctctggatcatgtcaatggaaacaattctttgctcatcttctttcagtcagagactctaaatgtgaatatccagctgcctgtaatgctttggagactttgttaatccaccgggatctgctcaggacaccattatttgaccagatcattgatatgctgagagtggaacaggtaagagttccataggactagtacattacttcctgtcttagaagcctgtggaattagaccaggcacagccataccatataaggcagtttaagaaacaatattttttaatatcttctgtgtacaaagttccatgctaagtaaagtgtgagtaaaacacaacccctgccctctagtagtcgaaccaaaccaatacacaaatagctttattacaaagtggaatgtgttgtgtgctaaagagggttcaaaggtaagacagaccacatggcactatgctgactgaactgtttctggcaaccttwtattcacgtgtcaaggtgttcccaagcatatattattttttggatttgatttgaaaagatggtgcagaaacgtttcaaaccaaaaacttatgtacattcactgcctccccccagtgtctttggttaccaatattagtgtacttaatgcagtgatatttgggattcagtaatttgtagaatgtctccctggattatgtttttactatattgttaaggttgtaaacaaaycaaaagccagtaagtttcaaatataaagttgtgctgtgtcctaaattcatgcctgcaagaaaatataatagatgccctcaaggcaaaaatggacaatctgttaaactctctgcatggatgcattttaagctttaatttctgatgtcatagtacactttcagagttatataaaccagcatggcagtagagaaggtgcttgttggccttggttgctttgactctgaacatatgtctcttcccttccatcctttgactggaaaggaaggctccagttagcttataaatgtggcatggtcccagtgagaackggaaagaattgttttaaaaatgaaactgtactccatggattacaaggaagttagatcacatggtcattcatgttcggggaccttactttactttggtaaggaagcctgtygattgggcacctgtgtttgccaagcaccacagtgaactggattagacaggaggaaagctctcctttagccaggactaaatccctccccagacctaatttgaacacacaagtggtatcctcagtcattaaaatgaggatggccttgaaattccaaatcaaaatgagtcactgtgtgtacttcatacagcacttttggatggcagaaagtaaagctagaaggatgacttgcacagggatggggttccagtccccaaggaacacagaagaagtgagatcccagataagaaacaatggcagggcctcgggaatcatgaggataaggcagacaccacttataacttgagccaaggcaaaagcttgatcccaaagaatcaaggcatgaaccctgtcctggggatgtctcagaaaacaaggtttaagtgggatccagcttgtgattgggatcctcggtgaccagcctcagaatccttaaattcctctaaccagcagcaggattagagccagagcctggggctgagctgaacctagaggtggggccagactgacgcagttggaaatcaaatgagtagccacagtttcaggtgctgaaagcacctgaccaagtactgcttacctctaaagcaaacctgggacttcgctagggtacagggagtagsaatgtatatgtggcacctccctttttccacacgagtctagtgcctaggtaccatatgcaggaactgggatctttattgtcaagtattcattttaggaaaatgccagaagtcaagcccttgtgttgataacccactaaacgccttgcacattcttttttattcttttttttttctttgagacggagtcttgctctgtgccccaggctggagtgcagtggcacaatcttggctcactgcaacctctgccttccaggttcaagcagttctcctcctgcttgaacctcccaagtagctgagattacaggcacctgccaccatgccctgctaatttttttagtaaagacggggtttcaccatgttggccaggttggtttttgaactcctgacctcaagttatccacccgtctcagcctcccaaagtactgggattacaggcgtgagccaccatgcccggcccaccttgcacatcsttaacgttcaaggcttcctgcttcaatccctgttccaactgtcttgagggcccattgctggcaagtggccagtcagatcatgctggagggaggaaagtaggactasttcagttgtygaggctacaggagccactttgggctgtggttttacaggctcacctttctgttctatcctagaacttgcttatttcagttgtttttatgttgttgcccctggacttcctctgttccaggtaaaaattcatgcaggccccaaatttgcctcctatctgaccttcagcccctcygaagtgaagtcactccgaactgagtatggggacctggaattatgcattgaagtagtggacaacgttcaggatgccattgaccacatccacaagtatggcagctcccacacggatgtcatcgtcacagaggacggtcagtgtccagatgcttcccgcwtacagtgtctgcctttgctgctttctgatcctgctcctcttagcccsccttgggctgcagaaaaacatcatttgagtaggcttatggtaatgtttagtagtggttgcatttggtactttgatgagtgctttcacatcactttattntattgtcacagctggaggaggaggggcagggatgattagctctgcttcgaagatgactaaccctgtcagaggcactatcatttaatgcgtgcagcaaatcttacaaggtagttaaaataaacccattttacagctgaggaaaccaaggcagaaccaactctgcacattcattcattcattcatttattccacaaatatgtatgcagggacactcctgggtgtcagatactggagcctcaatgrtggaggatgccagtagggccccaatgaggaatttacagtcagctaattagggcaccagagcagtaccacccgtattaacagccaacatttaccaagcactcactgtgtgctaggcactagcatgagtactccccaggtgtttcatcctctctacaaccctatcagctaggtcatgttgtaagtcccttttgacccagacacagagagttttgtacacctgcagaaggtcacaaagctagcaggtgtacagctggagttcaggcctaggmagtctggctctggagcccataagtaggaagtttaggcaggtcacctgcatgggagatctggattccaactcagtctttccacaacacygtgattgatgaagctaacttgtcttcttcctgttgagatttttcayaagcctgagtatttaatacgtgagaacacatggagaggccccagtggggacccagaccctgccctgatctgtcaccagtcaatggctggaaacagggatgttctctgggtatcatcctaacttggtttctccttcttcaccctgcagaaaacacagcggagttcttcctgcagcacgtagacagtgcctgtgtgttctggaatgccagcactcgcttttctgatggttaccgctttggactgggtaagaaagactctrgttgggaagaaagaagttccttgtgaagcactgtgtggtctaggggtatgttgaggtgggaaagacacctccccttgactgtcacatgcttggtcaagataagagagaaacaggctgggtgccgtggctcacgcctgtaatcccagcactttgggaggccgaggtgggtggatcacctgaggtcaggagttcgagaccagcgtggccaacatggtgaaaccctgtctctactaaaaatgcaaaaaattagccaggtgtggtggtgcatgcctgtaatcccagctactcaggaggctgaggcaggagaattgcttgaacccgggaggcagaggttgyggtgagcccgagattacgctacagcactccagcctggaggacagagtgagacaccatctcaaaaaaaaaaaaaaaaaaaaatagagacagacttctggcaaggtaggattatcagggagaataattaatgaaacctcccatgagttggtggaaggcctatcttctaagcatttcacatgctaagaaggcaggtacttgtattcatttttcaaagagggagaatgagattcagagaagtatagtaacttgcccaaagtcccacagctggcattcagacccaaacttgagcaagtccaaagcctgggttctcccgctacagcgtgggcaaccacagcctgcctttttacacaggctgcgccagaggtacatgctgtgtcccttgagagcactccttttacagacttatttcgtcaaaatggcacagccaggttgcctcggagataggaaaccccacaatggtaggacaaaagaaggtgccgtgggcctaagtaccagcatcaaaacaaacaggccarccagaagtacaaggttaccttctacagcagaccttgaaataaaaagcttcagaagggcacttctgtccctttccattaggtataaaatttccagccctctgtcgtgttggggttatttggacagtctctcgttttcaggggtaccagtatataaaactccagaacgggcgcagtggctcacgcctataattccagcactttgggaggccaaggcgggcagatcacctgaggccgggagttsgagatcagcgtgaccaacatagagaaaccccatctctactaaaaatacaaaattagctgagcatggtggcacttgcctgtaatcccagctactcgggaggctgaggcaggagaatcgcttgaacctgggaggcagaggttgcagtgagccgagaccgcaccattgcgctctagcctgggcaacaagagctaaactccatctcaaaaaacaaaacagacaaaaaacctccaataatacatttatgacacgttttctgaatatttgagaattatttcaaccactcaaaacattttaggccacgggcagtggctcacacctgtaatcccggcactttgagaggctgaagcaggaggatctcatgagtcggggagttcgagaccagcctgggcaacgcagcgagacctcctctctacagagatgaaaaaattatccaggtgtggtggcgtgagcctgtagtcccagttactcaggaggctgaggcaagaggatcccttgagcccaggagttcgaggctgcagtgagctaagatgatgccattgtactccagcctgggagagagtgaggccctatctgtataacaaaacaaaacagaaagacacacattttaatccttctgaactttttgagtagatgatctgcctggagaaataattctcaccaaattgttaaaaggttatgaaagggaatttaactcagttattcttaatcatgatactctttatttttagttccccatttgtattatgttgggattttgatgtaattatcacatcacttgcattgatctttatactctccatgtacttgaaaaagaaatagcaacatatttttaagggctggggcacccagcattcaaatgaaaatccaggatgaaggaagaacaaaagatcatttcattgtccttccaacaccagctcagagtgaaagctggttgagttaaattccttgtgaaatgcattaatgacagtaacagattttactgagcatttactacattcccagcactgtgctaaatgtgtcgcaagcatgctctcacttcattctacaagatgaattctcattttccagatgaagaaactgaggcatgagacataaagttaggtagtatgtccaaagtcatgtggtctgtatgctattgaaccagaatttgaatcctgctggtttcactctccttgccaaccactaccccaagcacatcccgcccctactgtgtctcgtacttgctcttctctctgcctgcagcacctctgtctggttttctccagccagctccttctcactgttcaggtcccaaccaaaaggcacttccttagggaggctttccctgaccatcctacccagcgtgtccccagctccaccacacagcctctgtcatagcacccatcactgcacttgagcaccacaggagactatttactcacctgtcctttggctgcctcgcctgctataatatcagcgccacaaaaacagggccttgtatctattattcaccactttatccccagggctcaacacagtgcctagtacatagtacatgctcagtaaagttgtgatgattgagggaaccctgcctccactgtatacagtgcagaacaccaagccagggccaggaaaacccctgacgttccctaggtctgagctgggagcaagaggaaagggaatgaacagtaaccctttgatgtattcagtaactgtctaatgagtcccttgtgctaagacttctaggggataccacaaacatgtccctttctttctaagatttaaagagtatttgaggaggtgaaaccatcatggtaaacattgtcgtacccctcaaaacatgcccaaatgtcaaaatatggtatgcaattcagatgctaaactgataaaagagacagcacttgtattaatagcattgtcaaaatgcactggggataaaatacagaagaagagtccacacactgtttcacgagaaggagtgtatcatgatttgtagtaatcgaagaacatgtttatgggaacagggtgactcagctctyctggggaggatggatgaggagttagcaggaagagagggtaccaagtgaggggaaagcagcagggtgggtctggggcatggacaggaagcagaggctgggaaaagctacatcttttattcatgctttttcacaggagctgaagtgggaatcagtacatcgagaatccacgcccggggaccagtaggacttgagggactgcttactactaagtggctgctgcgagggaaggaccacgtggtctcagatttctcagagcatggaagtttaaaatatcttcatgagaacctccctattcctcagagaaacaccaactgaaaagagccaggaaaacccgggaattttccaaaaggtcttcacgttaaacttgtcttatctcaggagagagcccgctcttgtctcccagttcctggtagggtctgcctgttggaaagtgtacctggatgcttctgggctccgtttggcaatagcartcttggctgatgtgcacagtctggctcccagctcaccctttttttttaaagtaagaaaatagttgctaccgrtagggactttgccaagtccaattatcttctaggattgaaaggtgcattttccccataaaaaaggcgaggaaaacccatggctgctttgtgtcacctcagtgacttacagtcccccttggcatttagttggtactagagccagtcatccttaacaaatcttttcacattttatttctttcacatgyagtcatcttcaaaaaggaaagatttggaattttagaaaaggggcaactcttctttttagcattctcatcagaaagtcacaaaaatcgatggaatcatttccactgggaagattgaccttttgtatttatttgtggggtaaattaataagcattccagatgcttgcagcttcctgcatccaggagatgctgtgttccccgtgatgcagctggaacccaagctgcagcaggagatgcaagtttcaggatgttccccactgagctggaggaatatctacagcagtgatgyttgaaatttttgtatgaattattttgtcgtcctacccttttcctccaaaacaaaaattagaggattattttaatactttggattcttcccccttttttgagaaataaagttttttatgaaaagcctgtgcgtgattgaagttttctcccttaattgttgttacccccttccttttcctctcttgtgaccctcgtgccctgcttgtgggcatggtctcttctctggaagctgtctggggagacaagacatctgcctcaacagtgtttgttggtggaagcaacataggcagtccccacagagggactcagacggagagacaggaaaggaaaacaggagattaagccccaagagcttgaagactaaaagtgcagtgaaggtctgaagttggtggggtccaacctgagcgagctcccgcggtggcacatagccccagctgacatccttagttcactgcatccccccagctcctctctgccagtcctgttgcctcaggatcacttgacagctcggaccctccccactctccctccatctctagctcctgtccttagggcccctggtgcctgacagtctgcagttgaaagatttcatgggggcctcctaaagaaataagcactcgcttacgatgctgctgcttttcctctgaggatgttttaccagcacaagaatgatggtgtcatgtggaacatgttcccaggctggctgcacagcctgcctctcctccagacccttacatggtctggcaagtcaccctgactgccctgccctctggatgaggagttctggcatagcttgcctgaaaaggctataaacagtcctgcctgaaactgtcacaaataccacaatgagctcccaaccagacaacaaatgcccaggaatcttaaatagaaggcagcccaagagagctggggcccttggggaagaccactgagaaggcaggcctgcatctgggccctgagaaagaccactatcatcatcagacagaaaccccaagcttcactcattaaactggcctgcatcaatcattgctataaatgcacacattgagttgaactgcatgccacagaaacttcaaagaattggggcttgaacttgatcattcctttttctctcatgtaaaaagagctctggaggtaggcagcttcaaggctgacttaatgcctccatgaaggccatcaggcactggggctgcttttgatttattctcttctgtcctagggtaaggctcttgtccacatggtagtggcattccaaccatcaggactgcattccagccagcaggaagaaggaaaaaccataggcagaggagtgtctgccagctgccccttctaagtgacattccaggaagacccccctgcccagtrcttgaccaaaactagctcatggcctaccctctctaaaagggatctgggaggtgtagcttttttatttgggcacattgcagctccaagaaagtaagggttctattggtaagggaggaggaaaatcggataggggaagaagattatcctaattgattcatggagctgagagcaggattcattcacctaaacagtagggctgctggggaataaaagagggctgggatggcggccagagaggtagccacaatgtcccactgcactgcctgacagaggaaatgggagggagaggtgagcagacactaaagtttcatggtgctatttgcagcccagtgtaatggagggagcactgaactgggactccagaattttttttccagctctgtcactgactggcattgtgaccttgggtaactacttaaacatttttgcctcagtttccacactcatgaaatgggagcttggataagctttctagttagatggaggtgtgggaagctcttcatcactaaattgcaaattagctgaacaaggtgttttttatatctgacatccacagctggccaagtctttggtaggcattgaaagcaaaacccaacatcactgacccgctcttcacacacacacacacacacacccctctgctatttgctgtatatgtgggcctcagactacttcaaactgtggttcaaggatcattgtaacagaatgaccacagggcctagctaaaactgtagattcccgcacccagacctgctgagccaaaatttctgagggtggggcaaagaattggaatttttagccccttatatgatttatctcagcattaccactactgtaagtaacctgagagttttgtttttcttccataatgagaagtccagaagtagctcaagaccaacggggcaactctgtgatgccattaggaacccagactctttccaactttcagccctgacattcttaactccgcagcttcccttgcaccatgatggctgttccatctccacacctgtgttccatctatgtcccagtcaggaagaagggcaggggaaagaggcatgcacagctgagttcgcccaacacacccacatttaaagagctctcctggaagccccagtaagtgacttcccttacatctcatcaggaggaactgtttattgtggccacatgagcaactgtagctgcaaggactgggaagtagagttttacagctgggcacattcctgctcaaacaaaaatcaagatcctctttgtgaggaagaggagaagataaaaatcgggtaagctactacattagggggtagcgatgttaggtacagttacccctagtgactttccaaagagattttcttggaaggctcttttgttcccttgaactcattgatgagttttgtaatgcgggtttaatataggaaagctgaagtgctccataagaggtggagaaaagacaaaattcccaggcagttttggagaggaaagagtgagttgtaggccggtgcagtggctcatgcctgtaatcccagcactttgggaggccaaggcggatggatcacctgaggtcagcagttcaagaccagcctggccaacatggtgaaaccttgtctctactaaaaacacaaaaattagccgagcatggtggcaggcgcctgtaatcccagctacttgggaggctgaggcaagagaatctcttgaactgggagatgggggttgcagtgagatgagatcgtgccattgcagtccagcctgggtgacaagagtgaaactctgtctcaaaaaaaaaaaaaaagtgagttgtaaacttgccctaggcagaggctacagactaagggtcagtaggaaatgaggctagagaaagctaaatgtaagaaacaaagtataggaaaagccatctatttttaaactgatggcttgatgggggttgttatggactaaatgtttgtgcccttcccaaattccttcgttgaagtcctacccctcaatgtgatggtgtttggagacggggcctttgggaggtaattagggttagatgaggtcgtgagggtggggccctcatggtgggattggtgctttcgtaagagatgccacgtctctcaacaaactgttgagtaaaaagtaaaataagagactctagagaccttgacctcctgcccttcatgtgaggacacagtgagaagacaaaacagtctcctgcaagctaggaagcagggccctcaccagacaccgaactggccagcaccttgatcttggacttcccaatctccagactgaaaaataaatttctgttgtttgatccacctagtctatgatattttgttatggcagcccaagcagacaaaaacaggaataattgtcttggagatacctgcattttagaaaaggagtcctaatatttcaaagaattggccagagtggcatagtggaaagagtatggatttgggagtcatatgacttgcactcccatctataaattgtaggaatttgcaggattgttttttgctgcaatgagcctcaatttccttatttggaaaaaagtagacagttaatacttaccttgaagactcctgtcagtaaataatcagataatggaccggacacctagctcatggaagaagcaccatccaggttggccacaattagccacatctggcatatctgtctttgtatcccccactgagcccagcaaggtgcaatgcacacagatgctcactgagtagctttgaaacaggctacttgggcagagctatagagatggagggggctttctctgagatccatggaccattagggacactggtatgaggctggcagtctaagacgatcaagtcgtccctgaccccaacttatttctaaaccactgaagagtgtcattgttctctcttccttatgaaagtgtcctgtggagtctcctgtagtagaattgagttaaatgttacaatgtcttttccactagcacttctggcaaaaatcgatgaataacttcataactaccttaagggcacctcatttaagtttgcagatctctgctattttacagaactctgctattagtgagaatgagattttaaagcctcattcagtatccagtgagcacccactacgtgccagatgctggggataagagacattccctccacctgatggtccaaacgttgatctgtctgagaattgctgctctaaattcaggtaattcttatccttaagtcccaccctttacagcctattttaccctaatccctaggagaaaccctttggccaataggaaaacaccaaactaggcagctatgatcccatactgaaggcaggaggagtcaccataacctaagaaaaccaacttgctctttattccatctggccccaggattcctctaacgctagagggcagtcgggtcccatggacctaaggaagtcggcctgctcttcctcaatgcccagcaaattatcccctcccgatcctcaggctgctctcctggaaatgaagtgctggatcagtaaaataacttccggagatcctcttccttacagggtaagagcacaggccttttcagtttagaggcagaatagggtttggaccttgattctaacacctactagttgtttgacctggggaaagtgtcttaacttctctgaattttgatgatacgtatccataaatggttttgcgagagtaaatgtaaagcactcagcacggtattcagcatatggttaacctttaataactattggctgttactgtttacgattctaaggaatggctttctcttagttttcaacattgcttttttttttcccctttgagacaggggtctcactctgtcacccagactggtctcaaactcaactcctggactcaagcaatctttctatctcagctcctgaatagttaggattacaagtgcatgccaccgcaccaggccctacgtttctcttttatttaaagtccaagcatcaattcctaggacataaagtgaggacattcttaggacagatctactatgtactaagcaccatgtactaagcatcatagtaagggggctagatgaattatgcatgatgccacaataatctgagtaggggaattgttacccctattttacaggtatagaacctaaagatcagtaaattccccaagatcacactgtagcggaggaacctggatttgaacccaagacaacagagcttcaaaactcttcaccaccacagggggcatagcagtagtgttttcccagaagcttcttgtaccttatcccaaaggcaagttgtaaggctgaagaaggaggttgccatagctactaactggaccccttttcacgtaatcagatcctcagtctgccccagttttgcaagaggagctgcttgtctggaaactctcctcaacacctgcccctggagggagccgactgtgtctgaattatttagagagtctctagacacttgatataatgagcaggtgtggatgcttctctgacttcccccacatgcctttacttacctcctttcccctcccccaagttgcctatgaggaaaaaggaggcatcatccgtttcctcactgtagatgtgtctgcctcatcttcatttttcatcccgaagtctgtttgtaagaagtggaccactttctttgcaaatatcaaaaatcatattgatttccattgaaattggtggtgtaaattgaccctaactagtaaatgcataacttggccaggagtggtggctcatgcctgtaattccagcatcttgggaggccaaggcaggaggatcgcttgagcccaggagtctg

SEQ ID NO: 95721 - DNA, 51517 bp, Homo sapiens
  misc_feature (1)...(51517): n = A,T,C or G
tggagcttgaggcaaaaggaaaaatacaagctcctggctttaaggcaagcaaactcattagtcatattttcaaaactaactgttttgcttatttcattttgaattgtaagattgccacgtttgacagtttcccttgaccaagtgatgatcttaaataaattataattaactaaggctgagaccgggcgtggtggctcacgcctgtaatcccagcactttgggaggccgaggtgggcggatcacgaggtcaggagttcaagaccagcctggccaatatggtgaaaccccgtctctactaaaaatacaaaaattagccgggtgtggtggcacacacctgtaatcccagctactcgggaggctgaggcacgagaatcgcttgaacctggaaggtggaggttgcagtgagctgagatcgtgcgactgcattccagcctgggcgacagaatgagactccgtctcaaaaaaaaaaaaaaaaaaaaaattaactaaggctgaagtaaaatcataataaattccattttggaacaaataaaatatttaaagtaatgctgtgagttttaatacacctatgtttcaagttttaaatgttttttcaactactttaatgctctaggaaaaaataaccattcaaaaaatacagaaaaatatgtatgagggtatatatttttcttttttccttaggcttcaatatggcttagaaggaaactagtcttttttttttttttaaataaagatggggtctcactatgttgcccaggctggtcttaaactcctgcgctcaagtgatcctcttgcctcagcctcccaaagtgctgggattacagacatgagccaccaggcccagctgattctttattttgaatttttgatactttgtccatcactgattttttgcattaattttgatattttttaaaatattgcattaaagtattatttatcttggttactgagtttttagatgcccccataaattttgcactcaagagaagtgccctcacttgccttaccctagtcctagccctgctccttcatagtcatttttacatcaggctcccctgacaaactatgggtgtctggatgagacagacatgacttattatccttgtatctccacacctgacctagcatagaggctaacacatggagcactttaacagcattttattgaagggaggaatggaggaaggaaagaagaaaaacagctaatattataatggctaacatccaaatttcaactgactgcttattgtgtaccagatgctgggttaagcactttgcttatttaatcttacaacccaatcataaaaataacatatccattttacagatgaggaaattgaggcacacagaaatgggtgaattgtagcgcatgagtgattatggcagaactaggagcagctctgcttgggttccctaaaatatttctcgctttaactgtttctctcctgagcatgggaatgagatgaggagtaaatgtgaatatgcaggaaagtagagcagcagatgtaatttagaagacccaactctcacactttcatgtgttatctcacttgagcttcattaacaaccccgggtatcattaactgcacttcacagataagaaacaaagaggtagggagggagtgggagactccgttgtttccctcagggtagaggagagtgggtgagatgagaggtagtgataggacagagggaggttgaccagctggcctcccttctaacctccttggcaagttcacggcatcccttgcacactcccctagctaagtggagccagcacctccccctgaagggcaggtctccctcactctgccccaccagaggtgggtatcccctcaccagggaccgtgtggaaggaagagactagataaaggccagggctggtgtcaacggcctcacagagctgcctttgtcacacttccactgttctgctcccctccaggtttcctgccttatggtggggaacacccttgatgcacactcatgtgaaaagtgaaactcagaacacccaaaacccgaatctaaaacagccaagaaataaaaataagatcgtgagaaaaaaaaaaaagaaattcataggacttcctgagaaggggtcatcctgggtctttgcagttaacagaatctagacatgtcctgcagaagcgcttatgggaactttcagtcaggaatatgcacgggaccttggacccaaggtttctggagatagagacaatgtctagagaggtgggaaatggagctttcactgtatacattttcatagtgcctgacttattaccatgtgcatatataactttttcatttttattttccatttcatttacgtataactttttcatttacagaaacccgttttttttttatttatttttttcagagacatggtcttgctctgttgcccagactagaatgtagcattgcagtcacagctcgccgcagcctctaactcctaggctcaagcaatcctcccacctgagcctccgaagtaactgggaccacaggcacatgccaacacacccagctaattttattttcattttttcactatcatatatgttttttaaacttttaggttcaggagtacatgtccaggtttgttacatgggtaaattgcatgttgcgagggtttggtgtacagatgattttgtcatccaggtaataagcataatacccgctaggtagtttttgatcttctccctcttcccaccctccaccctcaagtgggcccccgtgcctgttgtatttttattttttgtagagacagggtctcgctgtatcaggctgaactcaaagtcccggcttcaagtgatctcccacctcagcctcccaaagtgctgggattacaggcrtgagccaccactcccagcctaaaaaaccatttttcgaaagttgcctgtaccagcggaggcagaaattgcagtcactattctgtggtggctcatctgcaaaccttcctggcttggtggagaggaagcctgcaccgtccttcctgttaggagagaacagctcagtgcatgacacattaggggtgggtcacacatcctgcggactcatgaacctccaaattaggcagctaattattctgaggattccaagtcacatttaaaatcagcgtcagctgaagtaaaatcagatgagtaatttgcttccggaatgcgaaacacacaacgcagactgctgctacttcttgggaagctgggcccggccctctcaggagcaccaggctgggggtaatggccatgaccctgtcctgggaaggaataggggccattcacctcaggttaggttgggtcctgactaaggtgcaagactcacgtcaggatcacacaacccctgagggtcaaagggcagaggtggaggaaggacagagcaaagacggtaggtccgacctgtacagggagtgttcagccccaagaagagagacatgaggggcagcatcccacaatcttccacaggaagtgccctcattctgagaaagacagctgtcaagtaaggcacatgacaagaatagaagcagctggggcagtgaggtggaatcagagtccagagggtctacagatgggctaagggatgctcaaggaagctctgtagaaagtctctctaggagcttaaagcccacggcctggaatgtgaaaggaagggagttggtggaaggctgcttagagttaggggagtcgggcatcatgccaagagtgagcagatgaacccctttctactcctgggagaatgtccatccttcacgtcactctgatcatgtgtagctgggcaactcttcttctccacactctgctggccttctctcctgactccatcaaagaacatctcaccttctgaatagatcaaacctaccttggagtctcaggttagaaaaaaagattactttcttcattcacctgttaacacccggctggcttccctgcctttcccagtgcgtgtcagaacttcttgctaggatctactcactcatgctcctgctcccaggtcttagggtcttagaaatacaaattcatggctggactcggtggctcatgcctctaatcccatcactttgcgaggccgaggcaacaggatggcttgagcccaggagtttgaaaccaacctgggcaacatggcgaaactccctctctacaaaaaaaagttagctgggcatggtggcatgcatctgtggaggctgaagcaggagaacagcttgagacccggaggtcaaggctgcagtgagccgtgatagctccactgcactccagcctgggcagtagagcaagaaaagaaaagaaagagagaaagaaagagaaaaagaaggaaagaaagagaaagaaggaaagagagagagagaaaggagagacagagagagtaagaaagaaagaaaaaagaaaaaaggagggaggcggggcagcagaaagaggaagaaaacagaaagaaagaaagacaaatttatttaaatatcaaaacaaaagagaaactgaactagtggtagaagtttctaccatagaaagttttcaaattattggctatttggagtcatgcgcgctccttctctgttgctaaggccccaaaagattgcagcacacgaggcagcgccggagaggaccactgagcagcacgggccctggcggggtaattccgaacaccggcttaggaggcgggtttaccaggattctcattccagccctgccactaattgttcagggttctcaaggtcgagcatgcacaaaatcacccggagggcttttaaaacacaagtcgccgggcccaacccgagtttcggaatatttaggtctgcggtggggcccatttcttttcttttcttttctttttttctttttttttttttttgatacggaatctcgctctgtcgccaggctggagtgcagtggcgtgatctcggctcactgcaacctccccctcccgagttcaagcgattctccggcctcagcctcccgagtagctgggattacagacgcccgccactacgcccagctaatttcttgtatttttagtagagacggggtttcaccatgttggccaggctggtctcgaattcctaaccttgtgatccgcccgcctcggcctcccaaagtactgggattacaggcatgaaccaccgcgcccggccaaaatttctaataagttctcaggtgattctgactggcgctgctggtgggggatcccactttgagaaacaccctctgctgtgtgagcagctgcctccccggtacattcggaataatcatagtaggtttaaagtttgctggggctgggattcacctgatacctggcacttggagcccttgacacagttcatggcacacggaatacgagctcttgttggatggagcacaaatgagaagcaaacctggggcaggaccccggggcccatggccgccccgccgcgtttccccctccggggcaggcctccgggctccgagcgctccaggctggcgcgcagcacattccggttccatgcacccgccgcccgcggctctgctaatgcctgtcctctttggggtgactaggaccctccaatctttttccgcgctgaaagcctggccgcaaagaccgcacccccggggcgggctgagacgcagagaagccggggcgcccctctgccggtccgccgggagttcccgggcccgcagcaggctgaggacacggcgggacccgctgcacctggccagggaggggcggggcgggcgcgttagtgcagctgggggaggtcccgccccggtcccaccctcccggccgtccggtggggaaacccgggagccaccccgcggcgcggctgcggctttgcctcggcgcgacaggtaagcggcagaaggagcccgcgaccctctccccgggagggcccccctgagctccccgactgctcggacttcccttcggcggatctcgcttctgccgagtcctcgctctcacctcctcctccgccagccttcgcctcttcctcttcctcctcactacccccgacagtaaaatgaaggggctgggccaggctggtccctcctgccttcgctctctgctggtcgcggtggcctgtagctcctccctcggtaggacccccctccaccttggcgcttamgagatgaatgaggagcccagacctctggaacttggaggggtgagagggggacaagccagagccagggctccacaccctcttcccctcacccacccatgccctgcattccttctgtgccccgtctccccagatcgggccaccccatgtgctctggtacggcaactcttgcagagaggtttcctcctgccctgccacgttgcgcctgagcagaaggggacagcaaggagaagcctcgctggtggaggtcggtctgagccctgcttggttgaattccctccagagcctgggggcttttgggggtgggaagggatctgcctcctgctgtggggaaatggaatctgctgggtgttcatgactgtgactgtcaccgacttccctatttcctcagttgttcagattcccaggctgacaaaaaggagaaacagcttttacttgcatccagggccaatcatcgcagacccagacgtctgcagagggtaggatggggctcttctgtgtatgggggtggagggtggtcagtttgcccacaaagcttacagcagaccccttctagcagccgacaacccattgcagcactctcagaaaggatgttaactctgtgctctgagctcgcccccaggcccacacacacaatttacaggcactgggtgaggttcatagttctggacacaccaaagagcctcgaggacttttgcgccttctaccagagatgtgtgtgcaccacacaggccctattctccgctccagacagatgagctgtctcccttcccatcaaaggaaaggttaagaaggatgagacagggaaattcatgtgatgatgaaaaccaggtcaggtgaggggtttgaaatatgctttggttccggccacatgtggtggctcatgcctgtaatcccagcactttgggaggctgaggctggtgcatcacctgagatcaggagttcgagaccagcctggccaacatggcaaaaccccatctccacaaaaaatacaaaaagttagccgggcatggtggcaggcgcctgtaattccagctacttgggaggctgaggcaggagaattgtttgaacctgggaagcagaggttgcagtgagctgagatcrcaccatwgcattccagcctgggcaataagagcaaaactctgtctcaaaaaaaaaaaaaaaaaaaaraagaaagaaagaaagaaagaaatatgctttgattccaattgcctagcaggagccagtagcattgcaggcatttccctagytccagttccttaatggtgccatgcactttaggaacccagaggtaatcagagaaagttscttccaggggcaccagggcagagaacaggacaagaccctcaaaagaaagagggaagtgtgcaggagactgggctgctcaagatgacctcacctcagtaatgctgcccacagtcctacagtgggtggaacagctgactcctaccygtagcagcatggaagaactcagggcagagaaggggaggccctgatgtgtgtcaggtgccctgtgaggtcagaaacatatttgcccaagttcagctggaagaagtggggacaggaaatatgagcatgaacttagtccatgcaaccattgcctcgaacagacctcaggaccaggaggggcagctaaccctagggctgagggcctctcagtgcagggaggcagtgagtatcatgaaggcaggcwgctgactcagccctgtcactaacttcgatatataatcttagccaaaacacataaacactccctgggtggggagcaaatgagaaggtgtatatgaagtgttttggcaaagctccaagcaccagtcaaatgcaagacaatgtgatgtcatagttaagagagtgggctttggagatacataggcctgaatgcaaattctgcctctgccacatttctagctgtgtgaccttggtcaagttacttgacctccctgtgcttcagtttccttctgtgtaaaacagagaagataactgtaacttgatttgatatggtaagcagtaatatttaaaatggtgatggtattcttcttaacattttctggctcccacggatgtgttccgacatctcagccctggaagggatgctgaagaccaggttgggtgtgtccatgccgtagcttgggtgaactcagctctttacacagtcctctgcccctttctgggaaagcccaaatgttcattctcatttgataggaacgagagtgaggatttgaataagcaggaggttaagtgcagggcagtgcctgtctctgtgtcgagctcaatgttgtaattgtgctgtgtaaaaggcctgtgtggtgaacaagggtgagctcactccagggaggagaaggactgttagaagacttttgtggcacctgacagccctgtggggtcagcttattctctcgtaccctgaacaacttggtcctaaggcctaggtagagatttgaaggaagaaagcaacccagtcctcaactctgcacgtaatagagaatgaagaacagactagcaaaatagcattgccatacatctcaaggcagagagatgcgacagggattggaaggccaggtagattggtcaggaagaacattctggagacagaagtttggggaccaagactcaaggattgggaaggagaaggaaataggatctaggtggtctaccgtctaggcctgttggttctcccttctccatgatagttagtggggaaatcccacgtaaggaaagcacgggtagtagagaaacttgggaacaaataacacctagaaactgaggcagcaagatgcaccttagtctaggaagccttcttgaaagaggggagtctctggtaagaatttgaamgaaaagaaatatggcttgcttagcaagaatataagggaaaggctttgaggaagaaaagatagccagtgagtgccaagcatctggttgggcttgagggtgagcagcaaacaggaagcaamccggccagcccctctgtgtttctgccacagtcaaacagtgctcaaggaatatgaatacggctgtcctgattgtgaaagagagagaggggcccgaggcaaaggaggctggcaggcagctcctgctgatcctccagatgctagttgataaaggcccaatttcaaatgaaggttttgaaagcagaaaggacagtgaggaacccggaggcagggaatgaatcagcaggacttgggagcgggtgtggggtgaacctgaaattgagacaggattaaaaacgacctgtctgagagtgggacaggggctggcttgtttcacggacttcaatgcttctggcagcaatsgggaaattgggcaggctggctagcagaggaggctgggcacagaccctgagcccaggggatggtacattgagtagccagtggccccgggtgaaagttctgcagccaagagcagactgggggatgaggagaaaaggaaaaattcaattctagtctctcccattaagcccccttcccaatttgaagactggcccaagaggccttcgggaatacccctcctgtcttccacccttctcatcacttccctgtcccttctctgtcctttcccccaactctccccctcaagcccagtctcgttgtcaccaaggcttctaggtgattagagaatcccacctcatctccacctggaaccctccctccacttctgcactcctagggataaaccgttgcacacccctgccccacctggaagggcctacagggtctccagtgaaaaacctgtgaactgttgaacctcctgtttggtggcatattattttgatttttggtgactttttcttggaataagtcaacaaatattaaccaagtgcctaccacatgccaagcgctgctctaggtatacagtggtgagcaaagttgggttgagtttttcaatagaaaatccatgtttgggtaatttaagcttaaaatatcatgcaaacaggctggatgcattggctcacacctgtaatcctagtactttgggaggccgaggcagacagatcacttgaggtcaggagttcaagactagcctggccaacatggcgaaacactgtctctactaaaaaaatacaaaaattagccggacgtggtggcgggcgcctgtaatcccagctacccgggaggctgagggatgagaatcgcttgaacccaggagtcggaggttgcagtgagccgagatcccgccactgcactccagtatgggcaacagaatgagactccatctcaaaaaaaaaaaaattatgcaaacataaaatgaaccttgatatgttgggggaacttgacagactagctacagaaataattttcagcgtatcttcctgggaaaataagccacagtattgcagcttgagtcttggagaaaagctgaagtgtcttgaaggtgtaattacggggaaaaataaaaacctcccacattctgtgatcaaaagggtcaggggtgggaggagggctttggagaagataatttgctcttctgttcacagtatgartacagaggacttgagatgagtgctgtgtttgatggagagaaagtgcttatgaggaagaaaggacggtcatttggccaaacagcctctcagccccatttcccccaacagtagtgtgaaattaacctgccccctccccaatatgatgtctagctccacacacctgtgcccgtggtaagagtggtgacagttatcactttccaaagaaacttgtaattgagccctcctctgagtaacttgagcaaatatcgctgtggtaaggactgcttgcttcctgctgccacgtctaaggaggtgaccagctcacctgataaatagaaagaaacattgttacaaagaggccacctggaaagctagggcatgttctggatggctgactctgacattcacaaaagctaaggctgcctgggacttccagtctccacatctttaaagcatttgtatccttgagtgggaggaaggcaaatgccaggaaggggatcaaagggtggagtcggggaggctcagggaggacaggcctggtccccaaattccctactcaacctccacgggtatgagtgtggtaaacagagtagtggtctaggagttgagagatcgggttctactcctgggagccactagctgtgtgttgctagagaagtcacctaaccattctggcctcgccgttgataaaatgagggtgttagacccacagacagacctagtcaaaacagcaagctaatgtgtaatggcagaatatcctgtaagtcaagtatttcttgcagtaagttcattcagaacatcatttagtgaagccagtgctccacatttaacccttccaacctcatctcatttaacaagagtttgtggaactagccaggcctgatggcacgcacctctgtattcccagctactcaggaggctgagataggaggattgtttgagcctgggaggtcgaggctgcagaaagctgtgttcatgccactacacttcagcctgggtgacagagtgagaccctgtctccaagagaaaaaaaaaaagtttatggaacacctgctatatgtaaaacttgtgctagactttgtaggtgataaaaagctggaaatggcatggcctctctggtccaggagtccataaacacagggtgggctgtgatgagactggagtacaaataaaaatcgggtgctaagggggcaaagcagggaagagatgaattctgctgggagatctgagaaggctttttggaggggggctagaatataaactgtggggtttggactgtgtcactggctttcaaacttctatgacttgaccaaagtgagaaatatactttatagcgagacccggtacctgtgtatatgtgacagggcatcccaaaaatcttagggcagttttataatttaatcacattacaagcataaattctgcaaaccataaaaactatcatttgaaaatggaatcatttaaacttcttttgtctttagttgtatgaattttgaataacaaatttatcattttaattttgtatcaggcagtgtgtatctttaatagactgaaacaaacattaaaataaaagtttacttttcaggctggacatgatggctcacacctgtaatcccagcactttgggaggtcaaggcaggaggattgcttcggcctaggagttgaagaccagcctgggcagcatagtgagacccccatctctaccaaaaaataaaaattagccggtcttgatgacacacacctatggtcccagctactccagaggctgaggtaggaggatcctttgagcccaggaggtcaaggctgcagtgagctgagattgcaccactgcactccagcttaaggaacagaatgagaccctgtctccaaaaaaaaagaaagaaagaaaaaacgaatacttgcctgtgttacatgtgatacatgatgcactttgatattttcttttcattctattctgggtttttaaaatttatttatttttattttttgagacagggtctcgctctattgcctaggttgtagtgcagtggcatgatcataactaactacrgcctcaacctcctgggctcaagcaatcctccagcatcagcctctcaagtagctgagattacaggcctatgccaccacacccagctaactggtctctttttgctaattggtcttttttttttttttttttttgagacagagtcttgctctgtcacccaggctggagtacggtggtgctatttctgcttactgcaacctccagctcctaggttcaatcaactctcctgcctctgtctcctgagtagttgggattacaggcacmtgccaccatgcctggctaatttttrtatttttagtagagaaggggtttcaccatgttggccaggttggtcttgaactcctggcctaaagtgatctgcccaccatggcctcccaaagtgctgggatttcaggtgtgagccactgtgcctggtcctaactggtcttttaaagaaatttttgaatgctaatttgcaacactctgaatttattttataatatcacagtggattgtaatcagcagtttgatacaagctgggctgggtaaagcctcagttccttacaccagtgagagaaggtaagtttgtgttctggccggtggggccagggaagcaaatcccatttgttcaatctaggcaggcttttcagagaggatttctggcatcatctcgggatcaaagccaaggatggtccaaagagttgcaggcccaagggtagctggaggaaaaagacttgggaagaagtgctgagccacagcgagagggaaatgagtggatgggggctgcgggcacacttgccaggaaagcaggaggccaggtgtgggagcccaaaggtgagggagatatacaagacaccaggggcggatctcgtgaagctttgtacttgaaacaatagcaaagaatagcagctattctttctccaaggctggtggaggggcgacctccacgaccttgctaaccatacttctgggaatcatctcctacacagggagcaaaaatccttaaccccaaagtcctgtggcttgcactagattctgtgtctcttctaagggactcttcctgttgccctcatgctaagcaaacaaactagagaatgagtgcctcaccaccaaggctaatcccaggtgtctcatttcggttcaggatgtggttagtaccttgaggaactgtaggtttgagagagaaagcttcaggcagccagatgggattgagagattagatgcctaggaagagctcaatttaaccctatatttctttctccagggaaaataaaagaagcaaaaacaggccctgctgtgagggaccacgaggcagtgccaggatgaaagagttggagtaacctaggtgattctgagtgaatcagtcaggaggccttcctggagggggtgagtcttgagcactggcaacagttagtaactacaatcttaccatgcctttgtttctaactgtgctccctctttcttgctggagtgggaaggtagatggaaagtagcagggaagaygaagcctgcaggacggttcaaagctgtcatggcaaacactcccccattctgcaggcctctgtgtgggcttagccgggacagttccagaactgatgaggtgtctagctcaagcaaatccccctgtgctagccccagcatagctcaacctctgtgacaagaaactcctgctacactgaatccccatttcctccccgaagccttcctcaaacccacagggaactctacctctctcagcttagctcttactgtctgtgctattctgctttaattttattcatttttgaataagtaatatagtcagggttcaaagtacaaaagagtattcagtgaaaggtccttttcctgctcctgaatctcccctggtcaggtgcttccttcacctggtcagtgctatcagttctcrttctccaataagattttcaaatcccttggggaaaggaattgagcctttgtgtccctctgtgtaccagacggggtaaactgtcccaccccatcacccaagggggtcttcctaggcaccataccctccctcttccatccacactgctactaactctcctgggtcagactccgaatgggtcatccagctgccaagcaggtccctttccaagataccctccaccgctgtcatatkgctcttcctgtaatgctgggctcccagcttaacgctttattactccccatgccttgggtcaagggcaaatgctcctcagcatgatgaacaaggcccttaggacttggtttcagccacctctgtaggcccaatttctgctactcctgccataccagactgcttacagttctgtgactggctcttctgtctcccacctctagaccattgcaggtactgtgccttctgcctgaaatgtgctcacctcgcctcgctgactcctactcgccagttagtgttcggcccatttctgcccccgtgagatttcttcacagatgttgccctcccccatttgctgagtttcctgcatgccggctccttcagcactcaagggtacctctttgattctgcttctcacagggtaatctctgtttaaaatctgatgcccccaattgactgtaggatccttgagggctggccttgcacttctctgtgtcccccgcctcttgcagagtacctggtagaggcagttattcagtaaatactggtggaataaacaaatctctcctatctcctagacaatagttaatacaaaatagatgctcaaagagatttcttttgtttgatttttgacggtgctgctgaatctgatgttataaaagaagccacatttgtaccccagtccagaatgaatccasctccccacttgagatcacgatggccacatactcccaaggtctcagacaccaggcctctccacaggcaggagcttgtgcgtttaaacaatagcattaaatagtacaaccagagttatttttaagcaaaacatgcagggagtaatgaacgtggctttggccaagggccaggtgcttgaggataactgctgggaagtgaagcagggatttatcataataatagaaatagttgataccatttattgagggcttagtgtgacaggtgctctgccaaacattttacctacattatctgatttaatcctccccacaaccctgtgagttaggtattagttgccccyactttatagatgaggaaattgaggcttagagggattaagtaaattacccaagggtcacacagctgctaatgatcaaaactaacactttgtgggaacttaccatgtgcagagactgctaagctttgtccatgaattttgtggggaaggagcataatccttgtaacaaccctaggaggtaggtgctactactagaagaggaagaactrgaatttgtgcccaggtcccttgccattgatgtctagtgcttaaccagtgarcttatgtgtccagaactctgcacagaaagttctgcaagcattcatcctctagggcatggatccacatgcctgggggtggagcctggtgaacgcccatgcccagccctgccgggaatgtcttgtcatgaaatcttaggtttctgttaaattcttttttattaaataggagtagattacagataacttttatttatttatttttaaagacagaatctctctctcgcccatgctgaagagcaatggtgcgattatagctcactgcagccttaacctcctgggctccagcagtcctcctgcttcagcctcccaggcagctaggactacaggtgtgcaccactacgcctcgctaatttttaaaattttttattgagatgggctctcaatacgttgagcagactggtcttgaactcctgggcccaagcgatcctcccacctcagcctcccaaagtgctgggattayaccatgcttggccaagaaatatttataaaatacgtatagggtctaaagaattacagtccaccagcagccgccatccactttgagaaaaaaacactttgaagtcccccattaaccatctctaatcctgtaccgttttcttcatcttcagaaactggttatgtcatttctttagctttctttttttcgtggggagacggagtcttgctctgttgcccaggctggagtgcagtggcatgatcctagcctactgcaacctctgcctcccgggttcaagtgaytctcctgcctcagcctcccaagtagctgggattacaggcatgcgctaccacgcccagctaatttttgtatttttagtagagacagggtttcaccatgttggccaggctagtcttctttagctttctttatagctttatcacatatttgtattcaagaacaagatattgtttaattttagcatgtttttacattttctataagtggaatcatactgtatgtatccttttgtcacttgcttttttcacccaacaacacatccacattgttgcatggagaagtggttcattcttggtcatcactgtagagcactgcacggtatgggtattttgcactttatttattcattctgctrgtggacttaaaggttttaccagtttgttgccatttaagtcagtgttggcttaaatgttcttgtacatacctcttggtttgcatctaccagagtttgtctgggatataaaatgaggagtggaattgctggctcaggctgtgttcatttcaaatttttcttgataataccaagttgtttcccaaagccataatgattaaatctcatgagtttaatgattaaatctcatgtagtgtttcagtgttccagtgactctagatccatgcatattaggatcttagggcaggaaagaaacactgcctccggtctcctcattttatggatgaaggaaatgtagatatgggaaagttgtggccaataaggtgatgccaccactcagcaacagagcctggcctcgaaccccaagcacccgactccctccttaccctgtgttggctcacttctctctcttgtcccctcctttctcaggctgaggccccagcttgtggccaccacaacgtatcaagctatctccagggttgggctcaggactcagagctgacgcagctggggtgccccttggttctggaggatgaggctyctccgcagacgccacatgcccctgcgcctggccatggtgggctgcgcctttgtgctcttcctcttcctcctgcatagggatgtgarcagcagagaggaggccacagagaagccgtggctgaagtccctggtgagccggaaggatcacgtcctggacctcatgctggaggccatgaacaaccttagagattcaatgcccaagctccaaatcagggctccagaagcccagcagactctgttctccataaaccagtcctgcctccctgggttctataccccagctgaactgaagcccttctgggaacggccaccacaggaccccaatgcccctggggcagatggaaaagcatttcagaagagcaagtggacccccctggagacccaggaaaaggaagaaggctataagaagcactgtttcaatgcctttgccagcgaccggatctccctgcagaggtccctggggccagacacccgaccacctgagtaagtagcacccagagtccttgtggggagaccagggctttgctaaaggcatggctagtatggccagggccatagatcaagggccagagaaagagttgaagggaattttataatatgggcaaggatctcctctatgcctcacttctttcccagaacaactgtgctgatcccaggggttgtgattcaagggtattatggtcaggccagaggcccagggagacctgtgagagtgaaatgcaattatgaaagtgagatgatgtggaagaaggaactcagcctggcaccaggacctggcacggggtgactggggagacctgataccaagctgtggtttcagtagctttctcctctactgagkcctgctccagagactgtgggactctaatgctgagctgtttgsrggggsggtgggcatttcttaacagcaaccctggtggttaggaatatcctcacacctggtttcctccagtgaaggcccacaaggccggaattgattccaacctttatctgaagttgtttatagcctcaatcttgcacaatgagatctcacttagatctttgagtggcagccccctccctctaacgcccccatggctgcattcccatgatcctcaagttaaagacagtgtgtcttccccacttagcctttgtcttttccaggtcaagtgttataccctatttggccttttctcaaatggcagccctcatccccagatttcgtgagtctttagggctgtgaacctgaggttcttgagacttgagccaagtatgatagccctagaacaaggggccacttgaagctatcaggaattcctcagcagagaagggcrctggggccaggcacagtggctcatgcctataatcccagcactatggaaggctgaggtgggtggatctcttgaggccaggagttcaagaccagcctggccaacatggtgaaagcctgtctctactaaaaatacaaaaaaattagcccggcatggtagtgggtgcctgtaatcccagctactcagaaggctgaaggacaagaatcgcttgaacctgggaggtggaggttgcagggagctaagatcataccactgcactccagcctgagtgacagagcaagactctgtctcaaaaaaaacagacagagagaagagcactgggtgtgacagcagccagaggaggaagacagggaatctctctggagggtccccaagaaatcctctgaccagcagaggaggtcaaggaaagggtgtgaggtcacatgattccttgagatccaggattcacacattcccaccccaaccctgagatagagtgtcaagaaggtagcagcatggccaagtgccacagagtagctggagtggatgaagttggaagaaaggttgcaggaaattgactgtgatagtggtgtcaaatcacagggagttaatgagaaaatggattagwgaggaactgtacgctgtaaagggaagagccttttcttctcattgagtatggaaatcatagtcacttttctcagatgtcaaatttggcctttattacctacccctctgggacctctggattggattacattttatgcagttcacatattacggaggaagagagccagccctgggaactcctagcctgagagcagatagcagatgaaggaagggggtggaggagcctcagcatcacagctggggcactgagccagctctgtggggatggattttggagtggtttggctagaacctgtgcaaaggctcagggtgggtggcagataccggggaagacaggaacagggaacagctgttcccacctgctatagagaatgtaggctgtggttcagaggagtggaggatggtctgggggagtctctggatggggccctccccacacctggtactcccagggaccaggagaacttkgtccgtactttcatacttccaggtgtgtggaccagaagttccggcgctgcccccmactggccaccaccagcgtgatcattgtgttccacaacgaagcctggtccacactgctgcgaacagtgtacagcgtcctrcacaccacccctgccatcttgctcaaggagatcatactggtggatgatgccagcacagagggtgaggctggaggggcccagaggagggggccggggtctcccctgggcactcaaaggaggagggcagttcctttcaagggagcaggcaccacctcatgagcctgttgcctgacatcacagctcatcttaaaggccaggagcaggaagaagtcaggtaggggcaggtagaccatgcttccttcacacctcagccaaagagctccaagagcttttcagctctggcttcaagactccctgaacgctgccaaggccaaccctaactcagaaatgctgggagagacagggcagagggtagggacaggccttcacctctgtttcctacccgctgggccactcttctgctcttgaagactccccaaccagccctttttgccatagctgttgataggtaagtggggttgctcaccaaacttccagccttcaattccacaaacatctactgagtactgtgtgcctggctctgacccaggcagaggggatgccatgacaaaggagacagaccctgccctgaaaatactaaaaacccccataggtcagaagccttttttttttttttttttttgagatggagtttcgctcttgttgcccaggctggagtacaatggtgtgatctcagctcaccacaacctccgcctcccaggttcaagcgattctcctgcctcagcctccctagtagctgggattacaggcatgtgccaccacacccagctaattttgtatttttaatagagatggggtttctccatgttggtcaggttggtctcgaactcccgaactcaggtaatctgcctgctccagcctcccaaagtgctgggattacaggcatgagccaccgtgcccggccagaagcctcttacaacactagccacagtgctgtggcagtgatgcacctgtaacaggtgtgaaagggcatggactgcagagtccaacacctaggaattcaaatcccagctctgacccttcctagctctgtgaccttggacaagcatttggcctccctgaacctgtttcctcttcaaaaaatgggggcagaccgggcacagtggctcaagcctgtaatttcagcactttgggaggctgaagcggacagatcacttgaggtcaggagtttgagaccagcctggccaacatggtgaaaccccatctctacccaaaatacaaaaaataattagccaggtgtggtggtgcgcgcttgtagtcccagctactcgggaggctgaggcacaagaatcacctgaacccgggaggcgtaggctgcagtgagccaagatggcaccactgcttttctgcctgagagacagagtgagactccttctcaaaaaaacaaaacaaaaaaaaggactgggcgtggtggctcacgcctgtaatcctagcactctgggaggccgaggcaggcagattgcttaaggtcaggagttcgagacagcccggccaatatggtgaaaccccgtatctactaaaaatacaaaaattagccaggcgtggcagagcatgcctgtagtcccaactactcgggaggctgaggcaggagaatcgcttgaacccaggaggyggaggttgcagtgagcygagatcatgttactgcactccagcctgggctacagagtgagactccatctcaaaaaaaaaaaaaaagagcagttgagtcccttacatggtgggtgagggatatgagataggtcataaatgagattcatgtgccacagagtggctggcatcaagtaagagtgtcacaagcatgcattccattttattcatggtacgagaacaatgcaccatggagtatgtagccaggaggtgccatttctgcctggcgtggctagggctggtctgcagtggaagccagattggagctgggmcttaaaggatgagtgtctaagagagaagagtggatgaagggcattcccacaagagaatggcataagcacagtcctaaagacatgaatgtgtttgttaaagagatctggtgtggctgaagcttaggtttgtttaggaaatgagacttaaaagatgttaaattggccagggacagtggctcacccctgtaatcccagcacttagggaggccgaggcgggtggatcacttgagcccaggagttcaagacagcctgggcaacatgtcaagaccttttttctataaaaattacaaaaattagcctggcatgacggcatgtgcctgtagtcccagctactcgggaggctgagccagagcatgaccctgtctcaaaaaaaaaaatgttgaattgacattcatgtcatgctaaaagcatttatttagaaagtaagaaggagtcgttgaaagtgtttcatctgtactgtgacttcatttcagaaggatggcagctttggaggaggataatcggcaggaagagaggcagaggactcacagtctggagaggaagttcttacactcacttgagagtaggagatgatggggcctgaactaggaaaggctgtgggactgagacacctttaggctgagagtctccacaagcttagccctcctcgtaggaggcatgtggtgtctggggctctcccagattgacctcctgtgctcaaactcccaatagtgagggcaggaactgactccacacttcccagtgtaagcgctggggccactccagtagagctgcttcctgtccttgtcctcccccagcctccctccttcctctaggttaggggtgatgctgaaaagaggactagggctgtggaaggaagggctgagtgtgagccctgttgagttcatttcttcaggaagctcacatcttcccagggaagacagatacttggcagcacttataaagcaaggccagaccagcctgggcaacatatcaaaatcccatctctacaaaaataaaaaattagcaggcatggtggtatttgcctgtggtcccagctacttgggaggctgaggtgggaggatcacttgagcccaggaaattgaggctgcagtgagctgtgattgcaccattgcactccagcatggatggcagagtgagaccttgtctctaaaaaagatacaaataaagtaaaataggccaagcacagtagctcatgcctgtaatcccagaactttgggaggctgtggcaggaggattgcttgaggccaggagttcaagaccagcctgggcaatgtcacaagaccccatctctataaaaaatagaaaagttagctgggcacggtggcatgtgcctgtggttccagctacttggagggctgaggtggaaggattgcttgagcccagcaggctgagactgcagtgagccttgactgcaccattgtactccagcctaggcaatagagtgagacccagtctctaaaaaaaaataataaataaatcaaggcaagcaagtatcagggatgcaatgacagggtctggtggacaaggaatgtatagattaggcttctggaaagggaagggtgaagagtttggcagagatgggaggagcttggcagtgatctctagggaatctttgtagcaatggaaaggttgtatggaatggaagcaagcatattagcggtccttcctctcaaactgggttctttcgttatctttctcctcctaaccctatgctacccatccttcggaagctctttcacctgaatctcttgtactggagtgtattagtccattctcatttataaaggagagaggtttaattaactcacagttctgcagggctggggagacctcaggaaacctataatcatggcagaaggggaagcaaacatgtccttcctcatgaggtgtcaggagagagaagaatgagagccgagcaaaaggggaagccyctcataaaaccatcagatttcgtgagaacttactatcacaaggatagcatggtggaaactgccccatgattcaattatctcccactgggtcccttccatcacatgtggggattatgggacctacgactcaagatgagatttgggtgaggaaacagccaaaccatatcatttcaccactaacccctcccaaatctcatgtcctcacatttcaaaacacaatcatgcctttccaacagtccccccaaagtcttagctaattccagcattaacccaaaagtccaagtccaaactcccatctgagacaaggcaagtcccttcccctatgagcctgtaaaatcaaaagcaagttaagtcacttcctagatacaatggaggtataggcattgcgtaaatacaaccatttgaaatgggagaaattagccaaaacagaggggctacaggccccatgcaaatcgaaaatccaacagggcattcattaagccttaaagttccaaagtgatttcctttgacttcgtgtctcacatccaggtcacgctgatgcaagaggtgggctcccgtagccttggacgtgggggttctaaactgttaacttttcaccctaaactttgtgactctgtgagctgcaagtgcccaggtaggcaactcctctgactagctagacaagtgasataatgccaggctggcataggcagcatctaacaggcagagtagcctgtgttcagtagggcagagttggcagtagccccagtatcccctccagagcacccgcccctagcaggccaccatatacacgttcaccttctctctgtctgtcctggacttgttgccctggactctcttctaaagccaattctctccaaaggccaattccagcatctctaaatcatctgcatggtcaggacgcactggctcacacctgtaatcccagcactttgggaggctgaggtgggaaaatcacttgagcccaggagttcaagaccatcctgggcaacatagtaagactctgtctttacaaaaaaataaaaaattagctgggcatggtggtatgtgcctgtagtcccagctactcgagaggctgaggtgggagggtcacctgaactcaggaggtcaaggttgcagtgagccctgatcatgccactgtattcagcatgggtgacagagcgacaccctgtgtcaaaaacaaaaacaaaacaatcacctgcctgaaaaacctaagctagtcattcttatttttctgggtcctggcatcctttcagaatctgttaaaatccctagaatagtgcaccactgcccacaataatatgcaaaacccacatttttgcatttaattccagggaatttgtggaccctatgataaacaaccctacccagagggctttcagacgctagagatactttaagcaacattcagttcagtgaggaaaggaggaaaaaaccctcagatccatggtcagaaatctctgccgtccacagtgggataaaatttcccacacgtttgactgtttgatcagattaaccagctctcattacacacacacacaaacaggactgtgtctctgccgaaatacaatgtccctgctctctgacctccactccaggcacccagtagtagccctatgagagtgagtctaagggcatttgataccatgggggaggagaccgcgtgctgagctggggagctttttcttccccacctctgagtcagaaccagggcacagacctcattcctgagtggctaggtcagcagccagggttccctccctgtctggcacactccaccagcttaactaaattagagggaaaaaaaagaagaatgcagggcaatgggttagtgagtgagtaattagggagctcttttcaccggagtagccaggaaagactactcttagtactccctgcaaagggagcagccaacacagaggcctgaggcttgacttgttaatgaggcagaaagaagacagtgtggcttaaacaaagtaagccagggagcagaaagagtgctggtggagtgggtgtaaggagccgggcccatggctcatgcctgttaattccagcactttgagaggccgaggcaagagaacccttgaggtcaggagtttgggaccagcctggccaacatggagaaaccccgtctctactaaaaatacaaaaattagccaggcatggtggtgggcacctgtaatcccagctactcaggaggctgaggcagaagaattgcttgaaccccggaggcggaggttgcagtgagctgagatcacaccattgcactccagcctgggcgacaagagcaaaactccatctcaaataataataataataataataataataataataataataataattttttaaaaggctagcgggaccaaattgtgagacctccgtaagccaccgacagtgtttggatttttcatgtgtgtatgtagtaaaaggcacgacataaaacgtatcatcttcacggtttcagtccacagtttattgattttaaatgcattcacattattgtgcaaccatctccggaacttttttttttcccttttttaataagatggggtctcaccatgttgaccaggctggtctggaactcccagcctcccaaagtgctaggattacatgcgtgagtcaccacaaccagccaataacttattttttgtcatcccaaactgaaattctgtacctattaaacatgaattctccacgctgtcctccccacaacccctggcaaccacccttctactttctgtctctatgaatttgattatcataagtggaatcatacagtatttgtccttttgtgactggcttatttcacttagcataatgccttcaagattcatccatgttgtaacatttgtcagaatttactttattttttttgagatggagttcgttcttgttgcccattggcgcaatcttggctcaccgcaacctccacctcctgggttcaagtgattctcctgcctcggcctcccgagtagttgggattacaggcacgtgctggctaattctgaatttttagtagagacagggtttctccgtgttggtcaggctggtctcgaactcctgacctcaggtgatccacccaccttggcctcccaaagtgctgagattacaggcgtgagccaccaaacccggcccagaatttactttttaaggctgaatactattctattgtatgtatacaccacattttgtttgtccgttcattcgctgatggacactgaggctgtttctgcctttggctatcgtgactaatgctgctgtgaacattggtgtgcaaatatccaagtctctgctttcagctcttcagggtatatgcccaaaagtggaattgctggatcatatggtaattctgtctttagttttttttaaggaaccatcatacctttccataaggaaacaccatggatttgtttttaaatacaatttgaagccgctgtagtgacatgatctgatttatgatttttagagagaattttacttctcacagtagctgccgtgtcaagaatagattgaggagagtggtatagaaggcagaaaagcagtgactgtggggatgagagagagagctggcagtacctgcagatgtgctgattgtggaaggggacagcaggggggattctagcatgacttccaggttagagcagctggagggatgctggcaccgtgtactgacgtgagggagactggggggcagatttgcaggggaaattcagagcctgttttgggcatatgttgaattttccattttgttccacatccaagtgaagatggcaaggtcaggaaggaatccctgggagccatctgcatgatacttcagatcatggaactgagtgcggtgtctgtgttggcatcccaggggtcttgtggacttgagttgtgaggagtgaagctggttggggtggtggggtgttgaacctaagttggaaggctgtcacggcggggacatgagtgtgtggctgggctcaccggtacagctatgctcagctccagtctcctcagttctgggtctgtccagtaggtctgggggtggaacaggtggagtatcacgaggggcattgcttaggggagttgtctccccagaagggcttgaggccagaggctggaagcctctcaggctgagaatccctgggtctggcctcaccagactggaaggaaggcgtgggagaagggctttgtagtgctcggggccccccctgaggttcacagctcagtgcttcactgtctctcaccacaaaacccacttcctatgatgttttgtccgtgggttatctccactaccgtgaacttcctgtgcgcagagctgggcaagctctcggggaaacacagcagccatgctgaggagcctgrgcttcctccctccttcctgtcagggccagcacccggggctgcaggtgcactatgagtctcaaagggcaggacccagaccaggcccctcccttcccagaacagcatctggcacctggcagcacattgacagacatttgtggagtgagtgctgggctgaggctgctgcatgaggctgattttgattcctgaggtcctggcccccagagataagaggcctcattcctggagttaagtaagatacagccccctcctcagatgactgcctgaagaatccattcataaatgagcgccatgtcataatcacctcacctgtctgtccagtaggattgaagaaggaaaaagtgggcggggcgtagtggctcacgcctgtaattccaactctttgggaggccgaggcgggcagatcacttgaggtcaggaattcgagaccagcctggccaacatggtgaagccccatcttcacmaaaaatacaaaaaattagcggggcgtggtggcaggtgccaataatctcagctacttgggaggctgaagcaggataattgcttgaacccaggaggtggaggttgtggtgagtcgagattgcaccactgcactccagcctgggcgacagagtaagactctgtctccaaaaaaaagaagaaaaaaaaaaaaaacatggaaaaaaaaagaaggaaaaagctgaaattccaaattatagagactttccttctcctaggcgccactctccaggacagtgactaaagaacagcttcaacaaacccctttctctccctttccctcccgggatctcacacacagggaaatggcaaggccttgggtgactgcgagaggaagcagagaccaccttgaaactcgggtgcattaagtccttggccttctcatcttaatctgctccagaataaaaaaatttaaaaaaaaaagtccgtggcctcactggtggtcaagagaccaccttgaaactcaggtgcattaagtccttggccttctgatcttaatctgctccagaattaaaaaattaaaaaaaaaaaaaattccatggcctcacttcccctggagggagaaggtggggagtcctcacatgcagactggctaggatcctgctgctgccctttgtgcttctgccaccctgggctagtcactttgagtcttactttccccatctataaacactggggacaatactccctgtttcatagagttgtkaactatcatagagaagattaaataaagaagtcaccatgaagacacctacctcacccacaccggcacacactccagctcagtgctgggttattgtgtgcgtgcatttgtgggagatcaattgcatgcaaccccctaagctgcttaatttcaggacctgccgtttgtagaatgctgcattcagagcaaggcccaagctctgggctgatcccacagtccaaaaggaaaaggacacacaattgtcacatctgtcccccacatctgaaactgcaggcaactccattctgcacagaacagaaccgtggcagagataaaccaaaatggcagttagtaaaacatagtaaggtttggaattcggtatgtttcaagatggactgcttcagaatagagctattcttsgyttgttttttgttttgagacaagtcttgctatgtcactcaggttggagtgcagtggcatgatctcagctcactgcaacctccacctcctgggttcaagcagttctcctgcctcagcctcccgagtagctgggtttacaggtgtgcgccaccacacctggctaatttttgtttgtttgtttttggtttttttgagacggagtttcgctcttgttgcccaggctggagtgcaatggtgcaatctcggctcactgcaacctctgcctcccaagttcaaacgattcacctgcctcagcctcccgagtagctgggattacaagcatgcgtgcccagctaattttgtattttcagtagagacagggtttctccatgttggtcaggctggtctcgawctcccaacctcaggtgatccacctgcctccgcctcccaaagtactgggattacagccatgagccagcgcgtctggcctaatttttgtatttttaatagtggcagggtctcaccatgttggccaggctggtctcaaattccttggctcaagtgatccatctgccttggcctcccaaagtgctgggattacaggagtgagccaccgtgcccagccagaatagagctattgttaatgctctgaggatttcagactaaattacagggccatgaactaaaactcttctttgaaaggagctggaggtctcagtagagacatcttcccttcaaaaagctttccccgctcctcaaatccaggagatttggcccttctttgggacccacaccccagcactacctctgttagatcayggatcacctgccctggaattgcctgtttcctggtcagccttgcttctgggtggtttgttccttaggacaaatggtcaagccggctgggctcgccactgtgcctggtccrtggtaggtgcttggtgcaagtattttcttaatataattaaaaagctgctgggcatgttttcaccttaaagaattctatctgcagaggaggttacaaaggggattagagtcagatgtcctgctgctgatccagcaagcaaggagtcaccatttgtgtatgcccacccatcgacgttaccgtgaagagcctgggagacagggaatcctagacactggaaaacaaccgtgcaatggagctgtggaattgcagctctggaagatggtggctgagagggtggagaaactgagggaggcatctgagagcctctgtcagaattttgtacttgggccgggcgtggtggctcatgcctgtaatcccagaactttgggaggccaaggcaggcgaatcacttgaggccaggagtacgagaccagcctggccaatatggtgaaatgctatctctactaaaaatgtaaaaatgagccaggcatggttgcacacacctgtagtcctagctactcaggaggctgaggcaggagaatcacttgagcccaggaggtggaggttgcagtgagccaagatcacgccattgcactccagcctgggtgacagaatgagactccatctcaacaacaacaacaaaaagtttgtacttgatacgtgaccacagaaacacaactctgaggtgctgtccctgacattagagagggtgcccaggtgaacaggcataggatctagcaccacagagccagagccctggtgaggcagttttgaccacagacagggcttctttcttcctctccccatcttccctgttaacctccttccccagctccggcttctgtggaatggctcagtacagcaggtgttgggggtttaaaattcaggcctgctagaggcctgagagcccctagcttggtgcccacaggggattgggtayacagcaaagtggtggactggccacaatgacactgtcccttccagagcacctaaaggagaagctggagcagtacgtgaagcagctgcaggtggtgagggtggtrcggcaggaggagcggaaggggctgatcaccgcccggctgctgggggccagcgtggcacaggcggaggtgctcacgttcctggatgcccactgtgagtaccagggcaccggcctgggtgtaacctggaggctccctccctgctagaatgagccagggccacagcctccccaaggccccttcctgttctctcttccgggagtgaaggaggcttgggacccactccaggtgcctctacccctttctcaccccaatcccaaggatgtttcatcaagaagacaaacatccctaaaacaactggtgaccccaaaatcactggaagtgatttccagtgatcaccggggccccggacattcatccctccctgtactcccatctgcaccttgctctgagcttggcccctcagagaggcctcctgctatgacagaactggcttgtttggggctttcttctagggcaacatggagccaggaaggcctccttcttgcccaaaaccaaaacacttccccactgttgtggaggatgaaatattttccctaggagtggtgatatatattaggggaagctctagtcttggagtcagaattcttggtttgcattctgaccctgccccactaacagcctcagtttcctcatttataaaataggaatgaggatactaaccttactgaacagaaatattactctgagggccgaatgaagtaataatacgtgcagaagctcactgaaaatctcaaggagctagacaaatgaaagagattattcttctacrattagggctgaagcttgacatgcrgatgcccctgggagggggaacaccctcttctgaaatccacacgtgggcccggagggctgggccaatggatcggctggaaccccggaagataccatccagggcctccctgtgcttttgggtcatctgagttgaccatgttactcccctgagacctccattctccctgccaaagctgcctccgcctttgggggtagaggggtggtagaagggttttaggaaattctgtgtgctccctgtagctgtggggcttgctgcctgtaacccaggagtaggtggactgtctcttatcctcctgggcattcyctccaggatgcagcttgggctctgctgtgggcagggccctgactgctgcctcctggttggggcctgcaggtgagtgcttccacggctggctggagcccctcctggctcgaatcgctgaggacaagacagtggtggtgagcccagacatcgtcaccatcgaccttaatacttttgagttcgccaagcccgtccagaggggcagagtccatagccgaggcaactttgactggagcctgaccttcggctgggaaacacttcctccacatgagaagcagaggcgcaaggatgaaacctaccccatcaagtaaggaccgcagcctggtgagcccccaacctggccccagtcctacccagttccaggaacctgtgccatctcacatcaacatttgttaggtgctctatcaagcacttgacatattgtgattaatcctcactccctatgaagcaggtacaatactaagaatactaaggctcatagtgataaacactgacctaagatcatgcagctagcaacagtggagcaaggacacacttcccggactgtctggccctaaccgtggcactgctcttattcaccatgacagtttgctcttattcaccacttaccatgtgccaggcactgaactaagggctatacattctttagtttattcctccctacacataaaaggagtggcccatgcttgcagatggggcaagagatgtgatggaggccattgtggaatagtcactgtaataagagggagtggtatgtgcccccaggtgactgtctttgaaaagactgagaatatactaaaagaaaacagacacattttctgcagcgtgaagtttgtagcagttgccctgaacttctttggtgaagggccagatgataaatattttgggctttgccagccacatatagtttgctgcatattcttcatcttatttattttttattttttttacaaacattaaaaaatgtaaaaataattttttgccccagaggcttctaaaaccaggcagccagattttgcccacaggctcttgtgtgccagcccctgagctgcagggtagacaattggaagtcaacccacagtttaatgcccactgggctcacctttccctcttatactcaccccatcctcccctctccaggcagcctgttggtgttattggagactgtaagtttattttaacagttgtctcagacaaaccaagttgaggagtgacttttagtgtagcctgtggtttgggattatttgtgtcattgttatcttagactggccagtatacttaaggctcaactgaatatacatccaggacggagggatgcagaggttggagatacagtagccagagataagagggaaggtttgaaaggaggaaaggattggtgcttcttcctctccacgtgcccagaatcctaaaaaatgctgtccatgccaggcacagtggcccacacctgtaatcccagctagatgagaggctgaggtggattaggtggattgcttgagctcaggagtttaacaacagcctgggcagcatagcaagaccccatctcttaaaaaagaaaaagaaaaaaaaaaaaacctgctcagagtcccagtagaaaggaactcaggtgaatgccacagggagaaatcccacagatcctgaacagccagctgctctgtctccattagaaggagagagggaaaggaaaaggcaaaagagagaaaagaaattggaactttccactgacccaatgtttgtttcatagctgccttttgtttggtgtgcactgcaacagatccccacccccacccccatgccagtgaccaggcacacagcagcacagtcagaaagagggcacctggcccccacccatcactgacgtcgcaggcttcaatgtccaagggccatacaactggaagacaaagctccagtgtttgaggaatgaatgtgctccttggcccacrtgccccggtagcatgcatggcttgccgaggctcttcatgtagcgcccccaycccaggaggactgctgacagtcccctcccggcctcccatctcaagccaaccagagcctaagaggagaggcagaggacctgggggattctaggggtaggccaggacataaagggtgtttactagaggttgcctgtggttgtgaatttacagtgaagcttcccatgcagggtttgtcctcatggctaatccatcagtgacttctcggtctgggagacttctcaaagacaagactcagggcctgtgggggaggaagcaggttggcttccaagtgctcctctgcagttccagcactctctgagcctctcagggtgctacttgtgcyggtttaagacccctgggagaggccagagcctcttccaaagtgataggaagccagcctgagcacgactgaaattccttccagaaagtggctgcaggagccaacttcrggtagacaagagcaaccacagggtaacaccagggtcacattcctgggtaggcaccttgatggatcatgcgaatgaacagtgattgggccccagctgtgtgtaaggcacctagataggttctggggttacaggggttctgtatctttctgcttggttgtaccacatgaagctgcccactgagggcagcaaagccctagccatgccaggctggcccaaacagaaaccagcagctgatgattgtgctcctgccatgtctcaccggcccccaccccagcattccatcttgcttatacttccccgggtccgcttcgataccctaacgcttagcccagtccctcttmgaagcaacctggtatctaaattctaggaattagatgtttttgtcaatttatcttatcttgagtccacacctccctgcctgtgtctgaaagccagaatctttttataaccttctaaatgttccctgtagcccaaattgagcttgatctcacctgacyttccactgtttccaggagcaccttttatcagctttctctgttaaaagcaactggcaacttctccccaaatctacagtttctcatgcagtgtaaatcaccagggctaggcgcctactaaaactgtggcttaatagtccctgaggggcaggggccctgaaacagaatggagtcagcccagctgacaatattcattcattcatttattcatggtttgaatcctgcctattttcaaaaacaatttcacacagcttctgaaagttgagtatctcctaggctccaggcactttgctgccaaaaagtaactaatggtagctttaacctctgtgactagattgagctctgggggaataggatctgtctttctccgttctgtgtgtccatcatgtagcacgggccctggtggccagtgttacgtgcatcctaggttgaacgaatgaatgagtgccttttagaggataattacatatttccttgacctggtcctagaaggggaagaggacatagtaaaagctaaatgatgagtgagttagtggatgaggggctgcacgtcctgagaaagaggaaaggagggggaggtgggttaggaggggagtccacaaacagctttccccgccaggctccgctcctcctctcccagaagatgcacacacttctccctctgtcnctccagatccccgacgtttgctggtggcctcttctccatctccaagtcctactttgagcacatcggtacctatgataatcagatggagatctggggaggggagaacgtggaaatgtccttccgggtgagagtgaagagggctttggggggaaccacaacatcccaggcgacagcttgagaaacatctctcaggcagaggtggcatcagggacatcccatctggaactgaactagaaagggtggctatttcccagtgtgyctcttcctcttttctgctccccctgtccatggcagtagggcttgggcagtcagcctggacagctcaaaacaaactactgggcacaacttctcagaggcaaggaataataggggtaatgaggactggacatctggtgactggggactcttttgcgatgtctgtgggaaagggttagggtgaagatagaaacaggttagtatgttcacaactagggctagaaaaaaaaaacagatgagtaaccagtcatcatcctttttctggaaaaatcaggctccccttcccagttcaaaggacacatgccctggtaacctttgaagtttccctacctatgtacaataagcccttcataacagtcagagaagatggtggccccaactctggtggaccccagaactctgagagattccaggaattaggcaaatcaggattaggtcaggaagcaaggattgcctctccatgaaacctacacaaatctccatgccatggaaaagtaattagtaagtagatgagctcatttatgaagtcacctctcacggtgcctgatgcatattaagcacgtaattgatgcctgctgttactataacgattatgtatttctgttgctgccacactaaaatgaataacaacatactttcccacctaaaacccaaaagaagaaaccagtgggagggatgtcttcagccagcccaccagcatagaaaagggtcacctgccagtyaccccaactcccagcggcccaatcctaggctcctccatgagcctctgacctctgttcaccttcctaggcagccagtgtgctaagggcccaagtgactaccactagccacctagcagccaactatccttgctattaattaacagactgatgctctggtttttatcacctgagggagctgataaactcacatttccaggtcaaaaagccaagtgatcagagctcagagtaggtatacaggcacaggtaacaaaaattaaccagcaggcttttccctaaagtgggccctggtaaacacaggaccctgcagtctccctgtgcttaagtcagagtgaaccaacatcagaaagcctgggatcgtgtagtcatggcctaggaagaagcctggtcggtrtcctttttcccagggagagagagcagcatttgcccaagtccttggacctggggtctggtgctctgggaataraatagagctgcttatggggagactgtctcacctagcccactgaaggcctcatcctgtctcctcttacatcaggtgtggcagtgtgggggccagctggagatcatcccctgctctgtcgtaggccatgtgttccggaccaagagcccccacaccttccccaagggcactagtrtcattgctcgcaatcaagtgcgcctggcagaggtctggatggacagctacaagaagattttctataggagaaatctgcaggcagcaaagatggcccaagaggtgagaggaaatggttctyggagaggtttagatgaagagaagtacggcccccagaccctgttcatgggcctaatggctgggacccacctcatctctaccatctggcgcctcccttcaccctcagggacctgtgagctagagcccaggagaaggccacaaggcacataggtttcaaaagctagagaatgttgtccctacgcatagagtctctgcatccctttggaggggaagggagggaaaggagatttggaggaaaagcctcttacggaggctttggaggctttggaggaatggcyctgagagcctcggcactggggagtgggacataattgtctggggagtcacaggagatggaccgataagcaggggactccaaagctaaggcggggtttttgggattggatgtgagggctgggccagtatctttaacaggtcctgagtgggaatgaacatgagagacagtagccccaggcgctccatgctatctgcactacttcagcccagacaggaaggtcaaagactggtggaactggctgggtgtggtggctcacgcctgtaatcccagcacttagggaggccgaggcgggcagatcrcctaaggtgaggggtttgagaccagcctggccaacatggtgaaacctcatctctactaaaaatacaaaaattaattgggcgtggtggtgcrcgactgtagtcccagctactcaggaggctgaggcaggtgaatcgcttgaacccaggaggggaaggttgcagtgagccgagattgcaccactgcactccagcctgggcaacagagtgagactccctcttaaaaaaaaaaaaaaaaactggtggaactgatccttagggggctggcttgattgacagaaatccttcggtgacatttcggaacgactgcagctgagggaacaactgcactgtcacaacttttcctggtacctgcacaatgtctacccagagatgtttgttcctgacctgacgcccaccttctatggtgccgtaagtcttgagaaccaacctgcctgcccatcaccacagcaccccttggagaagttcaagaccactgaccccacagatggatgacaaacaagaattgagttttgccctgcaccctcctttatccaggaggaggactgagaggccacgttggggcttctagagatagcaaaaaaccttataaagggcaaaacaacccacaagcagtggtcctgaaacattagcatgcatcagaatcaccaggaaggcacggtaaaacgctagggcccatccccagagttcctgattcagaaggmctcaggggaggtctgaaaacttgcatttctcacgagtctccaggtgatgctgatggtccagggctcacatttgagaaccactgcttataaggaaactccyacgtgctgagggcttcttccagggacctggcatcctgggaggttccctgcctgccccacagaggggttcagtcctgccctttccagcctctggggctctgcagctcactttgctgttagctccaggcatgtgggttaacgcacagaggagagaaatgacgggggaaatccagccatgcaaatttgttgcagttgactggaatttgttccagtggggccccataccacacatgaggaacctcctgactgtgccatcctgcttcccctctctgctcacccttctgcagatcaagaacctcggcaccaaccaatgcctggatgtgggtgagaacaaccgcggggggaagcccctcatcatgtactcctgccacggccttggcggcaaccaggtatgcagcccacccatctccggagcatctcctctcctcaccggctccttttctctaccctaaagagtcctttcctgaggactgggagggaggagataccatccctgccctcaggaagcttccagtcggaggagaaggcataacacacacaaggtctgaataagggacatccggagagaacgaggcatcggtgctgggtgtgagaaggggatgggagggagggttgttcatcagaggaggcttgaggaggctagctgctgggggatatttaggggtgagggtggaaaattttccagcacatcccatcacctgcactcaacttctatcttcaatgcatcctctgcccagaagctaccactctgatcctaccaccttccagtgaccccaaaactaggtgcccagcactagtaagtgagaggcactgaaaacagagccagagtggggaaaggagtggtgtgggtcactgaacaagcccgctggcatatgtaggtgaagacagtcattctacagcagtttcctgtaccactggcctgcaagatgatttccagtggtgcactggagaacattttttattttaatagtaatgtattagcaaaaatagaacaagcatatcacatgatttcacggatgttacttaaaatgaggctaagttaaattgaattttaatctaatttaaaggaaatatgattaggcacggtagcccacacctgtaatcccagcactttgggagggtgaggcaggtggatcacatgagcctaggagtttgagacctgtctgggcaacatagcaagacaccccatctctataaaaaatttttaaaaaattagctgagtgtggtgctacacgcctgcagtctcagctactcaggaagctgacatggaggatcgcttgaacaaacgaattcaaggttgcagtgagctatgatcatgccaccacactctagcttaagcaacaragcaagaccctgcctcaaaaaaaaaaaaaaaaaaaaaaaagagaaaatatactggttgggcgcagtggctcacacctgtaatcccagcactttgggaggccaaggtgggaggatcacttgagctcaggagtttgagaccagcttgggcaacatagcaagaccccatctcataaaaaagaattttatatacatatacatatatatatacacacatatatatatacacacacacatatatatatatgtatataaaattccagcataaccctgatatggtaacaatcctgaaggcagcacataaatgagtaaagtcttggcatggcctcacattcactctcctccccaggagaccatgcatggtagacagctcagggcaggtggctttggaaggctgggggtgaactctccacctgcttctcttgtcttgatttccagtactttgagtacacaactcagagggaccttcgccacaacatcgcaaagcagctgtgtctacatgtcagcaagggtgctctgggccttgggagctgtcacttcactggcaagaatagccaggtccccaaggacgaggaatgggaattggcccaggtgagtcagtgtccagaaagctcagaatcaagaacttgaggccaggtgtggtggctcacgcctgtaatcccagcactttgagaggccgaggagggcagatcacgaggtcaggagttcgagaccacctggccaacatggtgaaaccccatctctactaataatacaaaaattagctgggcatagtggtcggcgcctataatcccagctactcaggaagctgaggcaggagaattgccggaacccaggaggcggaggttgcagtgagctgaggtcgtgccattgcagtccagcctgggtgacagagcaagactccatcttgggaaaaataaaaaataaaaagagaacttgaggccacatcggcccctctatattttcttcattttcttcctgagacgccatggggtggagtagagcaatgtagaaggtaggtgagtgtgtgtgtggccacaggcagggttcttcaggcttaaagggtatttggtgatgactgatgtaaaaatggggtgacaggttatggttcgtggctagctctgccatggctgaagcatttttaggctgaacccaattagaagaaggtgaagagtcattcatagttcctgcttgtcctctgtgtcctaggctcaaagctaggcactcacatgcctgggtccagttaatctttcagaggctctttccaagcaggaatagtcactgtttctacagatgagctggagccggaggaagcccagcatgtctgtgactggcccaagacccatcactagtaaatggcaggcctgggatttagccccagatgggtctgacttgaaagcacgggctctttccattacaccacactgctccaggatatgccatgtaaccgccaagccagcaccccaagtgagcctccctactccaccccagcttaggaaagaggaacctaacctggaggctgcagggaagggagcagtctaaacataatccaaggcagaaaattggaggtggagcagtggccctgggtctttgagcctggccatctgggggtgcgggaggccctgaaagcatttttctctcagcccatggtcttgtctttcaccatttcatccactcagtctgaagctagggatggggatttggcaccagatagaggtgggaactcaggaatgtgtctcatgagagggcaggaaaggaatggggaagtgtcctctttgtgccttgtggggttcccttggcttttgtcaattgcaccccatcgcattgtccctggtagcacygttaagaggtctgtggcccagactgaccttttgctttgtcatcttttaggatcagctcatcaggaactcaggatctggtacctgcctgacatcccaggacaaaaagccagccatggccccctgcaatcccagtgacccccatcagttgtggctctttgtctaggacccagatcatccccagagagagcccccacaagctcctcaggaaacaggattgctgatgtctgggaacctgatcaccagcttctctggaggccgtaaagatggatttctaaacccactgggtggcaaggcaggaccttcctaatccttgcaacaacattgggcccattttctttccttcacaccgatggaagagaccattaggacatatatttagcctagcgttttcctgttctagaaatagaggctyccaaagtagggaaggcagctgggggagggttcagggcagcaatgctgagttcaagaaaagtacttcaggctgggcacagtggctcatgcctgaaatcctagcactttgggaagacaatgtgggagaatggcttgagcccaggagttcaagaccggcctgagcaacatagtgaggatcccatctctacgcccaccctccccccggcaaaaaaaaaaagctgggtatggtggcttatgcctgtagtcgcagctactcagaaggctgaggtgggaggattgcttgttccccggaggttgaagctacagtgagccttgattgtgtcactgcactccagcctgggcaacaggtaagactctgtctcaaaaaaaaacaaaaaagaagaagaaaagtacttctacagccatgtcctattccttgatcatccaaagcacctgcagagtccagtgaaatgatatattctggctgggcacagtggctcacacctgtaatcctagcactttgggaggccaaggcaggtggatcacctgaggtcagaagtttgaaaccagcctggactacatggtgaaactccatctctactaaaagtacaaaaattagctgggcatgatggcacgcacctgcagtcccagctacttgggaggctgaggcaggagaatcactcgaacccaggaggcagaggttgcagtgagccaagacagcaccattgcaccccagcctgagcaacaagagcgaaactccatctcaggaaaaaaaaaaaaaaaaaaagtatattctaacagacagatcagaggtctaagagatcctcccttgctattattacctgaagtctgtagaactgtttacagatatctccttgacaggtgtcctttatcttactttatctgtacagtaatcctgtgagaaagacaggacagaaaccactgtgcctattttacagatacgaaaactgagacacaggtaaaggggcttgtctgtagtcccatagctagcagatggctggagccaagactgaggctcgttcttcaatgctgagccagggctccttccgctgcaccacaagaacgctagaccactcgccaccagccttctcattccctcttcctccattctaatcatttctagctggctggcctccacagagcataggaaaacagccagggccgggcacggtggctcatgcctgtaatctcaacactctgggaggccgagccgggtggataacctgaggtcaggaattcgagaccagcctggccaacatggtaaaaccccatctctactaaaaatataaaaattagccaggcatggtggcgcacacctgtaatcccagctactcaagaggctgaggcaggagaattgcttaaatctgggaggcggaagttgcagtgagccaagatcgcgccactgaactccagcctaggcaacaagagcaaaactccatctccaaaaaaaagaaaggaaaaacagggccaggtagccattgtggagagagcacacttaggaatcctgggatgttagtgttaaaagaaagctcctggagccagtgattctcaggtttgtcccagaacccttttttctaagccccatataaaaggtagattaaaaaaacaaagtagcatgagtgaaattgagagagggacaggtaatgccttycagcccctaacttctaacaatctggaagcacaacgtgaaaatcacgtagcccaaccctatcattttcatattatgaaactgagtccaggtaagtgaatctgtccaaggtcacccagcaaggtatcagtagccctgagggtaaggactctgataaggctcgggagggtcctggaaagcctgaggcggcaggaagagtgtgcagagttgagcgtgtctggaaggctgatccactgctgggcccacatcaaagcccccatggggagcagacccgactgcacatggctcttttgctggaagaagagcatggctgcgcagaggactaaaatttcatctgggaaggcttcttttgactgtcagtagcaggatgtcaccagatgagggtgctatgggaccacagctgtctttgttcccattgcaactcaaccctgcrggaggccgcctrcatccctgagagccttctggagcctamagaggagacattggccagccaaaaggaaaggagtggccagggtacgacctggagtagggaagggaaaaagttcccggaaagaagagaattggatgagaggtctcrgtggaaataaaggttttctggcattggtcaaggaaactcgcgttgtgttctcttacctgtgttgtcccttagctgaatcagttgatttgggctatgaagaaccacacacatctgaaaagttctgttacagccactgtctcatgtccccaaacattctctggccctaaatctagcttatgtattgtgtcaagcacgtggagacgtgagacgtsaaacgaggtcctgtccccgtggaactcacacgctaaatgtaagcaaatcatagcaagcctggagatgctccaagaggtgctggatgagttagaaggagcaattccttccacttagggaatcagataaggcctcacaaagatggcaatgtttgacctaagacctcggaagatgagtcctcagatgggaagggctcaataagcagagttgttacacaggcagcagcctggcaggagcaaagccacagaggacatgtggccccagtgggtctgagaaacccagaggacattggggtgagggagtgactggtgtagaagctggaagatcagagttacatcatgaatttcaggggccctaggcactttagccttcacggagctcttgctccattcaaaaaaaaattaatgttatgactatgttggtataaagatgaatgtaatccaggctgattggatttactttatttcttctggttttaaaagaagctaaaacatttctatgggccctgggcactgcacctgctgtgcctactgggtaactcagccccgtacaagagtgggttggggcccagttgagagaggctttggtaggtccggtaagccacagggagtcrtggagcctaaccctagccttattcttggttgcattaaatatccaaacgtggatcccagtatccctcatactgtctatggtatcacccaacagctccccagcctaatcatatgatgtagcccaaccaaggtgcccagctgtgtcaagaaggttccacctgcccccaaatagcatagcacttcccaggcacagtcagccaagagctactcgcagggagtgggagatgcagcaggagggagacacaggctgtgtctagagaggaggtctgggttcagggatgaggggaggactagggaagggaggtggtggagaagagggagaaggcactgatgggagtggtgggaaggctcaagaaactagctttggccaggcaccaatgtctgacaactgtaatcccagcactttcagaagccgaggcgggcagatcacttgaggtcaggagttcaagaccagcctggccaacatggcgaaacccagtctgtactaaaaatacaaaagttagccagacgtggtggcaggcgtctgtaatcccagctactcgggaggctgaggcacaagaatcgcttgagcctgggaggcagaggttgcagtgagctgagattgtgtttcagcctgggtgaccgagtgagactctgtctcaaaaaaacaaacaaacaaacaagaaactagcttcttcatggcattttccttagtcaagcctggcctggccctaacaacacccgtattcttccttaaaacccacccctctgaccactctcagctaacctaaggcccctacctcttaaaaccctgctgctagccctgtgctactatctcccggctctaggagtctctcactctagcattaaagagctaggcctctctggggatctgtttcccacatgaagagtactggggccattgccacaaatagctagatgtcccagaatttattcttatttttaattaccaaagtaatactgtgccagcctggccaacatatcgaaaccccgtctttactaaaaatacaaaaattagctgggcgtggtggtgggcacctgtaatcccagctactcgcaaggttgaggcaggagaatcgcttgaacctgggaggtggaggttgcagtgagccaagattgtgccactgcacttcagcctgggcaacacagagagactccattttgttttgttttgttttttttaaagtaatattgtggagaaaagtcaagtgatctagaaaagtgaggtttaaaaaagtgaaatttgctacttgggaggctcaggtgggaggattgctggagcccagaaagtcaaggctgcagtaatttgtgatcgtgccactgcacaccagcctgggtgacagagagagactctgtttcaaaaaaataataaagctatatagtattccatagcagggttaaacccaatttattcagtcttcctctactgatgaatacttagcttttttccaattttgcaacaagctttgtgacaaactatactgtaacccacaaccttgaacatttatttttctgcctgtttttttgttttgttttgttttgagactgggtcttgttttgtcacccaggctggagtgcagtgacacaatcatggctcactgcagcctcgacctcccatgctcaagggatcctcccacctcagcctcccaagtaatgggactacaggcatgcgccaccatgtttttttcatgttttgtagagacaaggtctcattatgttgcccaggctgataccaaacttctggcctcaagcagtcctcccgccttggcttcccaaattgctgagattacaaacatgagccaccatgcccgaccagtgtttatctcaaaagaattcattcctagaattggtatgcaatgtcagaagaaatgcaatgcctcaaaatttaagtcattgtctggctgggcgggtggctcatgcatgcaatcccagtacttggggaggctgaggtgggtgaatcacttgagctcaggagtttgagactagcttgggcaacatggtgaaacctcgtctctacaaaaaatacaaaaattagctgggcatggtggctggcacctgtagtcccagctacttgaggggctgaggtgggaggatcgcttgagcccagaagatggaggttgcagtgagttgagatcatgccactgcactctagcatgggcaacagaatgagaccctgtcttaaaaaaagaaaaaatttaagccattgtctatgcctaaccctaagagtaagatttttttttttttttttttgagatggagtcttgctctgttgcccaggctggagtgcagtggcacaatctcggctcactgcaacctccacctccagggttcaagcaactctccctgccacagcttcccaaggagctgggattacagctcccaagcacagggactacaccacaacgcctggctaatttttgtattttcagtagagacgggatttcaccatgttggccaggctggtctggaactcctgacctcaggtgatctggccctgctgtgatgtaaagaggtaaccttcaggaggccctcaagcctcctcttggactcctcatcctggggctagaggccagaggaagcagggaagcgggaggagaatgaccaaagaggccccgggttccctagcgcagctcacccctcttccctgagtgtgccagaatgctggagggcaggctggagagcaagctcttcaggttatctgagcatcaaagtgcaactcctctgaacagctctagacactgaaaaagtgactgtgcagattccttcaaagagcattttccaggtttctcccacccctgcagccatgaagcttggattctggagtgtttaggcaacaaaagccctgggtgggcaggtgatggtcctgcttctgtctaggttcctggcttctccctgcctaattccaaaccccatgcgttgctaccatgactgctgcacccacagtcctctgctctggagcctgcagtggctctgatcattttgtggccaacccaagggtcctctgcccacctcaaggcacattgcaactcttttctctctctatttatttatttatttatttatttatttatttatttatttatttattttgagacagagtcttgctctgtctccaggctggagtgcagcaacctccgcttcccaggttgaagcgattctcctgcctcagcctccagattagctgggactgcagaagcgcaccaccatgcccagctaatttttgtattttgtttttgtttttttttagatggagtctcgctctgtcgcccaggttggagtgcagtggcgcgatctcggctcactgcaagctccgcctcccgggctcacgccattctcctgcctgcgcctcccgaggagctgggactacaggcgcctgccaccacgcccagctaattttttgtatttttttagtagagacggggtttcactgtgttagccagagtagtctcaatctcctgacctcgtgatccgcccgcctccgactcccaaagtgctgggattacaggcatgagccaccgcgcccggccaatttttgtatttttagtagacggggtttcgccatgttggccaggatggtctcgatctcttgatcttgtgatccgcccgcctcagcctcccaaagtgctgggattacaggcgtaaaccaccgcgcccggccgcaactcccttctctctcctctacgaactgtgatgaacaaagcctttcatctcctgcaggaacctcggctcctaccctcgttctccctctgccctccaccctccatctaccctcatagccctcagactgtcttcacatcccaaggatcccctcctctaccctgcctcatattctcctctgggagccccttcttggctctccatctgagagggcccaagcctgtttctcagtactttcctcccccagaattatctccactgcatctatttggcttttgtgtctgcatttacacctatgcctgcatcctgggggcatgtgccatctccctctttgggcagagagagttgctgtgtcttccttgcccttgctaaccactcccccctcttccactatccccctggcctccagctgctagtgcacagggcaagtctctgcatttatggtgccactgaggacaacgagagagtgatggatgacaaggggtgctcccttagagaaaaaccagccctggttctccatcttatttctgaaaaagagtttgttggatgcttttcaattaaaagcagatgattaattcagccctggccttgttctgtctttgaataacagatacattagtttacttgaaaagaaatattttcatttgtatttccatgtcacttgtgattttccctgccttgcaccctcagccctgccagttggcaagaagacagtcagctttgctgctaagaggagtataaagagggcttggtccaagcaagaaggcagtggtctactccatcggcaacatgctggtcctttatggtaagtggatatggtccagcaaccctggtcctttatggtaagtggatcatgtggcctgaggtctatagggagggggacttgggcaggaaggtcagcaaattttccctaagtccaggccagcaccctgtcccagggcaggtgggacgctctgcctgcagagcgtcctttactctcctggaggccaagatagaaaaggtcagggccactggctattcaggcccctctgggtggcaggtccctgggccacaaagcagagagaagccccatctggtagtggggtgggtccctgggcttccccaccacccccattgacaggaggacttcctcagcaggtgcctggctggggtgtgcactgcaggccctgaaccctggagaatcttgccaaagcattagggggctggtgggggtcaaagagtgggggggggtctcttcaggccaaagggtgatcttgagcaaagaggagaccacaaggagcctctggggcctagcctggtggtttgagagaggtccttcatagcatgccggagttctgggaacacctgggggaaacagaaggcacccaggcacccctgttttcaaaaggggctcagagaactcacagctgggcccctcattcgttagagaggaactgtgaatttgcagacaaggctaacattcctcaaagcacaatcgccaccccccacccctacccctggctgaccccatgcttagtcatcactcacttttcttctgccccacaaaggaca

SEQ ID NO: 95722 - DNA, 39846 bp, Homo sapiens
  misc_feature (1)...(39846): n = A,T,C or G
ccaaatggccaaaggaaataccatgcttaaagaggccctgtggactccagactagaatttgaaaccccaactgaacacatggaccatgtgacatggggatttcaaagtataatccctgcatatagccaagagcttaagggagcttaagggaagcttaaagggaagacaccactgtgagtaaaatggagtatagaataactttgacctttatcacagggaattatcaagaagattaattttatatgggtttctgaattaggaaaataagctcccaagagaaacagaaacttcaggcctacaacatacatgagtatggagaccaaatttacactctccacatggtatttaaagttccaaggcaagaaattgacagattccaaaatagctagagtatatggcaatcaatagcaggtatagaatttcttttatatacatgaaagtataaggaactcccaaaggaaaaaaaaaatctccactgaaggtgagatcaaattttcaaaccatgtaaatggaaattatctaagatgagacagtgccaaaaacaggataattaatacctcaaatatttgagatagtaggacaatttcaaatccaagacaacggaacaatctcagaacaatagaacaatatcaaggaaacaaaaaaggaatttaaaattattaaaaagacagaagaacaaatatgtcataagaaaaacaatataaaaaagaaaaaatagtatttctattaaaaaatcagaaattaaactagacatagctgaaaaacaaatcagagaactagaagatacattgaaagaattatcgatctgcaatgtgagaaataaagtgatataaacattaaagaaaaacttgggacacattgggaatgatgtcctaagaagaatgatttcttatgtgtccaagaaagctgaatatataattaatagaaagtccagaaagaaacaattaaaagaatggcaaaaaggcatatttcaagactactaacataaatcttcatattgaatagttttgagcaaataagttttaaaataaattccaacgcaaaggtattataatgaaagtttatcatacttataagaggcaggaggcagacaaatgcccaggcagaaaggggtgggtcccagtgaaacctgaccttcgagccagaaagtgaccgagataaaccctcagacgagactgagaacccgccttaccatttggtgcattttcctctgattgctccccatccttcacctattatacatattctcaccctttcctaattggttttctaccctgccatgcccacctttgagtgaggtcttcacttcgaccttttttgcatactcacaagccaatcagcatacactccctaattctgagcccataaaaagccccgggctcagccatattgggagaactttcctgtcttcaggtaggagaccacccaccatgtcccctctttttgctgagagcttacttttaacttaataaattctactccactcactctttcatgcccacatgcctaattcctcctggttgtgagacaagaacccagacctagttgagctaaggagcaaaattcctgcattaatattaggagcaaagaaaacaatcttaaatatactcagacgtggggaaaaaatccaccataagcaaaggaacaataattatattggcatatttcttatcggcataaaaagagaggagaaaaatatctttaaagtgtgagggaaaaacagctccaaaatttaaaattctatccttagctagactataattcaagagggcaaaataaagctttagttctggggagtgtttctgggttttttttgtttgttttttattttatttttttacaatgattgagagattatcattcacagatccaaagaaggaaacaatgggatgcaagatgcaaccacgtacaaagcactaacaaacaaacagtttatgaaataattacctaaaatctaatgtaaattataactggtaatttaaataggtgggagtaaaatatctgaaaacagtaagttggaataagtgaaaactgggggagtaaatagtaatcagaaataaagtgttctgaggttcttacattattcactggctgccatgattcctcaggtatgcatattaaaatttaagagtaatcagcaaacaaacagaaataaaatatgggcttccaaaccagtagaaggaaagagcataggttgcattaaaaaaaagagaaagaaatgcaataaatcaaactgcaagacaaaaagggaaaaaattaacaaagaaaagacatggtaaatagaaaacacaacctgataaggcagcaataaattagaatatatcagtaattctaaaaaaagtacaaataagccaaattttaattgtaaaagtaccatgcctaattaaacacttaagtgtgaaagaattcttgcagtggagagtaggtaaagttgataagcacacaatagtgtagactgctaagtgtacatatgcacattacgttacgtatattacatatgcgtgccacctccaggagagtggtcatctttggggaatggtgaagaagggaaattaagggtgagcagaatatggagccttagctcttacttcaaatagtattctgaaacatgcatggcaaaatggcaatacatgttaaatctagctggtgagtttaaaaataccttgtatccatgcttcccaattattttgacttcatggcccacattggaaataaaatgttcataacacaatgggtgaacatacagaggtgctggaagtttaatgtgacaggccaagaagagccagcagctccaggacacttctcacctgcaccgtggactcagagatttataacatcccagcacacccatcacccatttcccactccccagcatcctcctgcacacagttgggacactctgctttatattattttttacacttttctatatgcttgagctactgaaaaggcaattggacaagaagatatattgatccagagttctcagcagaagattcccaacaaaataggttggacaaaagtggatgatagatagtaagatttcttcctaagcaggacaaaactagagctgtgtgggttgtgctcctttaagccttcacagcagaagtggtggagtttcagctggactgagtctgtgtggaagcaagttgctgtggtaacgtgtgtgacagtgcagagggccacagatgaagaagccagaatggggcctgggggatgagttctagtggtagggaccataatgaaatgcctgagcactggaggcaaagacttggagctggctctgctattttaatgcatctttaacttgcttctaaaagagagtttatttcccatgcatagacataaagtgatacatcatgctaatggcagggaaatttaagtagaaagcctactgactacttatttttggaggcattaaatactggccctctctttttagacatcataagccatttcatgatgttactgcttgcaatttcttctctattctcattttgttcccttatcgttataacacagatgagtgacatgggttctgtatgtaaggatctcatcctccaagacagtggtccccaccctttttggcaccagggactggtttcatggaagacagtttttccacagactggtaggggtaagggatggttttgggatgattcaagagcattacatttattgtgcattttatttctattagtattacattgcaatatataataaaataattatacaactcaccataatgtagaatcagtgggagccctgagcttgatttcctgcaactagatggtcccatatgggggtgatgggagacagtgacagatcatcaggtatagattctcataaggagcatgcaacctagatccctcacatgtgcagttcactatagggtttaaactcttatgagaatctaatgctgctgctgatctgacaggaggcagagctcagaaggtaaggtgagtgatagggagtggctgtaaatactgatgaagctttgccagcttgcccactgctcacgtcctcctggcccaggggtgtggggaaccctgctctatgagaggatataaatatataagaaatataaaaatacaggaaattatttacaaaatacagggaaataaaatgttccccagatacagatatagcacagaggagagctctgagcaagtgatcttggagaagactttcctaagtgggggaggcacaagcggtggtggtggtggtaaaggtgaaccggggccagagagaaggaatcaggatagcacagcagatgtggcaacagttctcaaatctgcactaagtcactatttctttgaatgtttcctgtgagattaagttcttaattcgtagtttattttccctcatacaaaactttagcccaattctgccctgtgaagtcaaccgtgayactgcttttagaaaatattgacagcatgcaaatttccacgactgtgtcagacttgctaataccaagcagaggggaaagataaacaaggagtcctgtttgtctatgaaccatcacaaaaagataaacttaattcagctgagagcagagtagacagtgcctttactcttagcatttcagactatagaaatacatttctttgccaaaccaagaactttaaaatcaaatttaacttctcttctaacttaaagttagttttattgcattttatatttcagaaacaagagtttttgtaaatgctttcagaaaaaaaaatgtttatcagtagtaactgcatggttatcgctttctttttccatacctacatccaaaagagtagcgtgaggcatcagcacgagaaaagcaggtatgagagatgatgtttgctttcaataggacggggggccggggagaagcccataggtgtaagattccatgcttttctgtgatttatactttaggtgtagatatggctcaaaggcatgaagagagagtttgctccatggatctttttggaaggagaaaaacaacaccgagaagaaaatgtaacattttagatgtacaggaaactgtcatttgaaaatgtctgtgaattgaataaaccagtgatgtccttcatctcctacaaattctgaagcatagaacagaaatatagtataagaaagaatgttctcactcataggtgggaattgaacaatgagaacacatggacacaggaagggaacatcacacacccgggcctgttgtggggtgggaggagtggggaggggggagggatagcattaggagatatacctaatgttaaatgacgagttaatgggtgcagcacaccaacatggcacatgtatacatatgtaacaaacctgcacgttgtgcacatgtaccttaaaccttaaagtataataaaaataaataaataaaaaataaaaaagtataatttaaaaaataaataaataaaataaacaaattaataaaaaaagaaatacaaaaaaaaaaagaaagcacaaagtccgacacttgcagcaatggaatgctaagttttacattacttggttaaattagaatgtatgttcaaagagcttctgttcatttgaatttttttctgtttgcttttacatttctgattttatcagttaatcatatgttgagatttttttcccattacaaaattttcattctgctgttgtatgtcatagagtgttgactgataaaaggatatcctattatgtggtgctgttacaaaatgcctctatatagagcaagtgaagattagcgggaaggaagagaaggttatagtgataggcagaattctaagatgaccctagtgacccctgccctttatttcccttctctgaatggtgggtggagattgtgactatgacaggagctcacttccaagggcaattcaacaaatatttatttagcgcccagaataggtaccatgtcacaacttgtattaagagaacagttaggcagggcacagtgactcacacctgtaattccagttctttgggaggccaaggtgggcggatcacttgaggtcaggagcaccagaccagcctggccaacatggtgataccctgtctctcctaaaaatacaaaaattagccgggtgtggtggtgyacgcctgtaaacccagctacttgggagactgaggcaggagaatcacttgaacccaggaggcggaagttgcagtgagccgagatcacatcactgcattccagcctgggtggcagagtgagactctgtctcaaaaaaacaaaaacaacaacaacaaacaaaaaaccagttaagtgaaatgaggaaatttctttggtgaaagagaaggctagataagrtgacagttgtctcaaagtcatcatacggaaaacagaatagaagcacagaacaaggactattgtatataagagaagcaggtgttaatgtaaggtaagaaagaactttctaataatcagagcttwttgaaaatgaatatactgtctatgaaacagcagcagcctcatcatggtgtgtggttgagacttgataaacgaagtgagctgtactgtaaagaggattcctaagcttgttaaaaaaatggactagatgacttttaaatttccctttcaactcaaagatgtgggtctaaaattcttcctaggttgtaagtgagagcccaaaatctaggtatttaataacgaycatttttacttgttttatgtttatgtattttgtatagaaaggtatatagattaaaaacaccatcactcatagttctmtcacatgartttaataattagtaacaatctgatatatttcttctgtaatttttatcttattttgttttctcataaaagttatatgccttaaatggacattttcattgtctacactataatttttcttaatattaaattatctaaaaagatacaaargttttgacttctgactagtgaattaatgagattgtttatttcccaacatatttgttatacttttcccagccaatgaaaatgatttcatttgagtggtctttaaaatatgtcaattagcattaaaatgtattgcagaccaatattagtaggtaaattataaataccatcacattagacatggtcccagcccatccctaaaaggctcatggcaattttttaaatccaaattgtaagactcatgggaagggattatacattaactaatctgataacctatacatatcttcaagttgctgtggaatgactgttttcaagaagagagaaggagccaatatatctactttcattaagaagctgaaattaaatttggatttccttctttccaaaggttggtctctcatctttgccttatactatatattgttttgtggtgggaaacrtggggataggcattaacatattttatctaattataattacatgatgtagtattctgattgcccgactatgttagcaagtaaaagaaaagtagggaagtttagaaattaattcattcactcaaattttattctgtagatatttattagctataagtctcaaatctctaggtgcttattattcaatcaagataagacaggataataactaataaaatgatatgggaaatgcaatgatagagatgtatgcaaaacactgtatggtcaccaagatggttgggcttaatgatgcctgagaagtttggggaaggttttacataggaaataaccaagagaaaggggaggtcacttctgcagtgtaaacagcattttcaacaaatgacattttcatgaagaaacrgcatgagtttacaaagtcactacaaatgattcagcaagattgaagcactgttcgcatgttgaagggggccagcccctccacacctgtgggtatttctcatcagatgggacgagagactgacaaaagaaataagacacagagacaaagtatagagaaagaaaagtgggcccaggggactggcgctcagcatacggaggacccgcactggcaccggtctctgagttccctcagtatttactgattactattctcactatctcggcaagaggaatgcagcaggcgaacagggtaacagtggggagaaggtcagcaagaaaacatgtgagcaaaggaatctgtgtcacaaataagtttaagggaaggtactatgcctggatgtgcacataggccagatttatgcttctctccactcaaacatctcagtggagtaaagagtaacagagcagcattgctgccggcatgtctcgcctccctccacagggcggtttttctcctgtctcagaattggacaaatgtacaatcaggttttataccgagacattctgttcccggggcaggcaggagacagaggccttcctcttatctcaactgcwagagaccttcctcttttactaatcctcctcagcacagacccttcataggtgtcaggctgggggatgaycaggtctttcccatcccacaatatctcaggctatctcagggagaagaaaccttggacaatacctggctttccagggcagaggtccctgyggctttccacagtgcattgtgcccctggtttatcgagaatggagaatggcgatgacttttaccaagcatactgcctgtaacatatggttaacaaggcacatcctgcacagccctagatcccttaaaccttgattccataaacacatgtttctgtgagctcaaggttggggcaaagttacagattaacagcatctcagggcaaaacaattgttcagggtacagatcaaaatggagtttcttatgtcttccttttctacatagacacagtaacagtctgatctctctttctttwccctacatatcccccttttctttttgacagaactgccatagtcatcatggcccattctctttggtctctgtctcttcagagctgttggatacacctgtagactaacaacagacagaacaggcatacaaggattaatacacaatgtacaatagtggaacttttgatagttttaacccaagtgatggggttaagatttgtaaggccatcagtagcytttacgattgcctcagttcctggcaccaaatttaaatgggctttcgatgcctcaaaaatttgttcttttaattttgaaatatctaaagtaagattaccttctcttccttgtagatggcatctaatcatgtcccagtgatgctcagactcattataggcttggggtgtaatacaaaaatctgatgtattccagtgacactgtaactgaaaaagatattccaagctcatgagcctatctcctatccaaatgacagtttgtataagatcattaatttggtttgccaatttttgatctatttgggtctcagagttccacaattctgagtagctgtgactgcaataagacccatattcactgcaatcamagtaaaaatgaatcttttggatctagttagaattccttttaatacttctgttaacatatggacagatggcgaagcctcccacggtcagtccatggacacagggatccacacaccctctcttgccctcactagcagaatatggtgctgccaattaaaagtcgaattaatgcaagtaaacaatctacaattttcacaggttatagtttggtaatctggtttaatctatgtttcctacaactagcatataagggggttctacacaactttgcaaaggaattgtcagattggaatctaggttgatagtataatatggcttatgattctttgttcctatagttgatttccagaccaaattctaatatggtgcgaggccacagtaagcttccataattcyggakgttcaggaccagtaacaggactaactaactttggtcaagrtggtgaaattcccttttcaccccatttccatggatagggtgattctaaccttctataaacctggtccagccttttagttaaatcactatcaaaggcaggattaatgggccagacggatggggcctgtgaatatgagtrrgtctggcctgtacaatcataatataattggcctcgaggggcccagtctataatagttccaaattcattgttttgtaatacgaccgcagtatcagccacacattcttcccgaactaagacttctgggtcttttgattctttgggaatttccttggggcatggcttccctttggcccaaagctcattttaacgatctttgataagaagagtcttgtaaattatttatctgtggcctgagtgacattccacttaccatgtgataagtaaatctactggtgcactgacagtaggtacttctaccaaccaattttgggttgtaggcattaaacaacctggtgccttccctaggcaaataggaggataattatacccaatggaaatatttatcatcattccttcttcttcaggttgggcagggcagcaatcatctgtggggcctggtacccatgcagtattattaacatatacttcaatgattatccatccatatgactgcccaaattaagagcaggaaaggcacataggcccagtaagtataattagctgcagctgctcctgcagacatggggagacttaccacggtagatacaatcatcaaaactgcaagcagcatattctctggagtttgtgttacccttgttttcttcaggcttttttcagctaactgtgtcagcttctttagttgggcccaggtcggcagctccgcttcctttgtggatggcaacttcatctgttcttctgatatcaccattttgttcacctggcgagtcgatgatgctcgattgcaggttttctgtctctgcggaggcacttttctttgcatctctgatgggttcattgtagaactttaaatgtctagtgggtatccaaacaggaagctgattttctcctggtgaaacacaagcaaagcctctcccccatgttatcatctttcctatttcccaagtcttatttttgttgtctttccaccaaatcagttttccttcatgygggctgttctttttaccagtaaaatgttgttctgcggaagtagtggtctgatttctataaatgtttaaaaaatttaaagtatagagtgctagattaagttgcatctgggaagggttgtagtcctcactgtctttttccttttttggttaaccaattgagctttgagtgttctactagttctttcaattatggcctgtccttgagaattataggggattcctgttgtatgtgtaattttccamtgatttaagaatttttgaaatgttctactacagtatcctggcccattatccgttttaattttttctggaattcccatgacagcaaaacaagataataaatgtcttttaacatgggaagtactttctcctgtctggcaggtggcccataaaaaatgtgaataagtatcaactgtcacatggacaaatgacaattttccaaatgaaggtacatgtgtgattccatttgctataatgcattaggacacagacctctgggattaactcctgcctcctgagtgggcaggtgtagaacttgacactgggtgcartgttgtacaatattttttgcctgtttccatgtgatatcaaatttatttttaatcatgttgcatttacatgagtcaaggcatgaagttcctgtgcctccaggaatgcagatgatactagcaagtcagcttgttcatttgttttagttaaaggccctggtaaattagtatgtggtcgaatatgagtaatataaaatgggaaatttctttttcttacagtttgttgtaacaarttaaacagctggtttaacagatcatctacaccatatttgattagggctgtctcaacatcctttgtagcctgtactacatatgcagaatctgatacaatgttaataggctgattaaaattttgtaacactgaattgacaacaacaactctgctctttgagccgagtgacattgagtttcaaggactcgttcttttggcctggtgtaagttgctttttcattgctggaaccatcagtaaataccgtcagagcattttctaaaggtttatgtctggcatttttaggtaaaatccaagtagtcaatttttaaaactggaagatttttgtttttgggtaatgactgtcaataattctcacaaaatcagcaagatcaatcttccatgcaccagaattgataaaggcttgtctaacctgttccttatttaaaggaacaatgattttatctgggtcacttccacacaattttattattcgtaatcttgtctgaccagttaatgtagccatttgatctaagtacaatgtaaargtcttaattgtactatgaagaaggaatgaccactccacaaaatccaytggaacaataatgcctgttggcaaatgtgcagtagcaaaaatcaaaagttggagtgggactaagtgatctattctatttacttgtgctgacagtggacatacycgggaatctctcatccactgtcctcaatgctcacgttcttagcgtamcttcaccttggagaaaggcacccatgttgggcggcgggtgaagggggccagcccgtccacacctgtgggtatttctcgtcacgcgggacaagagactgagaaaataaataagatacggagacaaartatagagaaagaaaagtgggcctaggggactggcactcagcatacggaggacctgcactggcaccrgtctctgagttccctcagtatttactgattactattttcactatctcagcaagaggaatgtggcaggagaacagggtgacagtrgggagaaggtcagcaagaaaacatgtgagcaaaggaatctgtgtcacaaataagctcaagggaargtactatgcctrgatgtgcacataggccagatttatgcttctccacacccaaacatctcagtggagtaaagagtaatagagcagcattgctgccagcatgtctcacctccctccacagggattctcctatctcagaattgaacaaatgtacaatcgggttttataccaagacrttccattcccggggcagrcaggagacagaggccttcctcttatctcractgcaagaggccttcctcttttactaatcctcctcagcacaaacccttcataggtgtcgagctgggggtggtcaggtctttcccatcccacgaggccatatctcaggctatctcagcagggagaaaccttggacagtacccggctttccggggcagaggtccctgtggctttccgcagygcattgtgcccctggtttatcgagaatggagaatggcgatgacttttaccaagcatactgcctgtaaacatatggttaacaaggcacatcctgcacagccctagayctcttaagccttgattccataaacacatgtttctgtgagctcaaggytggggcaaagttacagattaacagcatctcagggcaaaacaattgttcagggtacagatmaaaatggagtatcttatgtcttccttttctactcagacacggtaatagtctgatctctgtttcttttccctacagcatgtatcttaaactcagcagttgcaatgtagtgtctttaactttatctgcaccaccctcttctccctttaggttgaggccttgaggtctagaaccgtgtcatattcttctctgtggcctcagcaacaagcacagtacctggtccactgttaggagtcaataagtgtttgttgaacaaataaataaggagtaaatgaatgaatgtacaatctatggcttagagatactaagttttggtatttttataataattttgaatatatagttttaaagaaatttctgttatttcagtcagcttttatcagatcattaaataagagagaaaaaaatcaatatgttggatttactttgctttcataggcttttctacagtgtaawtacyggtcagtgtgtctacttaatctggtcttattttcttctcaaactattgtaagacggcttctaccctcctactccactgaaacttctctctctctctttctctctctctccttctttttagagacagggtctcattctgtcgcccaggctggagtgcagtggtacaatcatggctcaakgtagcctcaaactcctaggctcaagctatcccaccacttcaacctcccaagcagctaggactacagatgtgcaccaccatgcccagctmaatttaaaaatgtttttgagagatggggtctctctatgttgctcaagctggtcttgaactcctggcctcaagtgatcctctcacatgggcctccaaaagtattgaaattacaggcatgagccaccacacccagcacactgaaacttstctagcaaggatcacaaatggacacaaccttcgtacatctaatggatgtccttatctcactgaacttcttatgtttctccatattcytctgcatttatcacttctggcttcactcatgttgtctctgctacctggaatgtcacacgatccacacacatgcacacacacatgcacatgtgcragcatacacacacacacacacacamacacacacacacacacacacacacacacctcccttcctggcctcttacctagctgattcctagtcattcatccttaggtttttgtactgtgtcacttccgcagcaggtcagatattccttccttgtgctgcctgctcatagcacacagggtatgatggtactattacatttatcacatagcctgaaaattatatgtttgcatttctctctctgactataccgagaaatttggtgggaggaaggaatatttatttctgtatacttttgtgtccctatacctatcatagtccctgattggtaatcaacatactggtgttctcattgttaataagaatagtgaaaatttagggcaacagactgaaggtccttgtgacaagtaattttttttaaatgggatggatgacagtgayagagctctaaatttctactaaccagctgagacacratggccaaaaagcgattgctgtgattggagctggaattagcggactgrgggccatcaagtgctgcctggatgaagatctggagcccacctgctttgaaagaaatgatgatattggacatctctggaaatttcragtaagtttagatttcatttggttttaggcatgtaactttaaaaaaaaatagctagaacaatttgatgctggtttcctcagaggaaacatacagcacatcacatattaggaattatgtaatgactctaatattcttgcttatattatggattaactgaggaattatatgaatatatgtcaatttcagattaagccatgaaatttatcmgattctcttcagggtagctgagattccatgtggtcatcaaaaatattagaaagatatagtggttgaggattctttcaactgatcagatgatattgtgctcaaagttagagatgtcacactattttttcccctgacttagcawgggtatagggtagggtaggatgatctattgctgggcttctcccatgtaatctcatcttctcttctgtggtcacacctgctgactgactggccactgcatggtatcttatcttgtcaatcagagggcaatgactttttatttctctcagttcttggcagcaggagatttattgccatgaggaattcaaacttggtgccaaacgttgaataggcttaagttcctgggtggtctcatcttcttttggtgcttcattctgccatctttggaagtgcccttgaagtccagcacttctggtcagtattttccagttctrataataccagagagccactctgctcaccagtcatggctggctttctcacggggtgtgcatgaatgagcagatttcgttctcttgctcctggctcttgtgcccacccaggccatgtttcaagagccagaacactctccatccagaatgtggagagtgggcttgaggcaaagttatcaacattgctgccccacagggactttcctcaggtgccactagagcaaatcagtgcccaagcagcattcagatagaccctccaacctgatgttagggtcattcaaatattcctccattcctccataacctttggattttcttgtgtgtggctttaattgaccttcagttctaaaagtcctataatacccattttgtttcttctttaagagtgcattcattcaacaaatattttttgggccctactatgtgtcagaaacttttctaggtgccaggaaatatattagtaaatatgaatacaaaaatccttgcccttaaaaggtttacattctaatgggaaaggataattaaattaaaaagtagcatggttagtgctggtaagtataatagagaaaaataaaccaggaaatgagagtttcacgaatataaattaaataagtggtcatgaaaagcctcaaaatgatttttgacaaagaattgtaawgtaagaaagaaagctgagaagagatctggggaaggggattcagaggaatcttcaagtgcagagctgtgaggtgggagcatgccttgtatgttagagaaaagtcagggagccagtgggtctagaccgtagtggcccagaggaagaagtctaggaggtggtcagaaggggaatgggagtccagatcatattggcatttagaggccatgataaggactttgacttccatatagattaaaaccatgagatggttttaaataaaggagcaatgttctacagcttgtgttttaattataaaagacaaccctgattgctctgttgagaataaaacaaagaaacgctaaagaaaattgtccagtttgaaagctactcaataatattccaatgggagatcacagcaaactgtaccaggtttctagatacatggatttttaaaaaatattttataatttcttatatgttgacttttttctatttctttttgaatgtttatcatatatttaaaaaaggtttgtgtctattatatcttcttagtggatagttccttttatccatatraaatatctttttgttccttttacctttaattatattgtgtgctattaatcacaggtatgcatgaatttaaaattaaaagtaaaattaaaatattactaaagtagatatttttgttataacttgataagcatatttttccatcacttaattttcaattttacttcattttattttaggtttgcctgcataaaatctgattttactttattgttcartgtaaaaccttctatctttcttattttaaaaattgtgctgaggtgtaatgtatgcattaaaatacataaagtaagctgatcttatgtgtacagcttgataattcttacatatttatatatctatacaactactgcttaagtaagatatagactatatccagaatcttaaaatagttccgtgtgtttcttcctagtcaatacttagccattcccagaataaccactattttgatgtctatcaccattaattactcctgattgtctttgaaataatgcatttatactattttttgtatttttttgacttttaatgtatgtggttgagatttattcaaatcgtgtatgtagcagtagtttatttttctatttaccattaatgtgtagtattccagtatatgaaaacactgcaatttattcacttagtctcctgttgataaaattttgtgtctggtttctttcacccatcatttgtgtatgtcaaatgtattcattatatgagaatagcttyaattcatctaaaaactttaattgttgcatagtattccattgtttgaatataccacaatgtatttactctttcttttttggtagaaatttgggttgtttttactatttggcaattgtgaaaattcttgcacatgccttttggtggatacgaatttatttcttttgggaatattcctaggagtaaaatactggctcaaagtttaagcatcagtagatattgccaagcagtgttctaaaatgaatgtatcaatttacatttccaccaataacgtatgagagctccacatccttccaaatgcttagtattgttagtctttttattttgaccattctggtagatatggagtggtattgattgtagttttgctttgtatttccctcatgcgtacagatgctgaacatcttgtaatatgcttattggcatagatattctcatttgttaaaaatttgttcaagtcttctgtccrttgtcaatctaattcgtctatcttttttctttggtaagaattgttttttatatyttgtatatgagtcttttgttgcatgcatttgttgtgaatatctcctagtatgtgttatgtgtttttattgtcataaagatagtataacttttgacagaggctcaagattttaatgaagcccactttatccagttttttaatggtttgtaattatttgtattatagataagaaacttttatttatcccaaagtcctgaagatggtttcttgtatttccttcagaactgttattgctgtacctttaatgtttggatttatgatccattttgaattactttttgtgtatggtgagatataaggatcccgttcatttttcccacatacggatatccagtggatatagcaccatttattgaaaagaccattatttcccccattgagttacaatagtgccttttatttattcattcatttttggaaatttggtggctgtttatgtgtgagtttgtttcttagtctgtttcactggtccatgtttctatccatgcatcattgctgtatctttatagtaaagtttggtatttttgtttttcttcataagtattttctttaattttcaaggatctctacattttaatataagttttagaaatagctgtcaatttcacaaaaatatctgctggaatattatttgggattgcattggctttatggatgtagttggaaaggattaaatttgtaataatgctgagtcatctcatttatgtaatagtatctctctctatttatttatgactttttcacttctctcagcaatcatgtagaagcctcgcatatcttttgttagattattcttaagtatttgatgttttttatgttattgtaaataacagctgttatgaaatttcacttttcaatttgttgctagtatatcaaaccattaatttttatgtgagccttgtaaccagcaacattgctaaattttgtaatgctttgaatgtagattattttggatttgctatgtacataatcatgacttctatgcttaataacagatttacttctcactttccaatatttatgacttttgtttctttttgctctttattgcattagctgggtccttaagaataatgttacataaaagtgctaatagaagatatctttttactcttcccaacctcgcctaaaagaaaaactgctcagtattttaccagtaagcatgatgttagctaagatttttgtagattaagaaaatttccatctataaatagtttatggagagttttttaaagtcacaaacatatgttaacatttataaaatgatttttctacatcacctgagatcaacatctcaataattagcattgttatgttagtgcaacacattttatagattaatattcacatgataaaataaatttttgtcttcagaaaaacctacttgrtcatttgaaaatatttttagtcattgctagattacattgctagattaatttttttctgatatttctaacttgctaaaatataattttcatcaatgtttatgagaccttgtattataattttcccctcttataatgcctatgtcaggtttgatatcaaggtcattctaactcaagattatgaaatgagttgagaaatgtttctgctttttctattttcttaaataatttctgtactattggcattattttattttctttaaatgtttggaagaattcaatactgaagctatctgagccagttttctttgtaagaagctttttaatgacaaattcaacagatacaaggatttcagattttctttttcttttcatgtcagattggtaagtattgtttttcaaggaatttgtccttttttctaagtcaacagtttgagggatattattcataataacctcttaaaatattttttattatgtttagattctatagtgttattttatttttattcctaatattgacaatttatgttttctctttttgggggtagttaatcttgctagggatttattaattttcttaatcctctaaaataacaaacaatatcatgccatgtactgctcatttaatttatatttcaatgatttcagcttatatttttattattttctttttcttcatttttatgtttattttattgtatatctaggttgttttttaaaaaaattattttaggttcagcagtacatgtgcatgyttgttatataggtaaattgcatgtcacagggatttggtayacagattattacttttacttgtgtgttggtgggggaagggtggctctctgctggagttctcctatagttggatgcaggcagcccaagaaggagstatgatgaaagacctgggaagcaccctagctgggcatccatggttgcactgccagcgggtgcagccaggctgggaccccaggtgaggccagcagatggggtactcagatcagactgtcctgatcctacaggcaagaccaccctgctctgtccaagtccaatgtcacmctaaagctaaagtctcctagaagaacacagtgagccttgggagatgggtgctccagccatgctccactatgcctaaccctctgggctctgaatttgcttgagtcctgccccaccacctctgtaagcagcttttcctgtcagctcaagtgtccatgggaggtatggggtctcttgctgctaggattacagaagtctacagtaagagcaggtcacctgttcaactcacccctttcccaggagttgctgggggttaggaatgagtcctggtgctcagctgcctcatgcaggcttctcagcttcctccctcttcaggccagcacctgcgtcctccctccatccactctcatttcttccttctgaagatctgctctgagtgtgccagtcctcccatgtcctagtctcttggagggagatgtgtttcctggctgtgtctagttgactatcttaaattccactgataattcttgcagctccaccagaggggaagcgtgaagtcgggggatctttcaatgggcccctgctggtaccttagatctgggttcaggcaactccttcgggagttctgagtcttctctgagacacctgtgtagggcaccaattatcgtcgacaaaaaacgtcaaaatttatctttactgattcaccttcctgtcagcttccatgggttcagctctctgggagctcctatctagcttcttgatttggagcttagctatttcatttacagctttttcttcttatctaacatatgcatttaatctatacatttttctctaatcactgttttgtttcatccacaagtttgatgcattatcttttcattatttttcagttcaaaacattttctcatgtccttgtaatatagtctctgaccccaaggttatttagatgtgttaatttctaaacaattggagagtttctggttatttttttctcattaatttctaatttaattccactgttattgaagaacatactgtgactttattttattttacttttattttttattgttttgagacagagtctcactctgtcrcctaggctggagtgcaatggcacaatctcrgctcactgcaacctctgcctcctgggttcaagcaactttcctgcctcagccttccgagtagctgggactaaaggcgtgcgccaccatacccagctaatttttgtatttttagtagagacggggcttcaccgtgttggccaggctggtctccaactcctcatctcaagtgatccacctgcctcggcctcccaaagtgctgggattacaggcatgagccaccgcacctggcctcatactctgactttaatcttttaaaatttatttagactttttaagtgtcccaacacaggcctatattggaaaatatgttataggtacctcaaaagaatgtgtaaatttgtagcgtttatttgtccatatatatcaattaagttgtttaattatgttcttcaatattctatgcctttaccaaattttgttctattgttctattagttagtgagatgagtttaattctccagctatgaatatgagtttatgagtttctcctagaaaaactttgtatattagtttctccttttgattctgttaatttttaccttacatattttgaaattatgttactaggtgcatttgaatttaagattttaatatcttcctgtagaattgacctttatattgttattatttctttctctttatctctaatatttccacgatatctaatttgtctaatgtagccactccagttgcctttagttttttgtaaataaaataaagaggcttttgtctggtattttattttttgttttaattggagtgcttacatataatcaagcattaatatattgggttttaatttactatctggtatgcttttgatttgttttatatctttctttctttactcttcatttccttctttcttttggttttactcatttttttgtacattaattatttagatatccatttttgaattatcctttttaattttaatgcatatccttgacttattactttctacctgaagaaggcaaagctcttataacagtttagcctcattttctgacctttgtgttattangtattttacttgaatattttataaaccccacaagatattactgttactaatgttttagtcaatatttttatgtttatccacatatttatgattcctagtgttttcatttcttcctgtatttgcatggttccatctttgttcattcccatttagcctgaggaacttccttgcatgtttctcatagtgtgggattgctggcaagaaattctctcagtttttgtttgtctgaatgcaggtttatttcactttcaattttgatggatattttcactgggtattgaagtttatttcagcattttaaagataacattccagtttttctgacttctatcatttccattgagcaatcaagcataagcctattgttgattcagagtagcttttttctctagtagatatggacagaagagagaaaatattcatggaaaagtaaaaggcaatgttatttattatacccgattacttttcttctctaaaatattttatttagattcccttgttattgtaaagcttattttattaagagaagctttcttctatagaaaaatacttmagagaaaatgcctagtatctacaaatctgtgaccatcaatacttccaaggagatgatgtgcttcagtgacttccctgtccctgatcattttcccaactacatgcacaactccaaactcatggactacttcgggatgtatgccacacactttggcctcctgaattacattcgttttaaggkaaaatctaaatgaatcattgcatagtaratgtgtgtgtgcatgtgagcacacatgcatgtatgtgtgcagacacactcagttgtacacacatgagctatatttggcatcttcaggtatgatcagaggaagagatcatcagtgagcttccaccctagaaaatcaccacttataaagaagtaatgttttgaatatttcacttgaatataaggttgaagaattttgcccaacagaacctattctaacaagactttggtgtggcattgtaagggtcctttctgtcagccttaaattcaactgttgaaggacttacaatagtggcagtagtaattgagccatattatattgtgtgtaagtagaataagaatgaaggtcatataaacaacacaaggaagacttttttcagatccatgtagttcccataatctaccactgtgaccccctactcacacttaaaaatctatctctatagtcatggtgggatattaattcctgtctgaaactcaaaagccaagtgcagggaaactggagaagtttgtgctaaaatatgaaaaatataaggaatattagtctctttcatgtggaagtcatcctggaaagatatttttcttgcagcttcagtcactcctctgttttttccccattaagtatcaactatttctatttctatggaaaattggatttttaaataaaatacccacaatatcttgaaaatgcacacacggcaaaggcagtcactatgggagtgggaactaaagagagagcaaatgcctctgatgaagatagaagagtctcagataagttatattactcagactyatggggttttggggaggagggattaaacctgaggackgtgatagtgtatcatcttgttctcagactgaagtgcaaagtgtgaggaagcacccagatttttctatcaatggacaatgggaygttgttgtggagactgaagagaaacaagrgactttggtctttgatggggtcttagtttgcagtggacaccacacagatccctacttaccacttcagtccttcccaggyatgtcrctaagaatctgtttggtagaaaagtactttccagataacccacagagcaaaatgattgagcatgaactttattactagtctctggtcacattgaataacaaacaactaaatgcccaatatttctgttaacaggacaaaactaaacaacaaaaataggcaaacacataacatttgtttattackttctatagttttaaatagattctaattaatgataacaattagccctggcccactttcaactggttttagttttgtgtccattcatcttatctcacttcctttcagagaaagtgaaattactaaaaataagggacaaatggtaagcaaatcaagcaaaaagctggcaaatccacaaacttagaaattttagagtatgagacaaaattttaaataacattcatcactggtttgcagtggttgataaaaacacactggcaacttactgtttcctttgaattctgtttgataaaatggtgcccatctcaaatgagattattacttgaaaaaacaaaacaaaacaaaacaaaacaaaaaagcttccctatcccctctaactaaagcctctccctttacttctgatccctttcccctccctttacatcaattgctatcagaagtcaatcaagaaatacttgatatctcagtgcctttccatgatgtctaacaagccatcataagaaattctttggaggttgaggcaaactgaaaacagaagagtcctagatgaaaatcaagggacttaaacttgaattttggttgtccaactgactagctcagtcatgtatgacaaatacctgacctttctgtgtctgcacaccaacacaaacatttacaaaataaaaatacctgattttctaaatgttaaaatgcaatatattctggaaattattatataattataacaaaatatataggttatattaataactgtagtatatgtatcagcttctttttgacttgcttcctggctgagagacataccctacagagacacttgtgggacatatatattttaataggtttcaggggacagagatrcaaacacgcctagagtgagacaatgtccgagaatgccagacacagattagggctgttctgaagctctcagcagagccagggacaacatgagggtattaggcacttggaagtcagaggagatgtcaagttgatgaagaaaggccctatacttcctcatagaataatgaaacaaaaccaaacaacaaccagtttccagcttcatcattttgcctaagactgcagaggacaatgtaatcatgaataaattagatcatagtgaaattgttgtgaaactttcaatttggaataggtccaagacagatagatctactatttactaaatactttatatggtcactagtctatatttagcatctattggtactaagtctgagtttactccctgctttcctgagctctgtgaaatataaaattacatttttaggacatagggtaatgttccatatagctaacccagactcaaagtcttgctcttccagatgaaccagaatataactttctatgtgttgagttagcaatgtgaaaaatactcctaayaataagaaatgttcttccaccacaggcattgagaaatttgaaggctgttatttccatagtcgggaatacaaaagtcccgaggacttttcagggaaaagaatcatagtgatcggcattggaaattctggagtggatattgcggtggagctcagtcgtgtagcaaaacaggtttgtttgttttgaacaacttcactaatggaaacacaactttcactagtggaaatctccgcatttataggtgccatccagaatgtaggtttagtctgtgaaggaccagaaaagaaagtgaaatctatggaccctggcctcaaggtgtttaaattcatggggagcagaggataaatgcaaaataaatccttcatattcacagtggaaaaatacatgtaaacaaattactattaattgagccagttcagtaaaatattagcatagattaaagaaaatgttagataattaatctgacttttttttactgccatagcagtgccttagtcctgaaatagaattcaaatagtggtaaagatgagaaattgcaaatccatctgggatcagcgggttttggtggtagaattaaagaacagaaaacagaggagaattaatgatgatgataaatatgtaattctcttgagctaaagtattatgttgtatctacaatgatgagggaagataaaatactaaattttgctttagacatagtttatttcctgcaaaaccaagttatctaagacttccatttatgcttgattattcaatattctttcttctcttaaaaaattaataatactcagagtttattaaaaaaatgagatactttcacattcaggattrctggccacatttaataaagccttaattaataaagcgccctacctatgaggatgttcagatatcctgattatcgttacttatttgtctttatttgtcatcatttattgttagtttttagaagaaattactaagtgaattactgaagtttagtttattttttaaaaaattaataagcatttaaaaaggtaaatgtttggtcactagcacccatctaatctatcttgtactttacagatttgaccagtaggaactgagattcaacgtccccaagactgcaaaagtacctacaatcaaacaaattaatatatttcctaattggatcagcatgcagacaagtttacaaatatattacagaaagatttgaagagggattctggttacgttcagttaagcaggacactaatcctgaacaatctgatgtattaaagtttctaatgtttgtatctttggtttgatgcatacaatagagtggaagtctgtagtagttaatatgatgataattcgcttctaaatttaaatccttatttatatatgaagcatagctatgtcaatgtccagggaagcatttttaaatagtaaatcagaaacatgtaaactagtgaatacaattttctatttttcattcagaaatttgttgtcatagatgcagcctttatctggaaatcagtgggcagctctggtcaagcacagcatggcgaccactgtgtagtattttaccacctaatccttagtagccaacactgttaaatctgcataatgggtagcatatgaataaaataatatcttgtaaaatgttctctctctctccttcactggtttgctctatctctgcctccctcatntattccttagtactagacgtggatcatggattttacaccgtgtttgggataatgggtatcccatggatagttcatttttcactcggttcaatagttttctccagaaaatactaactacaccacaaataaataaccagctagagaaaataatgaactcaagatttaatcatgcgcactgtggcctgcagcctcagcacagatgatcaycaaggggccttactttatgcaattatgtgtatgtgtaaaagggaagttaccntaaagacagttcagcttctggcaattaacatgtatttcggtcaagtaatctcatacactcgctaatataaatcacttatattatgacgtatataatatatatcattgcacctaaatgggtcagacaagtgtctggagaacagcttcaggaacctccaagatgagaatgggagartggcagatcttggaaagaacttggtgtggactttggtaaatgtcaaagtcagcccttcatgaagaatgcctggcactagcactgcacaggttaagaaaaatatgaaggagtaggctgagtccttcctgaggccaggaaaggactaaaaatgaggagacaggaaggccttctctatgtacatcagcaagagaatgcattactggtttctatatcttggacagaaagaagtagtcctcttcaccttttacygcctgtagaacagcgaccacaaggagcattctgataaccagacatcagccccaatgagctatcaaaaatgtaccatcccatgtaaatgaatcggtatccagagaaatgattcagaacatcagagcacatgcctagctaggcaaattgaggaggaaaaagaagtcaacttgcattggaataggaagagatcttaaggggaattcaagtgaaacatgaaatattattcagagcttaagaatatcatttggcaactaaagacaggagtagataaattgagggaaaaatggttactggatagattaagagaaattggaataggtggagaagacttggtgcttaaataaataatagaataatttttttcagattgaaaagagaccactgaattccaggatggattgtggacacacatgcacacaaatatacccgttcacatacatgtaccatcatgtaggattcctccattgcccctacttttttctytttcctgatcaagagatatcagccagctgcatgttttcccttgcaggcctaaacccaggcctgggccttgaacattttcagccactgataaaggtatttaggttattgccccaaacaccaaaggatactaaccctggacctaagccagattccttaagctctcagataaatatcataacctgaccctctcactgtggatatacctaagcagaacatcccttgtcttattgtccatcaccaggatacacagcagcctcctctgtacataagttcccctagtaaacactttgcaatgatcactctggcatttagtgcttctttcttcagaatcctagtcagtttcatctcagaacaatttgaaaccctcccctgcagaaactcccaagccacygctaaaaaatacaaaagatagatgatagatagatagatgatagagatagatagatagattagatagatagatgatagatagmtagatagatagatagatagatagataatagatagatatattccatctgggattgtgtaatgtaagtgctaaaaaaagactttaaacaaaggatgtatagcataaggaaaattctaataaatgtgttaaattgcctcaacaaactcaaggagtgaagaagaaagaaaagagaacaatgagtgacttgactagagctacaatttagaaaattaatctacctggtggaataaaaaaccaagagtcagagattccttttaattttgagtttttgtgtttgtaagaatactttgcatattacagaaatcaatactttttagaatcatctgttacatttttttctgatcatatcattttcccattgatttagctttttaaatacagagaaatcttaactttcaatactgatatatttccatctcttctgtcataacttctgagtttttaaactagatgaagaaggtctacccagccccaagattgtaaaaatagtctccaaaatttaccggcaagattctcactttttaaaaattttgatacttacgtctttaatcaatcaagaatttattttcaacctggtaactataagggtcgaattttatttacgtatgtctagtaatgctcacattaccctcagattaagtagaaaacagtggccttgcatttttactctctactccttcccttaaagtttcttaaatcaaacttagctccacacgtttctatatatgcttggcttgtctagacctatatctctgttcacttctttccctctacctcattttcagtctaggtcttacstacctataacagatcctcccactggttgttactgagtagctcctcctttcttaaaacagaagactgtctggacaaggcagtaaygtgacaccgttttctctaataasagtgagtgaaaatccactgcatggmgtttctgagaaggcaaatgttttcaacataaatctttgcctctcctctttctcattgtccctctttggaatgttgtttcaatgcttggaggtacagttctttaagacaacaatttgccatttagcaaatatttgaatgggtacttatatcaggcaactttatagctaattctgctacagacatatttattatatatctaacttgagtactgattttgcctacaaatgataagaatttggtagaaaataaggtggagagaaggctaataataatttatgacatcttttcaaactgggatccatagtcatatatcatttttccctcaattctaagtagtttaaaatattttagcactaaaacaaataagcattatggcacagaatcaaaatatacacragttttcaagacaatgtaagactagaaaaaatgtagagctgaggtagccactaaagcacttaggtgtaaaattacccacttctgccattagaggcaaaaagtaggataggtacagagtcagaggaaaaatagaagttgttggcttcaatcccttctcatatgcattattttctttttgtatatttgcttactcaggacttttatttttacatacagggctttaagtcagcatccaactgtcagtgatgacctgccaaatcacataatttctggaaaagtccaagtaaagcccagcgtgaaggagttcacagaaacagatgccatttttgaagacagcactgtagaggagaatattgatgttgtcatckttgctacaggatacagtttttctttttctttccttgatggtctgatcaaggttactaacaatkaagtatctctgtataagcttatgttccctcctgacctggagaagccaaccttggctgtcatcggtcttatccaaccactgggcatcatcttacctattgcagagctccaatctcgttgggctacacgagtgttcaaaggtatgtgaataaatgtyggataaaggcctaatatttcacctaaagttaatactctgttttttctyaacactagttctctcttttcagcaaaatgcacccctcttattcctaggaatcctgacaaactctgaattttctcttctagggctgatcaaattaccctcagcggagaacatgatggcagatattgcccagaggaaaagggctatggaaaaacggtaaattaataattagtagcaactagttggagaccttcatagggatcacaaaattttaaatcttaaattctaaatatatgcttcatctcattgaattatgcaggcatttttctccatttcctacactatattgttatacaacaccaaaacaagtatgaatcttagttccctaactcagttttgcaacaaatagtcatatatttattctctttaagtcatactaaatttgaatttaagccctctatatcaatttcagtcattatgaatatttctcccaggatctcattatgaatatttcttcccaggaactcaagaagcttatgtgatttcccaaaatgtgagaatagtttctgattttcaccacatcgtgttctttactgacatccttgttgcctaagtttaaagtatacccttcatgtctggaggcttttggcttccctatcacaagtagagtgcaggaatccttactgagaatgggggctccagctaagatgggcttggagctcagcctccctaggaacccacacagctactctctctgacatcttgccctagattcctagactttttcagaccagttttcaatttcctgctgtgtgaaatctctccctttcctctcttgttaacttaaaatacatttatattattcttttccatgagcccagaatttaagaaataacaaactagaaggggagttgtcttgcaaataaggtacttctttggtcatgtaacaaaaaatatctctgaaacaaggsaacaggaaaggcttggccacttttgcagagagcagaagaaaggaatatagatagaaaagatacaaattcatatcttaataaataaccttgccacattatttcagcattctaaagactttatgtgtgtgtgtgtccatacaaagatatgaaattcattcccattaactgcccccacacacagacactttacagttttacaaactttgcaacacagagaaaaccattcgttgaaaaggccttcaagtgttgcactcatcaatacttggaagaagaagtgaattcattaaaatgtattttrtgcctattgtattagtcatattgctaagcatttccaataggattatgtacaatgtaaatggagagcaatttaaatggcaacactgctgcttcttcttatgtaacagtacctgaaaaattgtgagggctacaaactccatgttatggggaaggtcctacaacatgaacaaaagttcaatacatgcagtagaggtgccagctcccacacatctctaagatgacactttgtgcattcctgcatcagaaagacakgctacccttgccctgtgttgtacagcaggtgtgcacagggctgctgctatctcataaaataagtttttgcaaattagaaaaagggcagcccttcctcaggacactttacttccaaatgctggaagtcaaattctcattataaacatcaaatctacaatatctacaatgcaaatggggcctctaaggttacgcagccccattgcatcatgcaatgtatgctcagagttgaagcatctggggcaagggagagctacccaagaagctgccattctcagcagtgctgcagagtcaccttgctctgcaaaggagactacgttccccacattcttattcccattgtggtcatcaaactcctggagccaggttatcaatgactgctgatcatctatcccctggttaactacaaagacacacggagggtaaaagttaaaaattttccatcctgccaacatmgtatacacagaagtattttactggatgacaattcttcattttaaaaaatggacatcttaaaggatagggatcccttcaaacatcatcagttcagtcaccatgaagggacagtgagcatggaaacttggattgtgagtctgccctgccrttcaatgattgagtgatgctgggtttgtcaattcagctttctggttctcagtttcttcacctctaaagtgagtagaaggagtttaaactttttgtgattcttgkatgatataaatctctgtccagggactgtgagtcttctacattcttcccttttgtttcagatatgtaaagacacccygccacacaatccaagtgratcacattgagtacatggatgagattgccatgccagcaggggtgaaacccaacctgctcttcctctttctctcagatccaaagctggccatggaggttttctttggcccctgcaccccataccagtaccacctccatgggcccgagaaatgggatggggcccggagagctaacctgacccagagagagaggatcatcaagcccctgagsactcgcattactagtgaggacagccacccatcctmacagctctcttggataaagatggccccagtgagcctggcatttctggctgctggcttggcatactttcgatatactccttayggtaaatggaaataaatgaaagaacactgagggggaaaagcatggaatagtttctactcatcctgatcgttatatcttttaaagtcaatagcatatgtccaatattatttagtactactataactgccataaggaaatgtttagatagactttacaagtagatttattatttttaaaatgggtataattatatatattcataatgttatgaatgcacaagaaaatcttatttaaaaaaaatcctgtttaagccttaaaaatgatgctgcaacacagagtatacttaaattgttttcattaagctgaattcttcttgtagaaatttacccatggtgaaaccctgtctctactaaaactacaaaaaattatctgggtgtggtgctggacacgtgtaattccagctacttgggaggctgaggcaggagaacggcttgaacttgggaggcagaggttgcagtgagctgaggtagtgccagtgcactccagcctgggcgacacagtgagaccctgttatcaataataataataataataaaataaataaaaataaatttacacataaagttttgctttttcactgattttatttttaaccttaaccttcctttcgggagattctataaagttctcactcagaaacgaaagttcattttacagcatagaagttgagaaacacacatttaaatgttttaggttttaatttactagaaacaaataaaaatgcttttcttttcttttcaattcattcacaaattattcttttgaagaaacaactaaagaaaaaagtgcaatatatttcagaagttttaatgatttaattattctaaacttttaatatttagcacaaagcagtcactatattctattaagctaaagctatgtggatatctaagtaacaaactcaacggcatgctggctgacatggtaactttgcctggcttttgaggtgatcctgtccctatgtagaagaggtgacttccacactgttgtgatttcgaggatgccagaagaattctctgccccaaatgccttctcccccgactgactatgtgaaatcctccaaagactcagcctattattcaagaaaggggtgttcttcctgtcccccagttaaaatcaaaaccaccatggaatgagagtgtgaaaactgagtggggtgagggatgggaattgagcagcctgcacagctgtagcattaagaagaaacattggtaaaatatactaaaaacatcataaagagatttagatatttactaatgtctcataatgataaactggacatttattacacacagcaaaactttattacacacagtaaaaaaaaaaagtctctccacatctctctcagtaactcaagtagaatggtggctgccttatcccacaatacatgcatgagcacctcagaatgataagaacaacattactacgaacaatataattactcacaactgtttaaacaactaatgctcagaacctgtgattatgttaccacccatgggaaaaaaaaaagagtgactttgaagacgtgattaagatcaggatcttgagatggtgacattatcctgtatgaccaaggtgggcccagtgtaatcacaggggttcttaaatgggaaagagggaggcaagagagtcaaaggagatgtggcaaaagaagcagaggtccggggaggccattgctgcctttcaggaggcagaggaccatgagtcggggaatgcaggcagcctctagaaaatagaaaaggaaaggatcaagttattccctacagcttgaacacagccttgctgacaccttggttttagcctagtgagactactgacctccagaacaagagaatacatttgtattgtctaagtcactaaatttgtgataatttgttatagcatcaatcagaaattgatatacttcctaagtgtagaaagacagttaaaaactggaacaaaaatgttaagaccattggtttaaaaaacaatgcttatgtttataattgttgtactttagtgaccataaagaatgtgacttaatctgaaaaataaaaagccttcaaatgccttcgttttatagttttttccttcatgctttgttagcatgtttttttacactggattctataagcatcatcccactggtcagtaaagctcaaattaatatgggtaaattaatatgtgttaaacttttttccagactaaaagtagactaaatttggtatagcaaataatgaagcatttcaacatatattatctagtttaatcatattgtaggaggatgagcaatggtttttttcccactttaatctactttttaatacgtgaatgaacaaccaccttgtgggaaaaaagcagaggcttagagatggttagaaaatatggctaaaggtggaatcttggactttttttttttttttttttgagacgaagttttgtgttttgctcttgttgcccatgctggagtgcaatggcgcaatcttggctcactgcaacctctgcctcctgggttcaagagattctcctgcttcagcctcccaagtagctgggattacaggcgcctgccaccacgcccagctaatttttgtatatttagtagaaacgggatttcaccatgttgaccatgctggtcttgaacttctgacctcagatgatccacccacctcagcctcccaaagtgctgagattacaggcgtgagccactgcatttggccctttctacatacagtctatcacacagtaccagctgcttcactttacatgggtatgttttggtactctgcagaaattcatctgcctgctctcccctaatcttctaaacagatctgcaactttcaaccaaattacagagtgctttttttaatttagaattttttcatggtagcttacttttttattattgctttctttgctgtacaatgtgggtttatgtaatacatagttcacatatttaaaaacgaggtatactgaaacaatgtatcaatgctgactactttgatacatagtacatgttccaagaacaaggtgtagtcaaatgcatcctaattcatgaataccaatttattttgtaataatacatgtgtttcaagaacaagatgctttcagatgaaccctaactcatgaatgttaattgctttttaatattacaagccccacaagaacagagtatgcctggattagcctcctctgtgagtgagcctcattctcacacccacttatttcctaaatattgatgatccaagcgtctatcattccctccttccaagggttatttcattcaggtacaatcttgcgctgcaacctaatttccatatcttcatctttcagcgtagacttctctcctgagctacaatctcatgtttattcctgtcttctacaaaagcatctcagactctcatttttaaaactgaacttattttatttccaaagaaactgctcttctcccacactccttatcttagctcatatcaaaaatctaaaagtcctattatactcctttgtctcttgtaatgggatgtaagtttctgatgcctgctgatgctaccttctgcacatctctaaagtctgtcccatccttttcaagctcactgccattgtttgagttcagcttatgatttcccatctcgactattgaaatagactccttatccaagcccatgccatctgtctagcctccctccaattcatcctccacaacaacaccgtggttagatctagagggaaaatctgatcctcttcctccttacatccccttcagccaggacagacagtacccttcgagaatttccctgcaccgacrcttccagccttgctcccagacacctgggataagcctacactccaggcataccagctgcttctaagtccctgaataggtcacgttcatgttgactccacatctttgtacagactattctgtttggaaaatcttctttctcctttttctcacttgtaagctgctattcagtcctttaaacttggctaaaattacaactcctttaagaactgttttctggcctttacttcccttgccccattagacaattgatatgaaattaagaaaaagtagaaagatagaaaagattaaaaacctagacactactgtgttttgggataatgataatgggctcaaaacagtgattcattgctctaccaggagaacaaatagacattgcattacttaaaccatctgcaaatgcccccaaatctctcattctgttaatgtgtctctgttaggtttccatcactgttgtaataaattatcacaaacctagtggcctaaggcaacatgaatttattatcttttatttctggaggtcagaagtctgaaatcagtttcactgggataaaattaagatgtcagcaggactacattttttctgggaggttctaggggagaatctcttccttaccttttccagtttctggagactgcttgcattctttggctcataaccctttctccatgggcaaagccagcagcatctttttttctctctgacttttgccttatctttacatcttctttcgctaactctgatcctcctgcttccttcttataaggacccatgtaattagattagacccacctagataatccaagatagtctccccatctcaagatttttaacctaatcacatcctcagtcacttttgccatataaggtggtatattcataggttctgaagattaggacatggatatcttttggaggtcattattcaatggtatgaattatatatatgtatatataattcacaatataatatataatgatgaatgaattatatattgttatagaaatatatcactatattctatatgaattataatttatatgtagaatacatgaattcatatacattatatgtgaattatatataaatatatacttatgaatggattatatatacatataattcttactgttgaataatggcctctaaatatatacatatatacatatgagcaattcatttttcctggtaattaacaatttaaaaactgaaacagaatggcaacaaagaggaaaatatggtaatggctttgcttaaaaatgtctccataaatcacaagccaaattcaggaaaaagattgtacatattttctgacataggaaaagcaaaggaaagaaatggatactgccataagctacactaaacatcatttcttaaatgctagcaaaacatatctccacaggaaccttgcctccagaataactaagcccggaaaaacaaagagaagttgagggagcctcgactgctagctatagttgctaaatgagggtagaaaacagggttagtaatggagaattggaaataccatgaggatttcctttagaggctatgatgagaatttgtagatgcaaagaaaaaaaaacactttaggtggtgaaggagaattttaagtaacaaaagggtggcttaactttattaatacttaattatattactccaattcccctgcttctttccagtaacagtgttgaccccagccccagaatatggtctccagctgttttccctattcctcttagattttgtcaagttaatatgcatatgcaaaatcaaaacaactcccccagtttcctccttcccatagcccctctgcctattccccaactcgccttcctatgagaacaccaatgctgagaccttcctgtcctcatttagaggtatcagctccagtttacactcatggaatcatatcagaaaaattgatgggtcactttttcacaaagaattctgaagctttattcaggtatccacatatagaacattaaactctgaccttctggaggacaaggactttgttttattcattgttttacatccagcttctaaaacaatgactagtatatagttcttgaatgctcactatcaaaattaagaagactagatctcagctggcctccatccccgatttgaacctatcattatcaaatcatcaggaaaataaatgacctttagaacagcacttgttaccctcagtttcaaggggtga

SEQ ID NO: 95723 - DNA, 33593 bp, Homo sapiens
  misc_feature (1)...(33593): n = A,T,C or G
gtgaatacattgggatgtaaaagagattggtggttgccagggtctgggagaggggagatggggagtggctgatggaacaagccatatggaaaagcattccaggcattgggagcagtaagtgcaaaggccctgcagtgggaggaagcatggccgattaaagaacagcaaggaggtaggtcggcttcaagggagacagtggtgggggagaagctcagagaggggctagcaggactagaccctttagggctttatggggcactgccagggcattgccttttacttggagagagacaggatgtcgctggcagctttgggcagagaaggatgtatctgtcttatgtttgaacacaatccctctggcaggagatggattttaaggggtagaagtagggaagccagtttgggggccactgtgttggttcaggcaagaggtaactctgacttggaccctggtggcagcagctgccaaggggaaaagtgtccaaaactgaacctattttgaaaacagctcatcttcaggcttttggcctcagcaactagaaggctggagttgaattttattgggtgggggaattctgtgggagggagcaggtttccttctactctttgttcacatataaaaagaagttataagagaacatagataatagtttaaatttttatttttttctgaacattcaaccataaacatttatcaagatgctaaagtcttcataatactcactttaaaaatgttttttttggccaggcgcggtcgctcatgcctgtaatcccagcacttgggaggccgaggcaggcggatcacgaggtcaggagatcaagaccaccctggctaacatggtgaaaccctgtctctactaaaaatacaaaaaattagctgagcatggtggcgggcgcctgtagttccagctacttgggaggctgaggcaggagaatggcatgaacgcaggagaatggcgtgaacccaggaggcggagcttgcagtgagccaagacagcgccactgcactccagcctgggcgacagagccagactccatctcaaaaaaaaaaattattttttaattttatttttagagataaggtcttcctctgtcatccaggctggagtgcagtggtgcaatcatggctcactgtagcctctaactcctgggctcaagcgagccttccacctcagcctcccaagtggctgggactacaggtacatgccaccatgcctggctaaatttttatattttgtagagactatgtcttgctatgttgcccaggctggtcttcaactcctggcctcaagtgatcacctcggcctcccaaagtgctgggattgcagatgtgaaccaccatgccaggccattgatcacttttgaaggctgcatgatggtccacttcattcatttcccctaaattacataaccatttcttctgttaatcatttagactgcttttttctctttttagttttcaaaattaaggataattgtataatgaatatctttgtgttgatggctttttctttctggatttttttccccaagagtttaattctcaggaatggatttactaggtgaaagagtaagaacagttaatgtctctcttaagacacattgctaaactgttttccaaagagattgtggaaatgtataaggccagccaagcagtgcgccataaattggatggtataaggcattgcattttattaatatttttaaataaaaataaattttttttagaaatttgcatgcatttgactattgttaagattgaacatttatttaaaagtttatttggctgtgaattgattattcaggtccttttcccgttttgttttgtttttttttttcccgagacggagtcttactcagtcacccaggctggagtgcagtggtgtgatctcgcctcrctgcaacttccacctcccaggttcaagtgattctcctgcctcagcctccccagtagctgggactacaggtgtgcaccaccatgcctccctaagttttgtatttttagtagagagggggttttactatgttaaccaggctggtcttgacctcctgaccttgtgatctgcccgcctcggcctccaaaagtgctgggattacaggaatgagccaccatgcccggcctatgttttttgttttgttttgtttgagacagagtcttactctgtcgcccaggctggagtgcagtggcacgatctcggctcactgcaacctcggcctcccaggttcaagcagttctctgcctcagcctcctttgtagctgggattacaggtacccgccaccacgcccagctaattttttgtatttttagtagagacaggctttcaccatcttggccaggctggtcttgaactccggacctcgtgatccacccacctctgcctcccaaagtgctgggattacaggcgtgagccaccrcgcccagtccccttttcccatttatttactaaagtcctaataccttctttaccaatttgttggatcttttcctaacttagagatagggatgaaccctttgccaatcatatctttaatgaaaataatattttaaataaagtaggaaaactgttgaaatgaatttcttttgtaacaaaaaataaacatttggtatgtgaataatgtatattctgttttgctgatttattcacttaaaaattgctatcttgattttattatttatttatttgacacagagtctcgctctgtcacccaggttggagtgcagtggtgcgatcttggatcactgcaatctccgcctcccaggttcaagtgattctcctgcctcagcgtcctgagtagctgggactacagatgcacaccaccacccctggctaatttttgttacttttaggagagatggggtttcaccatattggccaggctggtctcaaactcctgacctcaggcgatccacccacctctgcctcccaaagtgctgcgattacaggagtgagccaccgcacctggcctcttgattttaaaatctttttttttttccttagagtgaagcacacctggattggatagtgcttgttattacagataagggtgcactttctagattcttctcctgagtggcaaagttttcccaccgtcttgtccaaacatactttgctgatggtatctctgggcactacacagtgcaagggacaaggaaaaagggcttttccagaggagagtgacctgcatcttggaggaactctagaacatgttcgaggaatggtgactggggcttctggagccaagggctgactcagggaacagatctcagctcaaggtgaggtcatttctgtttcctgcatgtccctccagctgctgacattttacctcttcaaggactgattcaaatgccatctccattgygcaatcttccttgatcaccccccaacttccatctgagacttctgagtttctccctcactagatctggagggtaggagtgggtcttgttcattttttgttctcacagtgcacttgctagagaatggcttgggaagcctttgtaggattggactggccctcagcgaaagttcagcagttaggagaactgccttagtacttaggaagcttcctagtgtgaatgccagcatcatcacttactagctgtacttcagttttctcatagggttgttgtgaagattaaatgaagactggacaaagtcagtcaatgtttatttcacaatcactgagcagcaagtattccttgtgtaccagtctctgttccagaaacaacgtcataagagatcatcaagattatctctggacttaaggcatatcttctctctatctcttttgagacagagtctcgctctgtcacccagactggagtgcagtggcatgatctcggctcactgcaacctctgcctcgtgggttcaagcgattctgatgcctcagtctcctgagtcactgggattataggcatgtgccaacacgcccaactaatttttgtatttttagtagagacagggttttgccatgttggccaggctggtctccaactcctgacttcaagtgatccacctgcgtcggccacccaaagtgttgggattacaggcgtgagtcaccacgcctggcccaaagcttatcttctcaatggcacacagcagaagagaatgtgatgtttcccaggagaggtgggagccaagtgctagagggctctgagtaaggagagggggacacattcgtgggtcttgggggcttttacaacttttactacttcccaacatgtaagctgagtcttgacaaggagctagaatttcagccagtagaagtggggcaagagggcattgaggctgagggaatggcacgaccataggcacggagaggtaaaatatgggaagcatttgggggctggccagcagtcctagttggcaggcgctccaggtctttggggctggaaggagtggtgggaaatcaggctgaaaaaagacagtggtgtgagaggagagtgcaagggagagccaggaggtttcagagccggggcgagccctggtcagagctgtgcctgaaggggagggcaggttggcaggtgaagaggctgttgtaagagcctgggcctgaggtggtctggcccgaaggagggcaggggtgacattggggatggaggaactgtgggagaacacttcaggatgggactgccagggcctgatgaggggaaggggcccaatggaaaggggttgataaaagccctccttcctgacaaggccacagacttagctgcagtttattatttaggtcataaaagctcttgggatcacttctctactgcactcatcacctctctgggtgggtaggcagctcctctctggatagaactcttcccagggtagggtagcagagacctggtttaaacacctgacctcccctggcacccagctagaggcctggccatcagcaggaactcaggagtttgtgatggacagggagaggacaaggggaaaggtgagtatggatgttatttcttcagagaagcattccctgacctccaggttaggtttgaatcaggttgcctgattttgccttgccatagctccttgctcttttgcttcttggcgcaacagttttaatgacatgtgtgtgacacttgattgaagcctgtctttcctactggacactaagccccagcacttaaaacagtgcctggtgtctagttgaccctcagaaatatttgttgagctaaatagacagattagtagttgcctgggattgaggacaggagcgggattgactataaacggacacaaggaacattttcatatgctcaaaaactggattgtggtgatggttgtgcaactgtttacatttactaaaaatcatcaaactgtacacttacagtgagtaaatgttactatatatacattatacctcaataaagctggtaaaaaataaaattcggccagtcgcagtggctcactttgtgagcctggggcaagcagatcgcttgaactctggagttccagaccagcctgagcaacatagcgaggccccatctctacggagaaaaaaaaaaaaaaaaaaaaagaaaaagaaaagaaaaaacaaagttgggctgggcttagtaattacttgatcccaggaggtcgaggctttgtagtgaacctgttcgcgctactgcactccagcctgggcgacagagtgagacccggtctcaaaaaaaaaaaaaaatcaaaatttgtggaataagaaaattatgtgtctttctccacgggattgtaaattctatgaggagcgctatatccccaagatcctagaacattaatcagcacctagtaggtgtggaacaaacgtcttaccttaacagcgagtcaatgaaccagggaggggaggaagmagctttcccggagatgccggcccctcagtttccgggttcgcctggcgctcagccaggccagtcacagagagacgagcccggcgattcgccagcggaatgtccaggggcggggcagcgagcgagcgcgaagcaatcctgaggcggtctagggggcggggcgttcagggggcgtggccgtgcaggggcgggctccgagcgtggggtgggcgcttgcgcactgccgctgcggctgttgctgcggagccaggaggggaagcgatggctgggcccgcgtggatctccaaggtgagcgctggcaggccggcgtgtggcaggcaggcaggccgcgagggctggcaggagagccggtcgcgtgccgggtgtgggcgggcgcgtgggccagacagggaggcggtggctgcccgcggggacagcttgggagccggtcctggtcgcccgtgccccgcgctccgtggccggctcgcagtgtatgggccgccccgggccgggtcagcagcgcagaggcggggacggcgtcaaggtcaaggcgggggggcgccggccctgctcctgccgagacccggctgccgtcacccgcatccgcccaggccagagcccaggcttcgcgccgagcccgggaaggtcacgggagcctctgtcccggctccgccatccgggccgcttccccggctgcggccctgctgcgggactgatcccctcagcactgcccacacctctcatccgctgtctgcgcggcccttggccggggaaccgcaggtgccacgggcactggcgttgagcttgggaggttttcccaggtgagagaatccgggggcccttttccctatcagattgttttccctttggcgctcttcccagtcagacctctagtgctcttgtagctatttccccttcataggatagggcatcttacacctcggaattaccgtctgaaccttcggagagagagaccagcagagccttccttttacctttcattggtgggaatcctgcaatctggagcgctttagctctccttgacagctcagatgccagagctggaaagggtttcagatcatctatgcagttccgtagcttctcagtggaactaacctgtgcctgaagaagaatttgctcaaggtcacacaggaggtcggtgtcagagcagggagaggaacctaggtgtcttggttcccatttcccaaggtcacatagcaaatgatggtacaggccatcaggcctcaagtctcctgttgctatgaaagggtggtcccctagaaatctataaacaatttaacgtttttctgtaagtttgatactacttttctcccattttttcggtttaaagagaggtccagagatgcactgttatttaaggaaaagatctctgtactggaatttaggagtctcagatttaaatcctagcaatgccactgattggctgtgtgaccctaagcaaattactaaacatctctaagccttaatatgcccatctgtgaatatctatacttacatcacagaattgtttgagtattaaataaaataatgtatgtgaaagcacttggtatgtacagaaggaaaacaaaaatctgaagctttcttatcaatatgtttatctgtctccaacagacagtggttttcatgggcatcattaactggtttttttgttcaataactagattctactttgtcaccctcttcagacccagatttgcttgtgatgataactcttatgtcacatttgctcctaaaagtaaagcaacttctgtgtcactgtgaaaactgaactcagtcctttaatctctgaacttacatttaacacccaattcatctttggtaggtacatttgccttcacagtgaggcactaaagcaacacttgataatgattgtgctggtaaatctgttttgcctttagtgtgatctgcatgaaaaaaccctcatagtaggtattcagaaagtgttgggttgtggagtcagaagatgaggttctctgacatgcactccctgtgtgacctttggcagagtcatttgacttctgggccagcttctcactttagggattggagcagaaggtggctcagaggctgaccccaggatggtggaggtgctgagctggatgccggtttcaatcaggacagttcctctgttgagtttccatttcagrttgtggccaggcatggtggctcatgcctgtaattctagcactttgggaggccaaagtgggcggatcacttgaggtcgggagttcaagaccagcctggccaacatggcgaaaccccatctctactaaaaatacaaaaatttgctgggcgtggtggcgcacgcctgtaatcccagctactcgggaggctgaggcaggagagtcacttgaacccaggaggtggaggctgcggtgagaggagatcatgctcctacctgggtaacagcaagactctgtctcaaaaaaaaaaagattttttttttaaaacccatctcagaacccatgtacaacactatttacatgtttttaagttaaaaaggaaatgagttgtggattaagatggcccacgacctgaagtccaaagttcagggttttggtccaggcttcatgaacctggcctcagtttcctcatctgaaaagtgccaataatgcctatctctacaggttttatataaataaaatgatgtgagatatatatatatatatgcatatgagtattctataaagtagaagtcctgccatctcagccttccatgaagctgggactactggtgtgtgccaccatacctggctaacatttaaaattttttttgtagaggtagggtctcactctgttgtctaggctgattggtcaggtcttctgtcacagagacataagctagttttgtgtgaatgtcttttccctcttttttgggctgggagaggagaaaggactcatgtcaattttttttttttttttttttttttgagacagagttttgctcctgttgcccaggctggagtggaatggtgagatcttggctcactgcaacctccacctcctgggttcaagcgattctcctgcctgagcctcccaagtagctgggattacaggcacccaccatcacacccagctgatttttgtatttttattagagacagggtttcaccatgttggccaggctggtcttgaaccctgacctcaggtgatccaccggcctcagcctcccaaagtgctgggattacaagcgtgaggcactgcgcccggcctttttttttttttttttttgagatggagttttgctcttgtcacccaggctagagtgcaatggcgcgatcttggctcaccgcaacctctgcttcctgggttcaagtgattctcctccctcagcctcctgaatagctgggattacaggcatgtgccaccacgcctggctaattttgtatttttagtagagacagggtttctccatgttagtcaggctggtcttgaactcctgacctcaggtgatttgcctgcctcagcctcccaaagtgctgggattacaggcgtgagccaccgcatccggcctcatgtcacttttatgctctgcttgtcacgaagtaacctttaaatggtgctttggaaaattttattttacttaaagttctgggtcattgtgatgacttaggtgcagtactgctttattctaagatcatgcaagagagatgacaaacatggaaaagactggtccttaaagaagatcattgcaagtattaaggctacttgttggcttggaaactcttcagatagagatgtgactgaggctggactcagttttgtttgattgttgttttgtttttttttaaattattgaataccttctatgagccagggactgttctagacactagatacaacagtgaacaaaacacaaatccttacactcctgggtttacattgctgcccccagcatatgcaggtaggatgggtttacattttaaaatcagttgtttgagtcgggtctttttcattctttctttctttttttcttttttttgtccattacctaggctggagtgcagtggcataatcatagctcacagaagcctcaagctcctgggctcaagcagtcctgagctcaagccgacttagcctcccatgtagctgagaccattggtgtgcaccaccatacctggctaattttgtagagacagggtctcactttgttgcacagcctggttggttgggtcttctgtcacaaggacatgagttttgtgtgaatgtcttttccttcttttttgttcagggagaggagaaaggacacatgtcaattttcttgtcacaaagtagcctttaaatggcctcccttccaatagcccactcgctggtggatgaatcatgccctaggattaacattttggccaatggttttggcattcttttggatttggcccagtcttattttcaatgcagagtcatgactatagataccagaagattagagaataaaattcattcatacctttcttggctgttggttgttaccaataaatatttcagcaaaggttcagaccccagaaaaaaacatcaagataggatataacaaatgtgtctttgctcatgtatctagcaggagaaaaagttactttttaaaaaatttaatgcagccgggtgtggtggctcacgcctgtaatcccagcactttgggtgtccaaggcaggtggatcacctgaggtcaggagtttgagaccagccgggccaacatggagaaaccctgtctctactaaaaatacaacaagattagccgggcatggtggtgcatccctgtaatcccagctactttcaggaggctgaggcaaacccaggaggtggtggttgcagtgagccgagattgcaccattgcactccagcctgggcaacaagagtgaaactctgtctcaaaaaaaaaaaaatttaatgcattttaatacctttggtctatgtacccagtttctttttttatattgtttataataatgtagtatgactttgtaccagttctcaaggactaagttattaaagtttataataaacctttaaaatttatatttctggcatatgatgttaattggagagagaaaaaaaaaaaaaaacacgtaccagtggtaatatcttggtgtggtgggattactgggtaacttttattttatattttgtatcttttcctagtcccagcaaactgacagtaatgaccacattacctatattatcagaagaagcagtaatttatttaaaatctttattctgtatggcatgggcatcagatggtattaaataaactttcttagattttactataaagtgtaatttcttaatattcacagaatagatataatgtataattgaaggagcactggaccaggagtcagaagacctgtatgtgggtttccattttgccaattattcgctgtgtgaccttaggcaaatgcttttctttgggaccagcatctccgcttatgaaataagcaagttgccaggtgtcgtggtgcacacctgtaatcccacctactcaggaggctgaggcaagagggtcacttgagcccaggagttggagactgcagtgagttatgattgtgcctttgaatagtcactgcactccatcctgggcaacctagggagaccccatctcaaaaagcctaaaacaacaacaagaaataagtgagttgtgctctggatttcatgaggaacatcctggctctaaaattaatggtaattttcttagaatatatgttacccctaaattgaccgaatggtcaagaatgttggcacaaaatgatccactcatctgagaagaatctgtatgttgagctgaaaaagtagttttattctaccttcaacatcttttatttgacaacttatattcgttaaattgactttgaaaatatacagtactcaatctaaagtaaaaatctgagtatttaggctttcaaatctgagatagcttgccacattgagctaatacatgagatttgtattcctgggaagctactgaatatatctgtgccaagttgcagcattaccatccatcaggacttcctcgctcttgtttactgtatgtggtttaattctgtgtgtgatatttctctgttgatattaatataggtctctcggctgctgggggcattccacaacccaaaacaggtgaccagaggttttactggtggtgtgagtataattatgtcttttattttttccttttagaagtttctcaagaaagatgctctaacatatttattatatagcattttatctccattcatttagaatttgggaaaattggccatatttataatgtatgttgaaattactggctgacatgcacaaatctgttaggttasttgcgcatttgaaagaattatcttacagctggctatgtaagtttgtcacattaatatcttgagggagccttgttaaaaatagaaagtacccttgagcctgttattttatttcacaatctcattttggtgagacagcttttttcaaaactagtacaagytgagagaaaattgttgagaagcttcaaaacctgctttgcatttttattttatgggcttccctaaacccagtagatngagtgccaattaggaatgcctcgaacatctataagccttgtaggcttatacttgccttatataggctttgtagactatcacagtagtagatcatctattgttcattaaatctgctgcttttagaattcccagcatcagaattctgtgctttaaaagctgataccacatttttggaacattctaagactgtgggtcagtgacttcctatttgttttgatccccgccccrccttttatggaatctgatttggatttcataattcctatactcccatataacatctatgccgtgaaagatttataagaccatagtacattttttcctccatttactttctgtattgtggaagaaaagcagattttctggtgactggatgacatttattattacatgttgggagaacaggaagaagtagccaaagcgttcttttgrctctgcttatgccaaaaatgcaggatggggcttgcacttcaagctcaaggatagccatgctagcatttcaaacgcattctgaaagctaataagatgatcattgctctctgctattatttaattttcaggctatttatttgaaaaaaaaattagcttgatggaggaggttatttttgaagaaataagaggatgtattaatttttttaaagacttcttcaacccgagaaaactggtatgagccttagccctggctaagactgaggtgggagatttgcttaaggccaggagttcgaggctgcagtgagctgtgatcacacctgtgagtagccactgtgctcctgcctggcaatgtagtgagtcctcatctctaaaaaataaaaattgaaaattagaaaaatgaaaaaaataaaaatgtttcttcagttgtacagaaactaatcagaaataattagtccacgtatctgggcagacatcattggaaggcaaaggaccaaggaaacttsaattagtgactttttaaaaatgcagttcaagcaactagaactgaaaaaaagccaagcccctaggtggggtaaagtcccaagataataaaatatgtggttcccaaatggaaaaagaggtgctgatcttctcccttacatatttttatttctgcatttgaaatgctggcttcgttttgcctgaagccttagaataaatcattgctgttacattataaaaacaataattgtcattctaagtgtgactcaggctttgcaggtatgatgacatatactattctttttggttgcagatcaactttgccaagcttatgtagattactcttagatttaagcagacagttttatagaggaactaagaaaaaaatggaagctctcttgataaaaagtctgattttccctgagtaccaaaacagacctcagtaatattttggaaatgtgtctgaaaatgttttgcaagactgaagaagttgcatgagaagctttccaggatcacaatggaaaggaaaggaaaacacttgccttcatgagaaaccgtctaaattttagtgagagaacattgttaattttttgttgttgttgtctttggtttaaaagatttgaattaattggtctctttgcagcttgtctgaaaagaaatatcaattaggaaatctacttggtagtttaatttattttcgttttatgtaaagagtatcatttggttctttttaaaacctctgaactcaggtaaagagtaggattgcagagtctctcctctgttgattcctgcctcccctttgatgacccccsgggaggtatgtttgttttcttaacagcatttgaatcttcctgagacatctsataaagtggatttctctgtcaaaatattcttttttaagccttcaaaaacaaaaattcttactgtcttctttgatgatttcttatgttcaggttcagacagtaactttaattccaggagatggtattggcccagaaatttcagctgcagttatgaagatttttgatgctgccaaagtaagtgggcttaaaaaatacatttaatgatgactcactgaaaagttttcttagccagttggattctgtgaacttttaggatgcattgtacccatttctatgaaatttagtcaggtctgttgttaatctccaccgattgtcactttaacagtgtgtgtctcagtgtttgctactgccattatttctttctttctttyttttttttttttaaatttagagatgaggtctcgytctattcccaggctggtcttgaactctggggctcaagcgatcctcccaccttcacctcccaaagtgcttggattataggcgtgagccaccgcacctggctggctgctcctgttgttgatagtttaaactcctgcattggcatcagttatatgtaaagtaatcaaagtagtactgcagtatttgtggatctttaagtcctgcttgggtttaagatcttttaagccctgccaaatcacccacctttttgcaaaaaataaaataaaataagactagaattgctgtttccaaaatctatacaggcgcttttgaaataatctctttaaaataaaatttctgatgtgttatcaagaatggaatgttattacttctaacagctgagcctttgatacaggtagataatttaaaaattctgtaagtggattcagctgtaagctgcttgtgaacagcaccgtgtctgtctgagctcgtgtcctaggacatgttcagtgtgctagctgtatacacatgaaggatgtaggtagagagaaagggatgcttgtttatacctccaactggtacattcataggttatgcaatacatacatacatatatatatatatattttttttttttttttttttttttttttttgagacagagttttgctcttgttgcccaggctgaagtgcgatggagcaatctcggctcactgcaacctctgcctcccgggttcaagcgattctcctgtctcagcctcccaagtagctgggattacaggcacatgccaccacgcctggctaatttttttatttttagtagagacagggtttcatcatattggtcaggctggtctcgaactcctgacctcaggtgatctgcccaccttggcctctgcaccgggcctggcctatatatatattttaaacaatgtaatattgttttttaaaaacagctttatggagatatcattcatcctttattttttatttttatgtttcatttgttttgagacattgtttcgctcttgttgcacaggctggagtgcaatggcatgatcttggctcactgcaacctccgtctcccaggttcaagctattcttctgcctcagcttcccgagcagctgggattacaggtgcctgccaccacgcccagctgatttttgtatttttagtagaggcggggtttcaccatgttggctaggctgggctggaactcctgacctcaggtgatccacccaccttggcttcccaaagtgcagggattacaggcgtgagccaccacactgggcctaattcatccttttaaaatgtacctttcaatccagtggtttttagtacattcacagagttatgcaaccatcaccacaatctaattttggaccattttcctcaccgaaaaagaaaccccataccctatgcagtcgctccccatttcgtctctctccctccctaccccctcctcctttttcttcccccaccctaggcagccaaccactcatctactttctgtatctgtagatttgcctatttgggacatttcatataaatagaatcttataatatatggtcttttatgattggcttctttcacttagcatgatgtttttaagtttcatccatgtatcagtactatatgatgtttctgtgaaccatattcctctgctacttatgatattctaactatagccactgttaagagcccttgtgaaaagaartaagtgggcaggtgktagctgggagtgatgactgggcacagataatgtagagaatccctctgggcctgctagagaatgacatctcttcttgcatgccaggaaccttctggacctttactgtttttagcagtcacatccaaagttgaaaaagggctgggcccggtagctcacgtctgtaatcccagcactttgggaggccgaagtgggcagatcacctgaggtcagtagtttgagaccagcctggccaatatggtgagaccctgtctctacaaaaaaaatacaaaaaaattagctgggtgtggtggtgggcgcctgtaatcccagctactcaggaggctgaggcaygagaatcgctggaacctgggaggcggaggttatagtgagccaagattgtgcygctgcactctagcctaggcgacagagcgggactctatctcaaaaacgaagttgaaaaagtttgttcatcattgcagtatgaatgccagtttcctttaagtctctccagctcactgtgctctgtgatgtggcatctaggcacctattcagtgggaggagcggaacgtcactgccattcaaggacctggaggaaagtggatgatcccttcagaggctaaagagtccatggataagaacaagatgggcttgaaaggtagcactgaagtagagacgggggtttttacagatttccgctacaggggttacttagttttgaaaatttatgcatttaaactgaataaggcctggccatctgtgaaggtaacgccattcttttatgaagtaactactcatagtaagatgttttattcatttgggacattttttycccccagtaaaaaacattaaagtattactggatgatgccaaataacagtatctctatttaatcttcaactatatatatcttttgcttaatttttacatttgtatatttatttatttacttaatttttttgtgacagagtctcgctctgtcgcccaggctggagtgcagtggtgtgatcacagctcactgcagccttgacctcctgagctcaagcagtcctcccacctcagccgcccgagtggctaggactacaggtgtgccaccatgcccaactaattttttaaaaagttttttgtagagatggggtctcactatgtttcccaggctgatctggaatacctaagctcaagcaatccttctgcctctgcctcccaaagtgctgggattacaggcctgacttagccactgtgcctggcctacatttttattattattttaattaatacatgtttaaggccataattcaaaaatactagcatgtggtagatttaaattcagcataggctttatttttatattttttgagagtctcgctctgttgcccaggctggagtgcagtgccgtgatctcggctcactacaacctccgccttctggattcaagctattctcctgcctcagcctcctaagtagctgggattacaggcacacaccacaacgcccagctaatttttgtatttttagtagagacagggtttccccatgttggccaggctggtcttggactcctgacctcaagcgatccgcctgccttggcctcccaaagtgttgggattacaggcctgagactgtaggccagagcaagcataggctttaaagccacagacagaaccaacattgaatctcatctctgctacttactggctagaaggcttgggcaaattttttattcttattttttcttttttcgtcatttttaaatgacagtaacagagttgctgttgtacggggtgatgataaggattatatcatgtcaagcacatgattacaatgcttgatcctcaggaagttctgaagataagaaacgcagttaatgttccagaaagctcccgtgaggaagtgttcctccttcatttgaatctcaggtagagagtgaactagaggcagaacacatttcacaaggtagccgaggtgggttagtaggtcacacgtgagaccagaattccttctagtgtcatctgggttttcttctgtataacaggccctttgaagaccccaatagcagccggtcacccatctatgaatttactgctgcgcaaaacatttgacctttacgcgaatgtccgaccatgtgtctctatcgaaggctataaaaccccttacaccgatgtaaatattgtgaccattcgagagaacacagaaggagaatacagtggaattgagcatgtggtatgttcactccagattcttttttattcctgcttggactgctttctgtgcatctgggaccccagagacagatctgctttatctctgtgaggagttgtgggtgtttgtcttggtgctgggtgtctggctgacagtactcaaacaaatgtaaggcatggtggttcgcgtcacaagcttgggaatatgccctctgaattttgaatcccccacttcacaggtgcgctcttccgcagatgactgtctctgcatctcagttttcttcatctgtgcagtggggctcataatacttacctcttagggctggagttaacatgaaccccattgtcgtagcagtgtgtgtgattagtcatgctagctggcactgtgcaggcctgccacaaatgttactgtctactccccaccctctgtctcccactgcgttgctgtcacactctttccagcaaggtgggacttcctgtcttgcagattgttgatggagtcgtgcagagtatcaagctcatcaccgagggggcgagcaagcgcattgctgagtttgcctttgagtatgcccggaacaaccaccggagcaacgtcacggcggtgcacaaagccaacatcatgtgagctccttgcgggggccggcaccccatcttgctttgttgtgggagagcagtgacagggcttccctttctcctcttcagcttgctccttgattcctaatatctttgaaaaagaactttgtaacaatccaaagatacggcatctctcttctgtcggagtctcctcttttctcctctgtttttttttttttttttgagacggagtctctttctgttgcccaggctggagtgcagtggcgcsatcttggctcactgcaacctccgcctcccgggttccagcaattctcttgcctcagcttcccgagtcactgggactacaggcacatgccaccatgaccggctaatttttgtattttcagtggagatggggtttcaccatgttggccaggctggtctcaaactcctgaccttaagtgatccgctcgccttgggctcccaaagtgctaggattacaggcatgagcctctgcgcccggcctggagtctcctgtttactgcgcctccctgggcgaatgacaggagcaaatgaggaggggatggtgattcaggtcctggaagctcaaggaaggactgagggttatcaggaaaggaaattggagcctcggggtccccagatgctgtggccatcagcagaggccacatagcgtacgttttagaagtggaatagtgggaggcttaaagtagtgctaacaatacctgatgtgttactccagcaacttaaattctcatccagaggctgttaaagtcctctgaatatattaacagttttcctaacctaagaaaagcattgaacatgcaaaatagtaaaactatttaaattactatgttaaccttttaaagcaattttaataatattagtgggtatttcttcattcttgttagataacactataaaaatatagtcttctctgttatgatcaaactattttacatttttactcttttatactttcagaaggatcctaaaacattttcagcttatattttattaactacctaagaaataattttattgtaattgggatcaggtagcttggcttctggaacttaaatgtcttgaacttactttacttctttgatttgattcttttctttctgtaagacttttttttcagcagtttttatttgattaaatacaggcggatgtcagatgggctttttctacaaaaatgcagggaagttgcagaaagctgtaaagatattaaatttaatgagatgtaccttgatacagtatgtttgaatgtaagtatatattcacacttacctgctactttttatggtgaatggtgtctgtgtgttgtggggatgcagattttgattactaaatgcacaaatgtattccttgtagatggtacaagatccttcccaatttgatgttcttgttatgccaaatttgtatggagacatccttaggtgagtctggctgcaacctatttattttagcctatgatttacttataaacatcctaaaataattatggcttaacattttcaattgagtattgtgaaatagagtatttgttgtaacatatgaattgaattctaacagttcaggttgtgatatgaatgattacatgttgggtggcttgttccttcattgatttgccaaatcattgctgggctctttctccctaatcattattaggtcactcttcccagtttttaaatgtttgattgattgattgattttaaggttttgttatgtatagctaggtaggtgggtggtcattgttactattttttggtaacttttgacataatttcagacttacagaaaagttgtaagaatagtacaaagaattcccttgtactcagcaccctgattccacattctccagatgtcagcattttatcacatttactttattactccttcccactttccctcccttcctcttcctcctctcctttgtctgtgcttctctctctctctctctccccccccgacacacacagacataagatgttggccaaatggtgattttcattttttttttttttttgaggcagagtcttgctctgtcgcctaggctggagtgcagtggcacaatctcggctcactgcaacctctacctcccaggttcgagtgattctcctgcctcccctgagtagttggtattattacaggtgcacaccaccacacctggctaatttttgtatttttagtagggacggggtttcgccrtgttggccaggctggtctggaactcctgacctcaagtgatctgcccaccttggcctcccaaagtgctgggattacaggcatgagccactgagcccagctgtggacatggttttctgttttattcagtgatatatccatcatcataatcatgaatattgatgcataggttgtcctaacttggctgatgggggtcccttcaccatgtcttctgtgtcctttagacacggccctttgttctttgagccttgccttgctttctgacacagtaagatgctcgaggctcatctgtattttcctaacctttgccctggaatcagccatttatccaaggaatgctacttccttttrgtggagaatgataattaaaaactaaaatctgggtgctaggtgagatgttttatttttaaaaacattctttgaaatgcttttcttccgctagtgacttgtgtgcaggattgatcggaggtctcggtgtgacaccaagtggcaacattggagccaatggggttgcaatttttgagtcggtaaggaccctgacacctgaaacagaactcaggtcagaacagcgtgtgaactcaggaggagttatctgtataagtatgctttaactccagtttttcaaattgtcaaaacaaaatgatgctttttttttttctcgagacggagtctcgctctgtcacccacgctggagtacagtggtgcgatcttggctcactgcaacctctgcctcccaggttcaagtgattctcctgcctcagcctctcaagtagctgggattacaggtgtgagccaccacacctggctaatttttgtattttagtagagatggggtttcaccatgttggccaggctgttcttgaactcctgatctcagatgatccatccgccttggcctcccaaagttgctgggattacaggtgtgagccattgcacccagcctatgtttgtttttatatacacycatatataaacatatatatatgtttggtttatctcttcatttccctccaggtatttattatgtatccttccttccttaaaatattttaccaaaaattgactgaaaaagattgttggtccatatttttatacttaaaaaaattactttagctctttatttctccaagtctttatttatttatttatttatttatttatttttgagctagggccttgttctgtcacccaggctggagtacactggtgtgatcatagctcactgcaggcttgaactgctaggcttaagcaatcctcctgcctcagcctcccaagtagctggcactgtagtcaggcaccaccatgcctggctaattgctaatttttttgtagaaatggggtctcactatgttgcccaggctggtcttgaactcctggcctcaagtgatcttcttgccttggcctatcaacgtgttgcgattacaggtgtgagctatcacgcccaacccagactttatttcttcagtccatatcagatgaattgcacgcagtagctttcagtgcatattttgtattgctgaggaaagatggttaagactccagcttccccagaagaggactgttagtttttgtctctcccttgatgatgctacttttccygaygtgtaggttcatgggacggctccagacattgcaggcaaggacatggcgaatcccacagccctcctgctcagtgccgtgatgatgctgcgccacatgggactttttgaccatgctgcaagaattgaggctgcgtgttttgctacaattaaggayggaaaggtaacaggaatcttgatttacttgtgctgggtaaaatgcattgcttccatgtgttttatctgagtgaaagggacagtgacagataatagttctcaggcgggcccaagcatttgatgttgaacaaggattcttaacgtgggtcccagattgaayagggtatgtgtgcacatgtgtgcattttctgaggtgaggatctagatatttcatccaaaaaaagttaagcagcactgatgtatagacatcagtgtacagtggaaaggtcagtggtttgggaggcagcatcaggtgcacgcccaattatcctattgttagctgtgtgaccttggccaagttcattgattttttttgagacagagtcttgctctgtcacccaggctggggtgcagtgtcataatcttggctcactgcaacctgcacctcccgggttcgagcagttctcctgcctcagcctccctagtagctgggattacaggcgtgtgccaccacacccagctaatttttgtatttttagtagagatggggtttcaccatgctggccaggttggtctcgaactcctgagctcaagtgatcctcccgccccagcctcccaaagtgctgggattacaggcatgagccaccacacccggccaagttcattgatttttatagacaactttttactcttcacaacaaacgtctgttgagtgtaccttataaggtgtgaagagtaaaatgatgaatagggtaagatgctgagcctcaaggagctgggaatctagtggcagatacagatgcagatgtacctctaatacaatagtcttatatgttacactgtgtgcatctataatacaaaagcaatacagaagttttataaaagtaataactaatattaattgaatacttatgcaacttttaagttctttatatatcatctcagcaaagtttttctataactctttgaagtagatgctataattccattttatagatgaggaaactgaggtacagagagaataaataatatgtccaaggttttacagctcctaaatgacccaagttggtattaacacgcagtctgggccttacccaacaagctccaccgcctcggtaagcaattgtggcctgtggaagaagtgtcgcgggctattccgaagttagaggaaataatgcacttgaagactcatccctaatttgaggtcctttttaacaaaaattgtgaaaaatatgcataacataaaatttgccattttagccgtatttaggtatacagttcaataatgttaagtacattcacattgtaatgtaaccatcaccatcagtcatctccagaccagtttcattttctcaaactgagactctgcacccgttaaacagtaactttcccttccccctcccatcctctgacacctgccattctgcttcctgtctctatgaatttgactactctaggtacctcatgtaagtggaatcatacagtatttgtcctttgagtctggcttatttcacttagcgtaatatcttcaaagttggtcccttcttttaaaaaaattctgtaatttgaaattatatcgtgtggccaaaatacaagaaattcaggcttgtttttaacagcctgatagtcacattggaggtcatatgattttcttattctttaaagttatatttgggaagttataatctacagcccagtagagaggtgcctgaattacatagtgggcccttttattgtgtaggatggaaagataaagagaattaaatatattggggtctgtatgcaggaaagaaaggataagctggtagaacagatcagttgtatgggaggctttctttcctaaagagggaggtttaagagttaatgatttaggcaggtgtggtggtgcatgcctgtagttgcagctataggctgaggcaggaggatcaccttagcctctgagttcaagaccagcctgggccacatagtgagaccccgtctcttaaaaaaaaaaaaagagttaatgatttaaatatttctttcgtatttgtgtcccagcctccaaaaatagatcagatacaaaaattagttgggtatggtggcatgcacttgtaattccagctattcaggacgctgaggcaggagaatcgcttgaacccaggaggcagaggttgtggtgagctgggatcgtgccactgcactccagcctgggcaacagagtgagactccatctaaaaaaaaaataataataaaaacaaaaatagatcaaaatatgtctcaggtctattcctgagacatatttcccaaggatttttatgaaacttcttatttagattcgcttttatttaaatatccatgaccaactaatctgggttagggtctattgtgtgaacaaagggaaaattttggtaaagctccctgcctccctttgcatcaagagcaccttattctttgcagagtgctgttgtatacactatgagattggatcccgatcctcctgggctgggtagatggtggtggagtggttcctcactttgaaatgaggaactaaatgaaagagcagccgagtaacttgcccaggtggcatctcactgagggctttaaaatctccttggtttagtttagtttgcggatacatcttttatttttgctttttccttttctcagagcttgacaaaagatttgggaggcaatgcaaaatgctcagacttcacagaggaaatctgtcgccgagtaaaagatttagattaacacttctacaactggcatttacatcagtcactctaaatggacaccacatgaacctctgtttagaatacctacgtatgtatgcattggtttgcttgtttcttgacagtacrtttttagatctggccttttcttaacaaaatctgtgcaaaagatgcaggtggatgtccctaggtctgttttcaaagaactttttccaagtgcttgttttatttattaagtgtctacctggtaaatgttttttttgtaaactctgagtggactgtatcatttgctattctaaaccattttacacttaagttaaaatagtttctcttcagctgtaaataacaggatacagaattaacaagagaaaatgtctaactttttaagaaaaaccttattttcttcggtttttgaaaaacataatggaaataaaacaggatattgacataatagcacaaaatgacactcttctaaaactaaatgggcacaagagaattttcctgggaaagttcacatcaaaaagagtgaatgtggtatatttctaaatgatatggaaaatagagacagatttgtcctttacagaaattactgagtgtgaataaaaacttcagatccaagaaatatataatgagagatataatttttgttaataagacaaaggtaatatattggatacaaagacacaaatgtattgtgtgttcaattattttgttgtcttgagatttaatattctttccaagagcttttaatgaagcagagagctagtacttcattttcactggatacattttcagcatcatgagttgtcacagcctctgagcccctgatctgaagccagaagggctgagtgtattgtaaacttattcttgcatgttgctgtctgggaatggaccacactacagcaggtagttctgggggcgatactgccgaaaggcccgaacacatgtattttggctgcaattgaggaacttgggatgctattaattttgtatttcagcaactgccccttctcctatcccaaagcaccaattactgccctctgcctcagcagtaccagtataagatgacattccaaagactggaggcaactcagcctgagttaattcacaaaattatgccatgctggggcttgagcttgagcttgggcttaggcttgggctcagcttttgaccctcaggcatctcctttyccttcctgtcttcctctcccttctcctctgctgcagcatgattttcttaatcttcagacactcactattttcatgaacagttaccctctgtccccacaaccaaagacaactcatggcctcctttggcccttgtgtaacattgcaaacctgtggctttgcaaaatgtacccaggtcacaaggggatttttttttttttagcaatgatatccctgtctgggtcactttttaagcttgtaaccgcccccccagacttataatcttaaatgtattttcctttgtttaagctgctgcttcctctgtttcattggattgtgccagttatcagtggctcttgggttcaaagtaataaagaattccaaaactgagatgtttgctttctctacctgtttcctgttcagatgccttcggtcattttggctcagcttgctactgagaatggctgcttcccgtattcagaatggaagtggggtggtctggtggcgacaggctaacgtagagctggctgcttttatgagaatgcgccacttgaccccatcctgcacctttgtttattccagggcactaatggtcactcgcatgcccgctgtgcacagtcctgtgagttaaatgcccactactctctgcactggtcccacctgctcaattgacaaaaaaaatcaggtccttgttgacagttctgttaaaaggtttaatattcaaattatacattaaatagaatcaaacaggcagcagcagttttattaagcatcaagtcagttggcatgtgggtggcggagtgcctggtaatggaataatagggtcggcgatgcccgccaagattccagagtaagtcaggtcgctaggtgagttgtgactgattgcttttcctgcagcgcacgtgagcagtatcagccatctctctcctacccgctccacagcctactgctggctgtcctgtatgtgagctagcagctttttaatctacctggaactaaggccaaaaattatcagccctttcgttctggaaggagagctgatctcatttgtcacctgaacaaaaagcaatacttaaactgaattaaaactacccacacgtgaagcttcttggaattgtcagctattgttggcgtaagacctggtaaatgtagagccagtgctgtgccctgacctggagatctaacagacttggcagaaatgcctgtgcccagactgaagagacctggggctcaggaagaggctcggaacgcctgccctctattctatagaaactgcaggcataggccctgattacattttttgctcttggtaaaaggagtcaatgatacctttgtacttctccaaaactgtgagccgtttcagtttcatcgtgggacctaaaagggaaatgagaagaaatgagtgaggcccaggctctgagaactctgagaatgtgtgtggtaaagactcacactcagtcctatatataactcaggaattaagccagataatcaggaccgtcagtagccagcctccaagacagtgatcgctcctggtattcatatggcttgtgtgtagtctcctgtgttataccactggttgtggccagtggagtatagatgaagggttggtatgtcacctctgagaataggttataaaagatcagtttcttttatacacataggaaagtagtgtaagctacatctgccttttccttgacctgtacccagttttgaccctcagtccattttctctgaaatggatttatttgttccatctcttgaatgaataaattgttgaagcaattaaaaaatagactaggtttctgtcttgggctttctcttggaccattcttcctgggcaagccggctgccatgttgtgaggatacacagcccatgagaggcccactggccacacacggatgtttctggccagcagacagcaaggagctgaggcctgccgacagccacgtaagtgagcgcggaggtgagcctcagctgcaagtgactgcacccagctcacattgactgtaatcccgtgagacccaagccagaaccactcagctaagctgttcctggattcttgacccatagaaatgtggataataaatgtttactgctttaggctgctacatttttggggtcatttgttacacagcaatgtattagatagctagtacacatcatctctgcatttttgtgaacgtttatacaacgttggacattatgctttgatggttgtgatgggggtaggggaagcccaggttatggggagcctctgccatggtctttatgagaggtcttcccctaattacttttcttaaccttgatttatcccccaaaagcaagtttgaaagagctctgatttgaggtcctgggtagcttaaagtgcctaactcactcttgactgtgtaactggaaactttctgtgttaaagtcattatattaactgcttagtgaagacatcttctgtctctctgaccttgcgttcaatatgctggcagcagacagccagataagctcaaggtctctgattgcagctcagctttgctgtagacaattgcatctgggttcagccgtgatggatttgagggaatcacactggcataaccatttctacctctcctgttctatgaacatcccatgaacatctcttggctacagccaagagtgacttcagctgaggctgcaccagagccctctcctggttctgtgggcagtggtccggaacagccttatccctttgtcacacaagctgactttccggaagatcacagtactctcacccctagaaccacgtgactccaggctgaacactagcagggccttggtgttggcctggtagttccattgtgattttcggagaaaacagtcccatagtcaaggccaagttaaatgtcatgttcagattagaaagttctagcacatatcagctgggcgcagtggctcacgcctgtaatcccagcactttgggaggccgaggcgggcggatcacctgaggtcgggagttcgagaccagcctgaccaacatggagaaaccatgtctctactaaaaatacaaaattagccgggcatggtggcccatgcctgtaatcccagctactcgggaggctgaggcaggagaatcacttgaacccgcgaggtgcaggttgcagtgagccaaggtcgtgccattgctctctagcctgggtgacacagcgagactccatctcaaaaaaaaaaaaaaaaaaaaaaaaaggaagttctagcacatatcttatacattcaacagactccacataaccacaagcccatgcatggagccatcaatgtcctctaacaggaagtagatgggtgtcacccagattcctgccatgaccttctctttgccgtggctgcttcctaacaggcacctcctaggcactgccatggcctctgccttcccacacagcccttgcaatggtgaaaaggaaaaacctacccaactctccacccgaaatggagaagtctctctcgagaatggcccacttctggatgtggtagggccgggccgccgcgttcatgttgaccctccggatcccctcttcgatggcctggtacacggcctcatccttcttctctatgatctcggacactgtggtggctctgctgcccaccctctggcagaactccacagcttgttcagtcagattatcagtctggtcagaggtgtctgggtccagagtgcactgaaaagccagagatcagatgaggaccaagccttacccaacaagacgtaagccctggtcctggaggaggtcttactgctgtcggcaagggtgtgaatcatgtgagctctgtttcaaagagacggttctagaatgagtagctgctactgtgttgagcctcgtgttattgtggaaggagcagtgatctgagaattagaagagctcggtcagtgacgtcattgtctgtaaagcagggacggtaactcctgcctgtctaccaccctggggtccaagtacctgcagagagcaatgagggagggcagcagcactttgtagacgggaaagtgccagtaacatgtaaaggatcatcacggtggcttatgtgggacagaaggaatttccacgtgccacagtttttcctacagtgcaggcagcacggacttgagtcattccagaatgaagccatgagatctggatgtgccctgtgctgaatgtggcttctgccagccagacccacagaccccctcactggctgctccttctgagctggagccccccagacacaccttcaaggtgagcagcatggacaggaacttcctctggtccccaatgagcatggcgttgctgatgatgggcagctccatcttcacggcctcctcgatgggcacagggggcacattctccccaccagctgtgatgattaattctggggaggcaaggccaggcccccggcacagaatgtagtccaggtgccccagctgaaccacaacccaagcctcaaccacaacccggaagcctcagcacagctggagatgccccctttctgggagccaagaagcagtggcaggccctccaaagcaactcacacctgcttgggggctggtggcagcaccccgacgacaaatgctcacccaagtttccctctcctcggcttgtcatccacgactcagcctgctcagacatctcatccatggcccccttctgccagtcccagttcctgcccccaaatagcccgtgtcatttcccttccctgcctttgcttaataactaccatccctgtcactcacacagcactcaccaccatgctaagcacttcacatgcagtaattcatttaactgtcacaataaaccaataatgaagcagacactcttattgttttgcagatgaggaaactgaggcacagagacgttcagtaacttgtccaagctcacatgctactaagtggcagagctaaggttttaaatccagtccatttccagagcccatgctctcacctgccctgctaggatggctctccccttgcttgtacccttctccctggaaggtcctctccccttctttccttctgtccaacagactgccaggcactcagtgccctagcctgctgttgtctgatagtactgatggcttacttctaggctagatggcaataaattcaataaaataaatttaacgaatgtacattgactaattttagtgagactgtactcctgtccctcatttctatctaattcaaaaaagattaattggtcacattctgtgcacaggtcctgtgctgacatcaggcacagaatagaacaaggctgcccatggctgcaaggagcccacagtgcaggggggcagtgagacagagggaggcacaggggctgcagggccagggcagggaggcaccaggcccagctgcatgctaaacatgaacgggagttggcaggcagagggcaggacagaagctgaagctcacaggccttaagggaactgcaggtagcaagtgagacagaggctggagaggagcagggaagatcttagaggcctccagtgctggctcaggagctggattgtgtgcaggcagctgggaattactgaatggtgtgagatcaaagttttagggtactctggtagctggggtgaagagtggttattcagggacaggctggctagagaggaatccatggcaagtgtctatatgatcagggtttgtctaggacagcagaagtcaggtgaagaggagaagacagactctggaaatgtgggaagacaaaaacccagcctccccaaaatatgcctcatcattgctacctcattcctgcccttttctcctcactacggccctctgcattcttaccagcatcttttaccattagtaaatgattaaaaaaaacccttagcaaactaaggctagaaaggaacttctttaatcagataaggaacatctaaaaatttttacagcaaacatactttttttaagatttaataattttttttaaataaatagagacaggatctcactatgttgcccaggctggtctcgaattcctgagctcaagcaatcctcctgcctcagcctcccaaagtactgggattgcaggtgtaggccactgtgctcagccaaacatacttaatgataagttagtgaatgcttctcccctgagatcaggaacaaaacaaggatgaccactatcaccacttctattcaacactgtcctggaggtcctaacctgtgcaacatgggaagaaaaaaattcatctgctatttgcagatgatatagttgtgtccataggaaattcaaaagaatatacacattactggattgaatatgtggtctgatcaaatgatccacaaaaggtcatttgatacaaagccaatatgcaaaaagcagttgtatttctatataccagcagcaaacaaataggagaaaaaaaattttgcggcaacatctgagctgaaaaaaaaattttaagtgatattatttaaaataccttaaaaaattcttagaagtaaatataaggaaagatgtgcaaaaatctctacactagaaaacataggctggatgcagtggctcacacctataatcccagcactttaggaagctgaggcaggaggatggcttgagctcaggagctcaagaccagcctgggcaacatggcaaaaccctgtctctacaaaaataaaaaattagccagttgtggtggcttgcacctgtggtcccagctacttgagaggctgaggctggaccggaggatcacttgagcccaggaggtagaagttgcagtgatccgagatcacgccagtgcactccagcctgggcaa

SEQ ID NO: 95724 - DNA, 17470 bp, Homo sapiens
aaaaaaaagttggccaggcatggtggctcacgcctgtaatcccagcactttgggatgccaagctgggcggatcatgaggtcaggagattgagaccatcctgaccaatgtggtgaaaccctgtctctactaaaaatataaaaattggctgagtgtggtggcgtatgcctgtaatcccagctactcgggaggctgaggcaggagagtggcttgaacccgggaggtggagattgcagtgagctgaaattgtgccactgcactacagcctggtgacagagttagactatgtctcaaaaaaaaaaaaaaaaaagccaggtgtggtggtgcgtgcctgtaatcccagctactcaggaggctgaggcacgagaattgcttgaacccaggaggcagaggttgcagtgagccgagatcacgccactgcactccagcctggtgacagagcgaagactccatctcaaaaaaaagaaaaaaaaaagttatgagaataaaataaaggtatgcaaagtctcaaaggatttgtccaaaagcttcctgaaaagaatgcatggtggataaatcctttgaggctttgcaccaaaatgagggagtaagccaagaaaaaagttacaggatccaggaaaaagtgtatctgacacaggaggtaagtgaaggaaatcctccagctgagatagaagggagatcccaggataatagctttgcagccgacctagagaacaatcatttcagattggagcaggagtatggagggctctggagccatatatctaagaaaaaatggaaactgataaaattgataaattatctgattgtatttggttatactaagaggagagttatactcctagaagagggtatgagaatgaattggtaataagtacataggtaactaagcaaacaaaaaaaatgcataattattaattggtgtagaggaacatacaagaaggaaaatgtgaacataatatggtaagtgtcacagcttgcaaataacatttacatactcctaataatagaaacattcaatattgatataacaaaaataacattactacattaggaggatggagagagaaagtacatgcatattttgggggcagatgagagttaaatcctcattttaaaaatagaagtagggtcgggcatggtggctcacgcttgtaatcctagcactatgggaggccaaggcgggcggatcacctgaggtcaggagttcaagaccagcctggacaacatggtgaaaccccatctctactaaaaatacaaaaattagcggggcacagtggcatgtgcctgtaatcccaggtactcgggaggctgaggcaccagaattgcttgaacccgggaggcagaggttgcagtgagctgagatcgcaccactgcagtccagcctgggtgacaaagcaaactgtgtctcaaaaaaaaaaaaagaagaagaagtaggaccaggtgcggtggctcacacctgtaatcccagcacttggagaagccgaggcaggtggatcacttgagtccaggagttcgagaccagcctgggcaacatggtgaaaccccatctttattgaaaatacaaaaatcagccaggcatggtggcatgcctatagtcccaggaggctgaggcaggagaatcgcttgaacccagtaggcagaggtttcagtgagccgggattgtaccattgcactccagcttgggtaacatagtgagaccttgtctcaaaaaaaaaaaaaaaaaggaaaaatgcagacataaacaataagtttttcttttgttgtttgtttgtttgtttgttttgtttgtttttgagacagaccttgctctatctcagctcactgaaacctctgcctcctgggttgaagtgattctcctgtctcctcctcccgagtagctgggactaaaattagtcaccgctcccagctaatttttgtgtttttagtagacatgggatttcgctatgttggccaggctggtctcgaactcctgacctcaaatggtccacctgcctcggcctcccaaagtgctgggatcacaggcgtgagccaccgtggctggccaacaactcagaagcttttcaattgagtgctgttctgaatagtgtgataaaatcttgtgtcctccctctccatcccacccaggatggcaatccttcctttgtccagtgtatccacactgtaggcaacacccacccactaatcacttagtagccatctcagttatcagagcgtatcacagtgtttatatgcaagcaacccttattttacttaataatgagcccaaaatgcaagagtagtgttgctgccaatttggttttgccaaagagaagccatcaagtgcttcctttaagtgaaaaggtagaagttctcaataaggaaaaaaaaaatcttatgctgagttagctaagatttaaggtaagaacaaatctcccctattcgtgaaattgtgaaaaaaagagagaaaaactcatgccagttttgctgttgcacctcaaactgcaaaagttatggccacagtgcatcattaagtgcttaattaagacagaaaaggcattacatttgtggatgggagacatgaacagaaacatgttctgattgtcattattcaggttcagtattatctgcagtttcaggcatccactgagggccttggaacttccctgaagataagggtagactactgtatgaggtatctacagtagtcaaattcacagatacagaaggcagaagggtggttgttgctaggggctgggaggagggggaaatcgggaattgttaaatggatatagagtttcagttttccaagataaagagctttggagattggctgcagggcgataggataggcgatacttaacactactgaaccatacacttaaaaacagtcaagatcgcagggcgcggtggctgacgcctgtaatcccagcactttgggaggccgaggtgggcggatcacgaggtcaggagatcgagaccatcctggctaacatggcgaaaccccgtctctactaaaaaaaatacaaaaaattagccgggcgtggtggcgggcgcctgtagtctcagctactcgggaggctgaggcaggagaatggcgtgaacctgggaggcagagcttgcagtgagccaagatcgcaccattgcactccagcctggttgacaagagccaaactctggcctccaaaaaaagaaaataaataaacattttttaaatttgcaaaaaacacaggggttcataaagaaaaacaattatattcacatataattatcaaaatattaaaatgtttatgatgtaactgatttttatcaatgtattaaagatctaacagcaagtctaatatcaattataattacaaagtgtgctgaatgcaaacaatatttagatgtatcttcaacacttgtaatgtaaaatgaaaatatctgttatttctattagtaataacattgcagttactgccagtaccagtgatttgttgcctacattcataattaaaggagatgctaaatttctgttaaaagttagtgaaaatacagatgtaattttggctgagcatggagactcatgcctgtaaatctcagcactttgggaggctgaggtgggaggatcacttgaggccaggagtttgagaccagcctgggcaacatggcaagatcctgtctctacaaaaaatttaaaaaattgctaggtatggtggcacgctcctgtagttacagctatgaaggaggctgaggtgggtggactgcttgaccccaggagttcgaggatgcagtgaactatgattgtgccactgcactccagcctgggcaactgagggacacctgcctcaaaaataaataaataaataaatatgtaattttttttcccttccaagttcacagattccctgaattgtatgatctgtaggcctaggtttagaatctctgcttctctaagcctcagatttatcatcagtccttagtgtttgacacattcctaacttattcactctctcacacttacaggcaactgtttcacactattttcacacctcaaccccaatcactcctccctcattctctctctcagttgcttcctacttcactgagaaaaatggaagcaatcagaaaaaaattttcagactcccaccacatctacctaacctctacacttacacccaccttctctgcctgtggcctgttaccataaacgaactgcccacactcctacctttaggctttagctaatcctgaatagatctcatgacctcaaacctattcaagggcactactgcagtaaatctcctacaccatcaaaattttggagatgttctaaaaattatttccgtcaacatggaacatgctatttctcccatcttaaaactttttcttgatcctatttcctccaccatgactcccatttctctgtccccgtattcagcaaaactcaggtttctttttgagatggagtctcactccagcctaagctggagtggagtggcgtgatctcagctcactgcaacattcacctctggggctcaagcgattctcctgcctcagcctcccaagtagctgggactacaggtgtgcgccaccacacctggttaatttttttgtagttttagtagagacagggtttcaccatgttgccctgggtggtctcgaactcctgagctcaggtaatccacctgcctcagcctcccaaagtgctgggattacaggcatgagctaccgcacccagcctcttttttttttttttttttttttttttttttttttgagatggaatctgccagcgcgcctggcctttttttctttttttgagacagggtctctctctgttgctcaggctgaagttcagtggcgaaaacatggctcactgcaacctgattcatggattcaagcgatcctcctgcttcagcctcctgagtagctgggactacaggcatgcaccgccatgcccagctaagagaccagctttatccattaccacaactgtttatcagattaggatattgccgcagagaaacagaaatagcacagattttaaagatcaactttattgaagtataatttacatacaaattttatgtgtattagccgggcgcggtggctcatccctgtaatcccagcactttgggaagccgaggcgggtggatcacgaggtcaggagatcaaaaccatcctggctaacacggtgaaaccccatctctactaaaaatacaaaacattagccaggcgtggtggtgggtgcccgtagtcccagttactcgggaggctgaggcaggagaatggcgtgaacccaggaggcggggcttgcagtgagcggagatcgtgccactgcactccagcctgggcgacagagcaagacttcgtctcaaaaaaaaaaaaaaaaatgtattttttttttatgagttttgacaaatgtataggtaattttatttgtagtagaggacgttaaggttcccggggattgtgcaggtccagggatttaacagagggatcctgtttaggaaacaggacaacatcggggctcttgggaaacataatcaaacaggaacaagtggagacaccaagggctggccagaggttggtgctggggtctcagtgcaccaggatctggccctctggaatgcctggcgacttcatggcagctcctggccctcctcagggagcggtctcaccactctgacgcgtgtttaggccacgaggtgagacctaggactgggttctggctctctgccctgcaactttcctgccactacccgcgcccgtatccctgcccaccaactgggggcgctccagtcggtgacagccaactttcactgctgccaccacaaccgcagggccccaattacctctctgttagaaatcggtttcagagcggtggaaccgcgggcgggaaaaagcccaggcgctgtctcgggtgccccttcgtgtcagccatcctctggtctctcgggtctccgaagctcggggctaactgggcgcgaaccgctgagcccgcctaccaaccaggccctttctcccgcccctctgcggctgaaaccctcaaggggttgcaggttcagctttcacttagagacagcaactccaaattcagggtcgctggggaaactaaggcaggactggggactctgagtgagaggtcagacgctggtcgcggactctttctcccgagaactggggatagctcttccgatagcccaaagcgattcatgcggatcctagaagaaagcgccgaggtccgggcggttggccggggagagcgaagcgccgcccacgcggctgggaaagcttggggtggcgctggcgggaggtggggccgggggcgggttcctggcggagggtggggcagacgtgggttaccgggtgtgccaaccaaaccctgaacagaggaggtggcggtggtggccctcgcctgtggcccccgtgctgcttgcactcgaactcgtcgccatggaggagctccaggagcctctgagaggasagctccggctctgcttcacgcaagctgcccggactagcctcttactgctcaggctcaacgacgctgccctgcgggcgctgcaagagtgtcagcggcaacaggtacggccggcccccttcttctctagtcactgcccctagggaccttgggcctcagccggcgaccctggagaaggtgcaggggagagggagcggcttccgcaagctctggcctccccacctctccaagtgaagcccgctaggcaggtgatcccgggctccggacgccggatcctggggacactgcttcacctgcgctcaacggtcacatcttcgctctccccgcaggtacggccggtgattgctttccaaggccaccgaggggtaagtgcgagctcagggtgtgtgagcgaggtgagggcgagggagcataaacgtgggctggaggtggaaggtgcggtcggggccggaggctgcgagtagtcacggtctgaggtagttccgataactgaactccaagtggggcgaggaggctgctggggttgtcccagggggctgtggtttgaggggactgtgctgtttcggcctcctggggaactcaggcccagctgcacctggtgtgctaacaagccctgtgggacccgtcttagtcttacttacggactggctcccggacgagtggcggcggcaggagggggaggggctgacttcatggggcttaccgtctccttccacccccagtatctgagactcccaggccctggttggtcctgcctcttctccttcatagtgtcccagtgttgtcaggagggcgctggtggtagcttggaccttgtgtgccaacgcttcctcaggtgagggggaacaggtagccggcaagaaagggtttgtggaaagtgggggagggaaatgtggagaggtgcttaagagstctccaccctcctatttttttccaccatycttttccaggtctgggcctaacagcctccactgcctgggctcactcagggagcgcctcattatttgggcagccatggattctatcccagccccatcatcagttcagggacacaacctgactgaagatgccagacatcctgagagtyggcagaacacaggaggctattctgaaggagatgcagtatcacagccacagatggcactagaggaggtgggtgaggccagaaattgcagggagttgtgataaggtggggcaaagcctgaagtccaaggtatcccagtactccagggaaccaagtgctcctgccactttccccaccaggtgtcagtgtcagatccactggcaagcaaccaaggacagtcactcccaggatcctcaagggagcacatggcacagtgggaagtgaggtactttggatggggtgggactaacatgggaagctttggcattgtcttcctttctaatctccactcttaaatgttgtaataaaagatccagttccacctcctaccctggtcttcatctgtcccattcccttaaaatatcctagaagccagacccatgttccaaacagagaacctgttcaggcactgccttcctctgccagccggaaacgtctggacaaggtaagttagaatggcaagggctttttttttgtaacattaatataattaaacagtggcaaagactattttgaaaagcacttttagtcaagctaaaatttagaaattggaagctcgttatatgggaggaatttttttagagacaaggtctctctgttccccaggctggagactcctgggctcaggccatcctttttttttttcttattctcactcagtcacctcaggctggagtgttgtggtatgatcacggctcaccacagccttgaactcctaggctcgattctccctcctcagctggtgtgtgccactacaccaggctcatttttttatttttttgtagagatagggtctcactatgttacccagactagtcttgaaatcttgggctcaagcgatccccccacctgagcctctgaaacggtcaggattacaggtatgagccactgtgcccagcctaggagaaattcttgagagaagaacatatttaggaagctcttggctgtttatgtcacacagatattttcctcaacagaaacgttcagtgcctgtagccactgtagaactggaagaaaagaggttcagaactctgcctttagtgcyaagccccctacaaggcctgaccaatcaggatttacaagagggagaagattgggagcaagaagatgaggacatggaccccagattagaacacagttcctcagttcaagaaggtgagttaatgagasgagggtaaaaatgccagtggaaaagacttataatcacttgtgttttcttgcttccttcctagattctgaatccccaagtcctgaagatataccagactacctcctgtgagttccttgctttttccaatttcatcaagacttgttcatatattaagatacacttcctggaagctgggggcttttcaggggcaatgaaattgaaggtgacaactctctgctcctggcaggcaatacagggccatccacagtgcagaacagcaacatgcctatgagcaggactttgagacagattatgctgaataccgcatcctgcatgcccgtgttgggactgcaagccaaaggttcatagagctgggagcagagattaaaagagttcggcgaggaactccagaatacaaggtaaggacaggacccagcctggctttccagctctactggccattaaccccctgctaaccatccatacacctgtgtttataaagtgactaagcaaagtgacaaggaaacctgtttgaagggaaaaattagtctgtatcatttggtagaatgagaagggaagttacttcccttctttttttggggggacagtctagctccgtctctcaagctggagtgcagtggcgcaatcttggctcgctgcaacctccacctcttaggctaaagcgattctcatgcctcagctttccgaatagctgggattataggtatgtgccaccatgcccagccactttttgtatttttagtagagacagggttttaccatgttggccaggctggtcttgaactcctgacttcaagtgatccacccacctcagtctcccaaagcgctgggattacaggtgtgagccactgcgcctggcccctctctcttttttttttctttttgagacagtctcacttggttgcccaggctggagtgcagtagcgtgatcttggctcactgcaagctccgcctcccgggttcacgccattctcctgccccattctcctgccgcagcctcccgagcagctgagactacaagcgcctgccaccacgcccagctaatttttttgtatttttttagtagagacgggtttcactgtgttagccaggatggtcaagatctcctgacctcgttatctgcctgcctcagccgcccaaagtgctgggattacaggcgtgagccaccatgcctggccgcccctctctcatttcttaatgttgaactcagtgctagtaatttctgtttcaggtcctggaagacaagataatccaggaatataaaaagttcaggaaggtaagacaaggtctgggaacggaagcaaggtagaatgagaatttttactttttgacatggatgctttttctctgcagcagtacccaagttacagagaagaaaagcgtcgctgtgagtaccttcaccagaaattgtcccacattaaaggtctcatcctggagtttgaggaaaagaacaggggcagctgaagttatcaagggaatttttgagcctctgcttagtgaaacacaaaggaacaaagcagctataaactaaatagaatgcaactatctgcttttcttatgctgaccactggagtccatggtggcaagtagagagctgctctaggttcttgaggtttggttttcattattaatttttagggtatgggcactgtgcaaagactccatagctgtgcctaggagtctaggaaaagtgacagaggcttggcttttttacctttagttcagccaagtcattttcaagtcctgagaaatgacatcatcttcaggataaaataatgaggacattagacaaaccaaactaagtgaattttagcctggtagcctctctaaggaaacagtaataataacttctgataagagttaaaagaacttgtagcatacctggatataaygggaaagggcctgggtgttacccatgtactgaaaatgaacttttaccaacatggctaaaaaattaaaactgactgcttckgtgtcctttgtacaagtttatatgtttcccttaaatcttccaaggcagatggttcttaaccctggctttacatctgagccacttttggggctctctaaacaattagatccccgggccccagcccagatgttatgagttacaagattatggtttagacatcttttactttttccaagctttgtgtgtgaccaagatacatactttactataaggctctaccaaattcatcttaaaattgacagctaaatactgtaattatatagtaggaagaaaattcttttctgaacataggagttcctaggatcacctaaagtagggctcctacctggaattctccagtgactgaaaactataactgggcaggatttgaatttacctacaaaaggagataaatggtttagttggacaaaagatcactcttcagtcttatcctttctgttcctcattgttacaaaagaaagtggatgcttcactcataactaggaatggtactgcctttcccagttctactgaaggggaagttaaagggccacaccctaggctttaggggatagaactgcacccagcagtgtcagcaattcctgaaacaacttggatgaaactgcgtgatgccacacccttgacagggcatttctgagcagagaacagtccttgggagatataaacatgcagtaagctcagctgcgtggcaaggataaacaggaacccatccttagggcatggacagcctaacaagaaaggcccttcagctgttctaatcaccagggtaggcctgggaaataaacatgtaaggagagaaagagataataaattttgaaagaattttgaggtgatgaactatggacccagtcagtctacagctgccgtgaccagtatggtagcaactgtatggctatttaaattaatcaaaacaaaaatgtagtttctagccatatttcagatgctccgtagctacctgtactgaacagtgtagattacagagcatttccatcactgaagaaagctctattgaacagtgatagtgtgtagagaacatctggttctcaatctggtggaaaataagacagtttaaaggggtctcatttattgtcactgttccaaatgtacaaaaaaaattagaaaatacccccaactcaaccccacccccacaacatttcccccaacacaaataatttttcccaaaaccacaaacataaactggtcctggtatttccataaacagtgcagctaagaaacagtttagagaaaatttaacaggattcagattatatccattctgtcctctcggccctgagaggtaataattcccatatgggtcctagtcctccccaatggttttcccatctctgatggaagagtccttttacaaagtggtgtttggctactgctttagagatcctcctgtgccttcttcttcttcttgggtttttcttcttgaattacaggggggtttgtagcttctctttgtagatagctaataaaatcacttaattcacggccaccctgaaaacagaaagatcagcttaaaagtgtaactttttaaagaaccctgatctgccccacccaaacaggaagacttctgagtttgtaaaagcatattagcagccacatatactgcccatgagagtttaaagagattttagttaaataaacccaattagcctagcacggtggctcacgcctgtaatcccagcactttgggaggccaaggcaggctgatcacctgaggttaggagttcaagaccagcccaaccaacatggagaaaccccatctctactaaaaatacaaaattagccggggtggtggcgcatgcctgtaatcccagctactcgggaggctgaggcaggagaatcgcttgaacggtgagccgagatcacgccattgcactccagcccaggcaacaagagcgaaactccgtctcaaaaaataattaaataaataaataaacccaattaaagaactatgtttaaggttgtgtgtttacgtctgtgtatatatttgtggggatatgggacaattcacttacttcatatttctttggatttagcttcttgttggctggagagaagtatatggtaggaaaactggggaaagaaacatttattaatttcaagcagttatgtgggcccatactgcagaactcttaagccaagaaggaatcagtggttctgccttcaactgaatatgaaaactatgtctagtaatgatttcctggtggttacaagctttattcctatctattgcctagacacttttgttaagttttaagccacttaccctctgacttcatatggagaaggcacatcattggctgtggcatccatcttggctatgacgatatttgggtctttgctgagctgttaataaaacaggttaaatgtttacatttcaagttttcagtgacagagggacacttagtcaattgaagacttaaaacaatctcattcttcaaacactaaaaatacaaaaattagccgggtgtggtggtgcgcacctgtaattccagcagataaactgctgttcatgtgggaagagtggtttgcagatggtagtacctcactttccacaagcttcccttttttctcttgtattaagactctacatattgccaccttcaaatttacctggtctgaataagacattacaggggctaagccaaatgttttaagatgaaggaccatatggattcatgtaagccattaccaaaattcagaagtccttagatatttttaaccattatctagattgagcctgaggaatggaatgttaaaagtgggtatctcaggcactgcacaggctggagcactagggggcagtcacgagaaagtgagtaaacagcaagtaattgggaaaaaaatctatcagtacttaggaaccaaccaaattagccaatgctgaatacatacataaacttactgctcccgctcaaatgttatcctcagaatagggttcacacttaccttctcgccaagttctttatacttgggctccaggttcttacagtgaccacaccaaggggcataaaattcaatcagcacatctttattttcattattcactatttcatcaaaattctctgctaccactacctggaaaacacagaagaatctctagttggtaacataaaaaaataaattcacaactgtatttgttcctagacccaatccctctctaatttgatgtgttaccacagaaaataagtcatggaaacccaaatcacatttacagattgtattaaagatgttgtcattcactagataccaactcgttcctatgtctgtcacctgtcaaactatgttcaggaagttacaggacatagaagtgctacccaaccattccttaaaataatttcaagccaagcttggtggcacatgcctgcagtccaagctactcagaaggctgaggcaacagagtaagaccacatccctataaaaaattcaaagcaacacactgttcttaggggttgctctatcctcaagagtaacttagcccaatataaatttcatcagaaaattctacgcaggctttacacgcttgcccctaccaagcattatgagccctgccaatgctttttttttttttgagatggagtttcgctcttgtcgcccaggctggagtgcagtggcataatcttgactcactgcaacctctgcttcctgggttcaggcgattctcctgcctcagcctcccgagtagctgggcttacaggcgcccgccaccatgcccggctgatttttttgtgtttttagtagatacggggtttcaccatgttgggcaggctggtctcaaactcttgaccttgtgatgtgcccgcctttgcctcccaaagtgctgggattacaggcatgagccaccgcttggcctgccaatgcttattttatgactcgggagtaaggacaaaaaaaaaaagagatggccaacgaagtcttcatttagaccccacagttttggaacaaagaaatgaggacaggcaattgctcatagcttgatgaggctgtgagcacctcaccttcacaggcccatcattgctctctgggataggttcagacttcaggtatctcttcagattgccatcaaagtaatcctgcaggaacctctccagagccttcccatcacgcctacaattggaaaacaagggtaaggcttgttaatctattcccaccgctgagaaaattacagcaatttctttgaatagttactatgtattttagcttttcaaggctaaaaaagggggactctcatctctcaatatgcagaactaccgactgaagaaacaaaccgttccttttatttctagtgtgttctttgtggattacaaagttcagagaaaggagaatcattggtcttctggagattcatctttgtaagaaaacaaggtcttattgctctggagcacactatttacagtattttgttttattgactggctcacaaggaagattttctcttgtctcaatctcccaaaatctcagaaagtgagggtaaaaattgtttccggggtcttcagatcttcccgattctgagttcactttagacccatgtgctatttcaaaaagaaaatacattctgtagggatgaggggggggaatggtttggtttgaaattacgtcagtatcaaggagactgttcaatctttttttagatttttaaattttttggagacggggtcttgctatgttgcccaggctggcctcaaactcatgggctcaagtgatcaagtgatcttcctgcctcagcctcccaaagtgctgggattataggtgtgagccaccacatctggcccaaaggaggctgtccaatcttatctatttctttctttttttttttttttttttttgagacagagtcttgctctgtcacccaggctggagaacagtggcatgatctcagctcactgcaacctcttcctcccgggttcaagtgattctggtgcctcagcctccccagtagctggaattacaggtgcgcaccgtcacacccggctaatttttgtatttttagtagagacggggtttcactatgtgggccaggctggtctttaactcctgtgatccacatgcctcggcctcccaaagtgctgggattacaggtgtgagccactgtgctcaccctttatctgctatttctaatgaccaagtggaatcatgtaagaattccaacctgccatcctttcattagttttcagaattcattaaggatcataatccttaaagtacctatatgtatttatttttctttatttatttctttttttgagacagagtttcgctcttgttgcccaggccagagtgcaatggcacgatcctggttcaccgcaacctccgcctcccaggttcaagcgattctcctgcctcagcctcctgagtagctgggattgcaggcatgcaccaccgtgcctggctaatttttttgcatttttagtagagacggggtttctctatgttggtcaggctggtctcgaactcccgaccttaggcgatccacctgccttggcctcccaaagtgctgggattacaggcgtgagccaccacgcctggtctaaagtacctatatttaaattgagaaaaatgacagtcataggtcttgattaaaagacctatcttcacattccagggttattgttctttagaaatcctttgtagtataaaaggctttaataattgccttggagaatcaaagcccaactagcaactcacgagaactcctcctgcatgacaaacttctctcctttagcagttctgatagcaacaacaggaatctctccagcagtgctctccaagccaaaatcagaaagttcatggctaaaggttttgcggctagctacagcaaagttgagtttgtgcccagcatccaggaatttctttgccaccatcattaccctgtgggaaacaagagacatttgtgccaagactatacagggtggtcaagcacttttgaaactaagaagcaagtgattggaaagcaaagactaagttctatagttctagccttctggaatcagtctgaacagtctgagctcttgggcactgacacagggttatgatatacttcaatgccttactgaacttcactggcaaattggtgatacccaatcaactggtgcattcctgctaaatcttgctgtaatatataactgaaatctattataggcataataactgatctgaaaacaaaatttgtaagggtaaaatgcactgagaggctcaatgtgcaagtaagcacaatgttttaagtgcattttatatcaaatttccaccttctacttggagtcactgtgtcacaaagcaaagaaacacctacgaaatacatgcccaacagattgtgaaaacagtttatttgtccttatggcttcaaatgtagccatttgaagtcaattgtagacaatttggaagccaaatgttcccattctttcctgcttttataccacacatggtaacaggatagttactttaatttttttttttttttttttacctcttcttaaggaaccatttattgttttacagattcttaaggaaccaacaagatagttagaagggactgtctatacattgggtaaacttgttcatgagggaaaaacataattcttattacctgtttctccagtagttggaacctttagcgttcttttcatagtccacatcatagtaagcaataagtaagtccttgccctgtatcaaatctttattgtcttctgtcatgtgagggcagataccaaaactgaaatgaaataatccattatcaactggcttgccaagtt

SEQ ID NO: 95725 - DNA, 38230 bp, Homo sapiens
gggctcaagtgatcctcccacctcaccctcctaatatactcagtttttaattttaagtagagattgtctacacttgcaatgtgttattttctgacaaaggcttgcaaatgagtcaaatcattttttctttctcattatttgaaacaaaatacaagattttaaaaataagccaattgatgtttaaagtgcaaaacagaggccaggcacagtggctcatgcctgtaatcccagcactttgggatgccgaggcgggcggatcaccaggtcaggagatcgagaccatcctggctaacacagtgaaaccccatcactactaaaaatacacaaaattagccaggtgtgatggcaggggcctgtagtcccagctactcgggaggctgaggcaggagaatggcgtgaacctgggaggcagagcttgcagtgagccgagatcgtgccactgcactccagcctgggtgacagagcgagactccgtctcaaaaaataataataataaaataataaaatttaaaaaataaagtgcaaaacagaattaccaatatccagttgtggaagtagattttttaaagccctaacagtttagatcgctttgtgatctggaaaaaaaattttaagcctaaaaaaagtcttaatgtttatcatatgaattagtctgttcaaagaaatctgttaatcacaaataatttccctctgcaaaatccctcctccgtttctcccacaagaataaacttaataagataaaatttccacgagcttgccagataatttctagtctggcaatctacttatcctctgacacagtgatcatgtttcatattcagttaactgttttaccaaatagaatagttagtgctattctattttgatttgtctattagatctagggcaggggtcccaagccccaggctacggactggtaccagtccatggtctgttaggaacccggccatgcagcaggaagtgagtggtgggtgagtgagcattaccgcctgagctccacctcctgtcagatcagctgcggcattagattctcataggagggcaagccctattgtgaactgcatgtgcgtgacccttaggagaatctaatgcctgatgatctgaggtggaacagcttcatcctgaaacctccctcctaccccatccatggaaaaactgtcttccaagaaaccagtccctgaagccaaaaaggctggggaccactgatctaggaaatcctgtatagttactattatttacttcattccaaggcttagtactataatcctagccatgcaaggcaaatacatggcagcaatcatacaataaaagggaattataagtaacttagttcaaaatcttcaccattatgaggaggaaataaaacacctcaaagtatatagtatactgtagtgggtccgtgacatcaattattgttgtttatttaaatatctttgacctgactgcagtaaaggactatttttttcgagacagggtctcactttgtcacctaggctggagttcagttgcacgatgtctcactgcaacctccgcctcccaggctcaagcgatcctcccacctcagcctactgagtagctgggactacaggcatgtgccaccacacctagctaatttttgtattttttgtagagatgaggtttctccacattggccagactggtctcaaactcctgagctcaagcaatcctcctgcctcagcctcccaaagtgctgggattacaggcatgagccaccatgcctgggccccagagataagcttgtaggggacttggagctagaggcagagttctgaactggctaccggcactggacacttctgttgaggaaaatatctgtgtgacataaacagccaagagcttcataactacgcccttctcttaaaaattcctcctaggctggacgtggtaactcatgcctgtaatcccagcactttgggaggctgaggtatgaggatcacttaagcccaggagttcaagaccagcctggacaacatagtgagaccctgtctctacaaaaaaaaaatcaacataattagcttggtgtagtggcatgcacctgtagtccaagctactcaggaggctgacgtgggaggatcaatagagctctggaggttgaggatgcagcgagccatgatcacaccactatactccaacctaagtaacaaagtgagactctgtcactaaaaaataaagtgggagacttctctacaacagtgagaatgaaacaagtgagtagttctactgtcctttcatcatttctgagcagtttgagattatcaacaaatgagctcactgattttgcagacatccttatgttttgaatatgtttcatataatttattattggtttaagaatcatttccttttaagtaatttttttggctcagctaatatcttagtggtacctacctttccatactttgtgagctttcttatttttacttgaataatatttctaaatatacttgtaaaaatgtaaatgttaggctgggcgcagtggctcacccctgtaatcccagcactctgggaggccgaggcgggtggatcacgaggtcaggagattgagaccatcctggctaacacggtgaaaccccgtctctactaaaaaatacaaaaaattagctgggcgtggtggcgggcacctgtagtcccagctacttcggaggctgaggcaggagaatggcgtgaacctgggaggctgagcttgtggtgagccaagatcgtgccactgcactccagcctgggcgaccgagtgaaactccgtctcaaaaaaaaaaaaaatgtaaatgttagatcattcaccgataggcaccaatatctttaacagaaaaggttaatgcaaacaattgtcagcctaaactgacaacagaaataaaactggtcttcccaagttcaattccttgtggatttgttacattgctacatattacacctagttttatgtgtctagatgctctgtatctagtatacgcttgagagccctccaaatattaatatttcttttttttttttttgagatcaggtgcagtggcgtgatttcggcttactgcaacctccgcctcccaggatcaagtgttattctgccacagcctcctgagtagctgggattacaggtgtccgccaccacgcccagctaattttttgtatttttagtagagatgggatttcgccatgttggctaggctggtcttgaattcctgacctcaagtgattcaaccacctcggcctcccaaagtgctgagattacaggtgtgagctaccgtgcccagcgaatatttctagattttagcagttgcataaattctactccaggaggcttaattgtccttaatataaatgtcacatttcaaatgacattcaaaaatgtaaaatgatcaatttagaaaaaaaaaattactcctacccacttcctctttttctttttcttttttttttttttttgagacagagttgtactctgtcgcccaggctgaaatgcagtggcacaatctcagctcactgaaacctacgcctcctgggttcaagcgattctcctgcctcagcctcccgagtagctgggactacaggccatgccaccacgcccagctaattttttgtattttttagtagaaacagggtttcaccatgttgcccaggctggtcttgaactcctgagctttggcaatccgcctgcctcggcctcccacagtgctaggattacacgtgtgagccgccgcgcctggcctcacttcctctttcatacaatgtcagttctcacgtatttcaaccatcagtacgatcgtattcaaaaagatcaggaagatgatgaagtttttgaagagaggacctgttgtctcttaaggaaacatacagagtggagttctttctgatttatgcagctgaaataataagagcaataacataagcagtgagaatgagacaatggagtttgggaagcaaaaaataagtcattaggcagatgatcaacagccaggataaaaatgagtgacatgaaaggatacactcaaggacccatccggcccacaaagaaagaggtggcctctgactgcagcgcacatgaagcctgctcaacagcctctgggcatgtgaaatctgttctatacgttgaggctttatagagacgcccactagctggtgttgatctcccaacataagtttcttctggcgggaaggatctacaacaaaaattgaaaaggggtagtggataaatacaaacaaaatagaccaggtagggttgggggcagggatactgttcagataatgggtccccctaatggcttactgctggtccttctcttctcacagcaactaagaattctgtttggagtgagagcaaatgtattgcttatgaccaacactgtccatgcccacaaaagcagcaggttcactctcaaagttttaagagtctttgacagaaactgttccgtatcatccacggctagtggctatcctaggcctaaaagtgaaagacgtggattctatctccttagttttatttacaagcccttgatttatcaagtttggtaaaccagcaactaaaccggcctccccagaattttccactcttaaatgtagaggatgtggataggagtcttaaatttaaattagtgaagaaataggctgctgaccaagtaactcctgatagtgtgtcgcagcacagcttggctcaagccttgcaaatgctcgatgagagagaaagtatcgatgagacgtgaacgaatggcatcagctcggggaagctgcatctgcccttcttgttggtaagcggccatgtctgctaagaaaatgtaagcatcaagtgtcatttcattcttggagctgcaccaaggattacaggttttctgtcccctcctccccaccctctttgcccttaagattccttaatgtacccacatctacgaactaggagcagttgggcagaacaaacattctactaagactcagggttttttgaaacaaaaggggctaagagtggtaaagacattgagcagtcgaccaagtggccaggcatcttcactttgtgacggcactaccaattaaaagctcattaaaaaaaaaaaaaaaaaaaaaaaaagtccgggcgtggtggctcacgcctgtaattccagcactttggaatgccgaggcgagcggatcacgaggtcaggagatagagaccatcctggctaacacggtgaaacccggtctctactaaaaatacaaaaaattagccgggcgtggtggcgggcgcctgtaggcccagctactcgggaagctgaggcaggagaatggcgtgaacccgggaggcagagcttgcagtgagcggagatcgcgccactgcactccagcgtgggggacagagcaagacggcatctcagacaaaacaaaacaaaacaaaacaagaaactcaataaaaaaggagcagccacaagggcaggggcccggggctggacaaagaagaacctgggtcccacctgggcctgagagaatcgggcaatgaggtggagttgggggagggcttggcctgcccacgcaagagaaaccaagtgaagagaaattggacaaaatgccaaagcctgacattttgaaaatgggtcccgtcccaagtgtgtccactccaacactccttcgggggctagctccttctctcctccattctcgcttctgggcctcacctcagcccaggttctcttcgcccactcagtcctgacttcacgcttccacctccagctcaggcgccccctgagcccggctacccctacgcaggacgagctcagggccggctcccagcctcactgcgccccatttcccgccccgcccgacccccaggtttcggctcaccccgggacccggccctagcccctgcccccagcccaggaccgggcccagccacgctcgcccagacactcgccgcctcggccccgccccgcgctccggccactcggcggtaacgagttggtcccgcccgcccgacgaaggcgacgcgcagccaatcagcggctgccacacagcggcccaagccgggtttgggggttgggacctccggctgcaggtccgcctgggccagacgcgcgagcgcaagcagcsggttwgtggtcgcgcgcccgacctccgcagtcccagccgagccgcgacccttccggccgtccccaccccacctcgccgccatgcgcctccgccgcctagcgctgttcccgggtgtggcgctgcttcttgccgcggcccgcctcgccgctgcctccgacgtgctagaactcacggacgacaacttcgagagtckcatctcckacacgggctctgcgggcctcatgctcgtcgagttyttcgcyccctggtgagtccattctgccgaggcgggggaagaaaggcggggctgggccgggggcgagagcgcggggaactgttgggcctacgcagcgccggggcccttcattcctgtgggcccctgctgcggcgggcacatttctcattcccgggagctggaggcgcctcgccgagagcgggggagtcggtrctgatcggcccaaggaaaacccgaaggctgcgctcacgcagggcctcatccttatctcggtgctcttgtggcacttcctatttgcagagggttttgccaccccttcccccagtccaatatgtagctatatcttttctgcgtgagtcagtattaatgctcctccagtctacagactaggcatcccaaagccttgtagtggaagcggacgtttcaccaaatgcagaagtcctggatccctagggtatttcctttcatcttacctcacgccgcacagccattggtttctagccaaggtcactgagtggctgcagaatggtcgtaagtgctttcttgaggcaggtaatttgtccgtcacatggtgtacagtttctcccttcagctgatcacttacatctcagtaccggcagatacctctgtccaaacgaaaggagtacgtgaacaagaataattccatcagaatctgtccatattgtctgttttaaatagcatttctttaaaatgtcaaaaaagactccaatgagaaaataaccaatattgattacatactccactttagggtgacttaagtgatcaagggtgtaaattccttagatagaactaactcgaaataaaaaactgttggggagaaggaagagcaaataagatttctggcccagtcaacttgagtgtttgttttttttttttatttgtgtgtgtgtgtgtttttaaacctccagatcattaccagagtaaacagtgattcctttatcctggggatagctctctatatataattcaatatatataattacagtacttaatttttcccctcctggcacagtgacccttggtttaatactatccgtgttcaaaaatgtcagtaaaagttgtgtataacttttatttgcttcagactcaggtcttcccttcttagcctcaaacaacttgctaagggttacacgaaaaaagtcctgtagtaaagaccacctgaatcagaatgatgtgctagagatggcaaattttgtttkcagcttggacagattttgtgtccagggcatttctggggctaactggcagtacagattacacatatagatagttcttatacatctctggaactcatgttctctcttaggaacaactcttcccaattatatratmatgctgttagctttgagggggtgtcaataatttgtaaaaactgggggtgtcactaagtttgtcagatctgagtgatgctttttactacaggggtcatgcaacaatttaaagtaggaattgttggagaatagtgggccactagaatattagtttaaaaaaggaattttggggctgggcatggtggctcccgcctgtaatcccagcactttgggaggccgaggcaggcggatcacctgaggtcgggagttcaagaccagtctgaccatcatggagaaacccccgtctctactaaaaatacgaaattagcygggcatagtggcacatgcctgtaatcccagctactcaggaagctgaggcaggagaatagcttgaacccaggaagcagaggctgcagtgagccacgatcctgccattgcactccagcctgggcaacaagagcgaaactctgtctcaaaaaaaaaaaccagaattttttatttgaattgaagggggtgtttcctactttaaattgttacacgtgctaccctaaaaactacatatcccatcaggcactgactgtcccaagaattgggtggatctctgctgtggtgtctgcttttaattggtttaaaagaaaaagtcatcctccacaatttcagcaagaaagatgagttttctgaatgagcaatttggagttaaagaagtctcctgttgaggtctttatttcttcacattccactacattttttttgtgtgtgtgtktgtgtatttttttttttttgagatggagtctcgctttgttgcccaggctagagtgccatggcactatcttgactcactgcaacctccgcctcttgggttcaagtgattcccctgcctcagcctcccgagtagctgggattacaggtgcctgccacaatgcccagctaatttttttgtatttttaatagagacagggtttcaccatgttggccaggctggtctcgaactcctgacttcaggtgatctgcccaccttggcctcccaaaatgctgggattactggcatgagccactgcacccagcctgtttttttgtttttgttttgttttgttttgttttgtttttgagacagagtcttgctctgttacccaggctggagtgcagtggcatggtctgggctcactgcaacctccgcctcccgtgttcaagtgattctcctgcctcagcctcctgagtagctgggattacaggcacgcaccaccaagcccggctaatttttgtattttagtagagacggggtttcaccatgttagcctgatggtgaactcctgacctcaggagatccaccctcctcggcctcccaaagtgctgggattacaggcgtgcgccacctagcctggcctctgtatttttatttattaacatttcagctggaaatgttttctgactgctatattcctttgtacagttcagtagtactatcttacaagaaacagttaaaaaatccttagtaagagtaaaatggggtctggccctgttgtgcattcctgtaatcccagcagtttgggaggccaaggcaggcagatcacttgagatcaggagttcagaccagcctggccaacatggggaaaccccatctctactaaaaatacaaaaattagctggacgtggtggcgcacatctgtaatcccagctatttgggaggctgagttgggaaaatcacttgaacccaggaggcagtggcgaggtaagagaccagcctgggcagcatggccagaccccatctctactaaaaaatgacaaaaattaaccgggcatggtagcacacgcctgtagtcctagctactcaggaggctgaggtgggaggagaagatcacttgagcctgggaggtggaggttgcaggaagctgagattgcaccattgcactccagcctaaatgacagtgtgagaccatctcaaaaaagaaagtaaaatgggcttttttttttttaaccttattctcgtcacaaaatagacctatttaagcaaattctttttccgctttcatgtttcaagtgaaagtgaaaggtgaaagcttgctttgcttgctttttttttttttgagacagtctctctctgttgccaaggctggagtgcagtggcgcgatcccggctctgcaacctccgcctcccctgtctggctaatttttttttttttttttttttttaagtagagaccaggtttcaccatgttggccaggctggtcttgaactcctgacttcacctgaatcacctgcgttggactcccaaagtgctgggatttcaggcgtgagccaccgtgcctggcttagtgaaagctttctttgcagttgattttgtagactaatatttccattatggagttaatctgctatatatttttaaggataagagtatctgaatttctctggggaaataacactatttaaatgtttggaaatgtccgaaaatttattgattagtgttaatatgtaatattaagtccttggccgggcacggtggctcacgcctgtaatcccagcactttgggaggtcaaggcgggtggatcacgaggtcaagagatcgagaccatcctggccaacatggtgaaaccccgtctctactaaaaatacaaaaagttagctgggcgtggtagcaggtgcctgtagtcccagctactcgggaggctgaggcaggagaatggtgtgaacccaggaggtggagcttgcagtaagccaagatcacgccactgcactccagcctgggcgacagcgagactccttctcaaaaaaaaaaaaagtcctcaacatctatttatgctatagatgtgtatgctaccctctaagacagtagtaataaataatggctgggtgcaaaggctcacgcctgtaatcccagcactttgggaggccaaggtgggcagatcacgaggttcaggagtttgagactagcctggccaacatggggaaaccttgtctctactaaaaatacaaaaattggctaggcacggtggcaggagcctgtaatcccagctactcaggaggctgaggcaggagaattgcttgaacctgggaggtgcaggttgcagtgagctgagatcatgccactggactccagcctgagtgacagagcaagactccgtctcgaaaaaaaaaaaaaaaaaatatatgtgctaatttctttacttgtaatccccaccccgagttgatcttttcaacatcaacatttagctcatattttttttttccttccctggacaactaactggttgatcctgcctctctattggcatctaataatactgtgtcacccctgccagactggtgttcctataaggaaaggactataccaattttcttatcaaagacacttgataaggcacttatcaaaaagtacttgacgcatggcacacatgatgaagtgatgattatgggtgaatatatgttggaattcattatcaactgccaggtgccatccctgaggatagatagaattaattgtgttttaatattttctaggggtgggtgaaagaagtagtggttaatcttgaaggatgtatgttaaccaaccctgatttcccttaaataccacctgagttccattcctgctggatttgaagaggagagtctcctccagcctcattgaaactctttttgtggatttgatgaccttatggatattgccaaagtttaaggcagtggattttagtcccagccttgcagcttacacacacacctggttgctccccagatttctggagattctcattcagtaagccatgcatacttttgttgttttaatgctctgtgggtatttttgataagcatctagagttgacacctactggcttgacctagtaactattgtatgtgatttttttctcttaaaatgtttgaagatagttgaaacaattaactcataaatctgttgcctcagccttgacaactactatatattcaacagaaatctctcatctgtctcttctttattctcattgctgscattccggtccaagcttttattgtctgccatgtgaaatatattatcttctagatggctttactcttgtctctattttctccctttctgtcagtctttgacattgctgattgacgtagtcttagtacacgtgcacgcacatttattatctcacaaaagccctttacagttctctgaatgcatcatgcttactggtattcttttacgtttgctctactatctccctcatcttaaataccctgccctcttctctctgaagcgttaaatccttaaagacccagatccaattgttactccctttaaaatccatttactatgcagtattaaaggaatacagaggatataatgaataagaccctatttcacacacataagataccactgattgtgagaggaactatcttgtgtctcactgagaaagaaatactaccactgaaactataacatgactgcaaaatacatcttaatatcaggaaaaaacaatgaatctgaaatacagcataaggaatagcatttgtttgcactcagtctgaaaaacatagccagtacatttgaagtcccctatgtgcccctttaccatcttatacactcctttatcttgaatttggtatttatcatttggttcttttatactttaataggccgcctgaaggccttggagaataagctgttataatcctttattttaaacaagttttaggtgtacaatatttccaagttatccatcacttgataaaattacaccattgactattgaaatatatctgctcaagtttcttctctattatatttctatttttgctgtctacgggaaggttacagaactcaccttctcaacgtgatccctctgcaaccctttggcttttgaaaaggtgatgtacagctggtgctagctgtatatacactgattaggattttctgggcagaggagccggtgcttctggtggccctctgggaaaggtattctagtttacatgttttgttatcacttctcatggctaggtgaactatgtagctgtaaaaatcaggcctgccatctaaaagacttaatatcatacttgagacattacagggtttcagtcacaattttgtgtccccacccccaccccgagacagagtcttattctgtcacccaggctggagtgcagtggcgcgatgtcagctcactgcaacctccacctcccaggktcaagcaattctcctgcctcagcctcccgattagctttgattacaggtgcccaccaccacgcctggctaatttttgtattgtcagtagagacggggtttcactattttggccaggctggtcttgaactcctgacctcgagtgatctactcgccttggcctcccaaagtgctgggattacaggtgtgagcttcagtcactatttttaacaaccacaatgctggtttcccagggaattgtattttcctctggggaattctatcagaaatgggattatttctattttgtccttcattcagcctcattaattggtcaaaagggcattaacccattcaaccctctttaataatgtggcgtacacctttgactacagctttcacaacttagttatactttgtattgagaaaatagagctgccctgtgctgagccagtactatggagtcaacctcagtctaggggtaggacctttacctcttgagagttctggtttactttaacaataatgaatgttgttcatgtgatgattttgctttttggaagtgtctactagctcaaaggtagtattatagtttgagattcttcctagtgagacaacattaacaaattcataggactaaactgagaatttggcttttttaatacrtatataggtgtggacactgcaagagacttgcacctgagtatgaagctgcagctaccagattaaaaggaatagtcccattagcaaaggtaagtacaggtggattcttcactaaaggacgtgaagtattttaaaaagtagtttgttgtctcagctttgttacatggaaaaaaataacagtaataaatagtttgtaagattaacattcattttctctactcttattctgctaagaagagcgaatactagtttctgggcaaatacacaactgacttgtagtttcaaaagattaaaagtagtggctgggcgcaatggctcatgcctgtaatcccagcactttgggaggccgaggtgggtggatcacgaagtcaagagattgagaccatcctagccaacacggtgaaaccctgtctcaactaaaaatacaaaaattagctgggtgtgatggcacgtgcctgtagtcccagctactcaggagactgaggcaggagaattgcttgaacccaggagatgaaggtttcagtgagccgagatcgggccactgcactccagcctggtgacagagcaagactccgtctcaaaaaaaaaaaaaaaaaaaaattaaaagtagtgagagtaaggaaattactggcataagaagtaaaatagaccaggtatggtgcctcacagctgtaattccagcactttgggatgattacttgaggccaggagtttgttgcctgggcaacaaagcaagacctcatctctacaaaaaatttaaaaagctgggtgtgttggctcacacctgtagtcccagcttctcaaaaggctgaagcaggaggattgcttgaggctgcagtgactagacactgcacactactagactccagcctaggtgacagagtaagaccctgtctcttaaaaaaaaaaaaaaaagtgtaatcccagtactttgggaggccaaggcaagtagatcacttgagaccagcctgggcaacatggcaaaattccatctctactaaagatacaggcaggcttccatagtcccagctactcagaggctgaggtggaaggattgcttaagccagagaggttgaggctgcactgagctgtgattgaaccattgcactctagcctgggcaatagagcgaaaccctgtctcaaaaaaaaaaaaagtagtaaagtatatggtaaataaraattaaagatggaaagcagaagtacagctataaaggttaaaataatcattgaggctgggcacggtggctcacgcctgtaatcccagcactttgacaggctgaggagggcggatcacctgaggtcaagagttcgagacccgcctggccaacatggtgaaaccccatctctactaaaaaatataaaaattagccatgtgtggtggcaggtgcctgtaatcccagctacttggaaggctgagacaggacaatcgcttgaacccaggggggcggaggttgcagtgagctgagatcatggcactgtactccagcctgggcgacagagcaagactccatctcaaaaaataataataatctacaagtaaatgagttccctaaactgctatgtgataatcacaatgatggtaatacgaaaatgatatgaggatattgatgaaaatgtaaccaaatggtcaactgtaaacttggtatttgtttttacaattaaagtaatgcttccagaatgttgccattctgtagtaaacccatagttgttctagtctaaaagctcttacctctgccaaatagttcatatataaggctatttttggaaattacttttaatcttatcaagcagcttgccataggaaaaaaatttaatcatagccaggcgctgtggctcacgcctgtaatcccagcactttgggaggccaaggcgggtggatctcctgaggtctggagttcaagaccagcctggccaacatggtgaaaccccgtctctactaaaaatacaaaaattagccaggtgtggtggccggtgcctgcaatcccagctactcgggaggctgaggcaggagaatggcttgaacctgtgtggtagaggttgcagtgagctgagttcgtgccattgcactccagcctgggcaacaagagtgaaactccgtctcaaaaaaaaaaaaaaaaattcaatcacaattcctacctgtgtgactatagacacattaattaattttctggatcttagtttacccatcttagagcataaggatcatacttcataatcttgtggagattaaatgagataatatatgcaaagtacttgtgcctgggttggagtaagtggctcgttccgggaaattattttccttcttcctgataggtctcactagatcggttatgttatggtatagcccagattcaaactagttcagggtacgtgtacaggtgttggtacctttgataatagctctagatgatttgcaaaatcaaattacattacacctaaaggatatgtaccaccatcgatatatccccttggtgatagtcgtaatcaaagtaagccactgttaataatttaagtgatttatccctcatgtgttctgaggcagaaaaaagatgaagaccaccgctttagctaatagagactacaagggcagaatttaaacaggaactttgcattttatgtgaggcctaggaatctcaattttaaagaattccttaggcagttctgatgtagttaggcaagctccagtctgcctttaaaatctaatgttctgtggcatatatgccaagaattccttgatccccttaggatttgaccaatcctagtattttgagaatataggaagaacctgcagcagaaacttggataagaaaatagtttgtgtattttgatctttaggttgattgcactgccaacactaacacctgtaataaatatggagtcagtggatatccaaccctgaagatatttagagatggtgaagaagcaggtgcttatgatggacctaggactgctggtaaggatcctgaattacattctggaaactgatgttaagtaccttattctttgtagtggaaacataaaaatgtgtttttctacacagtatactttcagtcttaaaacttcctcatctaagaggtcagtttggtggtaacaaaagacctctctaaatgaacagattatataagtaatatagaaaatacacaaacttgatttataaggtcagctcgacattttttcattttacaaatatttattgagtaattactgtgtgccagatattctaaatatactaggtcgttggcatttattgataaaatagacaaggtccctactcttgtgaagcttacattctgggggatgagggggagaaggcaacaaacaagttttaaaaatatagatgagctgggtgcagtggcacgtacctatagttttagctactcgggaggctgaggtgagagactgtcttgagcacagcctgggcaatataagtttgtccccatctccaataaaaagtttgggccggggccgggtgcggtggctcacgcctgtaatcccagcactttgggaggccgaggcaggtggatcacgaggtcaggagatcgagaccatcctggctaacacagtgaaaccccatctctaccaaaaatacaaaaaattagccgggcgtggtggcgggcgcctgtagtcctagctgctcgggaggctgaggcaggagaatggggtgaacctgggaggcggagcttgcagtgagccgagatcgcgccactgcactccaacatgggcgacagagcgagactccgtctcaaaaaaaaaaaaaaaagtgtgggccaggcacagtggctcacacctataatcccagcactttgggaggctgaggtgggcagatcacgaggtcaggaatttgaggccagcctggccagcatggtgaaaccccatttctgctaaaaatagaaaaaattagcactgggcgtggtggcacatgcctgtaatcccagctactcaggaggctgaggcaggagaatcacttgaacccaggaggcggaggttgcagtgagccaagattgtgtcacagcactccagcctgggcaacagagcgagactccatctccacacacacaaaggtatgtgtgttatctccatgtatatatggataaccatctcatacccattaggatggctactatttaaaaaaaaaaaaacaacgaaataggccgggcgcggtggctcacgcctgtaatcctagcactttgggaggctggcggatcacctgaggtcgggagttcgagaccagcctgaccaacatggggaaaccctgtcactactaaaaatacaaaattagccaggagtggtggtacatgcctgtaatcccagctactcgggaggctgaggcaggagaatcgcttgaacctgggaggcggggttgcggtgagccaagatcatgccattgtactccagcctgggcaacaagaaggaaactccgtctcaaaacaacaacaacaacaaaatagccaatgttggtatggatgtagagaaattggaaactttgtgcactattaggaatgtaaaatgggacaaccactatggaaaacacagtatgttggttcctttaaaaattaaaaatagggccaggcctggtggctcatgcctataatcccagcactttgggaggccaaggcaggcagatcatttgagatcaggagtttgaggccagccaggacaatgtggtgaaaccgtctctctactaaaaatacaaaaattagctgggtgtgatgcgcatacctgtaatcccagctacctgggaggctgaggcaggaggatcacttgagcccgggaggcagaggttgtagtgagtcgagatcgggccactgcactccagcctggggaacaacgcaagactccgtctcaaaaaaaaaaaaagattraaaaaattaaaaatagaaggccaggcacggtagctcatgactgtaatcccagctctttgggaggccaaggtaggctgatcacttgaggtcaggagttctagaccagcctggccaacatggtgaaaccatgtctccaccaaaaaatacaaaaattagctgggcgtggtggtgcacacgtgtagtcctagctacttgagaggctaaggcaggagactcgcttgaacctggaaggtggaggttgcagcgagctgagatcacaccactgcactccagcctgggtgacrgtgagaccctgtctcaaaaaaaaaaataaaaatgaaaataaaattactaggccaggcgtggtggctcacgtctgtaatcccagcactttgggaggctgaggcaggcggatcacaaggtcaggagagcgagaccatcctggctaacacattgaaaccccgtctctactaaaaatacaaaaaattagccgggtgcagtggcgggtgcctgtagttccagctactcgggaggctgaggcaggagaatggcgtgaaccctggaggcggagcttgcagtaagcggagatagcaccactgcagtctggcctgggcgaaagagtgagactctgtctcaaaaataagtaaataaataaataaaattaccatatatatgatccagcttctgtatgcccacttctgagtatacatttagttctcacttaatgttgtctatagattcttggaagctgtgacttttaagtgaaacaacctataacaaaacttgtttttttttttcctcatcaatgttacaggaaacagtgttattctaggacttgctatgcattctttctcttgaagttgcagtttctgagaacatatgaataatattgaggacttattgtatacccaaaagaagatagttgtacacctatatccacagcagcattattcatagtagccaaaaggtagaagtaacccaagtatcttatcagtgaatgaatagtaaacaaaatacggtatatgcatccagtggaagattattcagccttaaagaagaaaattctgactacatgctgctatatgattccacttacatgaggtagcacaaatagtatacaaaattgtatgtttaaaaatggttaacaagggccaggcatggtggctcacgcctgtaatcccagcactttgggaggtcgaggtgggcagatcacgaggtcaggagttcaagaccagcctgaccagccaacatagtgaaaccccgtctgtactaaaaatacaaaaaattagccgggcgtggtggcaggagcctgtaattccagctactcgggaggctgaggcaggagaattgcttgaacccaggaggcggatgttgcagtgagccaatgttgcaatcgcgccattgcactccagcctgggtgacaagagtgaaactccatctcaaacaaacaaaaaaatggtttaacaaggctcatgcctgaaatcccagcactttgggaagctgaggcaggtggtttgcttgagcctaggagttggaggccatcctgggcaacatagtgagaccccgtctttataaaaatacaaaaaactagccaggtgggatggtgcatgcctgtagacccagctactcaggagactgaggcgagaggtctgattgaccctgggaggtcgaggctgcagtgagcaatgatcatgccgctggaccccagcctgggtgacagaaggagaccctgtctcaaaaaaaaaataaagaaaagaaaaaaaagattggaaacaaatgtccatcagttttgcaattgtgtctgcttaaataaactgtggcacatttatrgtgaaacactatgcattgtaaacaatgtttctgttaaaaaaaaaacttttttttttttttttgagacagagtctcactctgtcacccaggctggagtgcagtggcacgacctcggctcactgcaagctccgcctcccgggttcacaccattctcctgcctcagcctcccgagtagctcgggaccacaggcgcccgccaccatgcccggctaatttttttggtatttttagtggagacggggtttcaccgtgttagccaggatggtctcgatctcctgacctcgtgatctgcccgcctcggcctcccaaagtgctgtgattacaggcgtgagccacagcacccggccaaaaaaactttttaataataataaaaaacgctatgccactgtaataaaaggttgaggtagctatgtatatataattgcctgtttatgcagaaaatgtctggaaggatatacaagcaactgaaatcttggctgggtgtggtggctcacgcctgtaatcccagcactttgggaggccaaggtaggtggatcaaaggtcaggagatcgagaccatcctgtctaacatggtgaaaccccgtctctactaaaaaaatacaaaaaaaagtagccgggcatggtggtgggcacctgtagtcccagctactcaggaggctgaggtaggagaatggcatgaacacaggaggcagagcttgcagtgagctgagattgtgccactgcactccagcctgggcgacagagcgagactctgtctcaaaaaaaaaaaaaaaaaaacctgaaatcttacaaggaggaaactgggtgactagggacaagggtggcaagaagatttcatcttatacccttttgtaccttctgaattgtgaatgatgaataattgccttctcaaaaattataaataagttgtgttgtcataacttttattttgacttytaagatggaattgtcagccacttgaagaagcaggcaggaccagcttcagtgcctctcaggactgaggaagaatttaagaaattcattagtgataaagatgcctctatagtaggtaagtagcaaatattaaaccgtgccacagaattgtcagtttggtttccaaaaccctccatgtctgggaaaaccacagaattaaagcagttaaggaaaccttggggcagttgagaaggcaactgacagaattgggtcagcaattactataatgtactatatagtacattatataattactatataatgtaattataatgtggggggcaattggtgttttatttgagtgggtttgtgttctcatagatgtaaaggtttaatttcaattaaagggactggaaggggtgggtgtggggaaaaaaataaaggactaggataggaatatcttcagcgttttctaatgcttcttaaactctgagatttgactcacaatagggtagttatgactgaaaataaggttttaaggtaggaagatacaagtaaataataaacctctgctattttcacagaaattagggaactttaaaatcagatcgctaggatttatcttgtttttgcagcattcattgctttctcatgtgttgcagtatctcgtttttaaatgacatgagccagttaaacactttctgcatcttagatgttcattgttttgttttttaaatgtgatatatgataaatttgactaaaaaataaatttaaacataaaagctatgtttgtgcttctcttagtctcctaattactgtaataaaactgactttcgcctggctcagtggctcacgcctgtaatcccagcactttgggaggctgaagcgggcggatcacctgaggtcgggagtttgagaccaacctgaccaacatggagaaaccctgtctctactaaaaatacaaaattagccgagcatggtggtgcatgcctgtaatctcagctactcgggaggctgaggcaggagaaacgcttgaacccgggaggcggaggttggggtgagctaagatcgcgccattgtactccagcctgggcaacaagagcaaaactctgtcgcaaaaaaaaaaaaaaaaaagtgactttctggcagcagaatatggtttactgtttaaatttggctaaaagccactttttatcatctagattttactgattctttatattttacaaggagttagcatgtatttattaaacatttatgttttagtcacttttctaaatgagtagttctgaagacaaatatagagaaggaaaaaaattgggtgaagtggtttacagtttattttgacatgtcatcttaatttaatccttctgatacctgaaatagtccctgaaactcttaagcaatttgcccaaatttgttcaattatgggaaagtaaaatgaagacttgaacactgacaaattttctcccttggctctctcaagaaatgtttctgtaaagggtagagggaaaattctcatcctaaatattgtgcctgtctgaggtagtcatggcaaagcagacccagtcctcaaaatagaatgaaatgtttatggtttatggaatagacgtttatggtttggaatgtccatctgtcagcacttattgcttcttccttgtgtttaatattttctgtataggttttttcgatgattcattcagtgaggctcactccgagttcctaaaagcagccagcaacttgagggataactaccgatttgcacatacgaatgttgagtctctggtgaacgagtatgatgataatggagagtaagtgactgagttgaatctcctgaccaagtattattgtgtgaactggtgatactgattgactgggacaaggtttcactctgtcacccaggctggagtgcagtggtgcaatctctgctcactgcagcctccacctcccaggttcaaacgattctcgcgcctcaacctcctgcatagctgggagtacaggcacgcgccaccacaccctgctaatttttgtatttttagtagagacagggtttcaccatgttgcccaggctggtttcaaattcctggcctcaagtgttccacccacctcggcctcccaaagtgctgagattacaggcatgagccaccgcacccagctgaattggtcatttttatacctaatttttcccaagggtttattgagtactttcaaggcattatgctacatgcccagaaactattgctgccttcaaggaacatccctytatctagtagagggagattgtatgcatgaacatatataaaaatgaaagtgtaagtgtatgtagaactatatatggagtggttggaagtacaaaagagggagtgtttttttcttcttatggggtaggggggtaatatcagaaatattcatagagggggtgactcttgaaggatcagttttctctggaaggttatggcctttgaaataaaaattattccagatagagcaccaggagtgaaggccttgagatgtaagatagcctaggcatgttggggcccatagtactgctggagtattgtttgtgattgagatcataatgaaagataagattggagtattaagcagagaccaaattataaattttaagtgccatacaaaagagctttgattttatcttttagacatttgagagccattaaaagactttgggctggggagtaatgcctagtgttccattactggaatactaagcttgtgggagttatttatatcctcctgctcaaggtcattgccaaggtctgatctttcacaaaaacaatttgcaacctcccacgtaaatgggttaaatttgtgaagaagtcactggcagccacatgataatgatttgaagggggagtggtgcaaggcattctaaggattctaaggagaattctaaggactataaggagaatctaaactgaggatgacatgtgagagtctaaactcggtcaacagcattagtggcaatggataggaaggggtgagtataaaaaaatgtaaacaatagtcactaactatgagtgaaaagaagattcagagcaagtttgagtttatttttttatttttttcagacagagtctcgcccttgttgcccaggctggagtgcagtggtgcgatctcggctcactacaacctccgcctcctgggttcaagtgattctcctgcctcagcctcctgagtagctaggattacaggtgtgcaccaccacacctgggtagtttatgtgtttttagtagagacagggtttcatcatattagccagtctggtctcaaactcctgacctgaggtgatctgtctgcctcgggctcccaaagtgttgggattacaggtgtgagccaccacacccagcccgctattgtttctaaaggtttgaaaatctactctaacccccttttgagataatgaaaaagctgaagcccagaaggattaaattgagacctggtccaacgtgtttggaattagttggggaactatgattagaaccacgttctcttaattttytaacccaaaatttagtaaaccctatacccaattattgcacttaagattaaggtggttagcatcttagtgttaatgagaaggtcttgttgctgaatctgtggtactagaaaagagtccttatgtgcttagatgttgctagttaaaagtggcagcaaaagtacatagtctgagctttacatgaaacatgggagctccaccagtaatcccagcatttttggaggctgagatgggaggatcgcttgagcctgggagttcaagaccacccttggtaacatgatgagacccccatctctacaaaaatttaaaaaataaattagttgtgcatggtggtgcacacctgtgttctcagctatttgggcagctaaggtaggaggatcacttgagcctaggagttcaaggctacagtgagctataatcacaccattgcactccagcctgagcaacagagcgaaaccctatctcaaaaaaaaaaagatgggagacagttcttctgctatctgcctactgagacttttcttttttttttttaaggggtatcatcttatttcgtccttcacatctcactaacaagtttgaggacaagactgtggcatatacagagcaaaaaatgaccagtggcaaaattaaaaagtttatccaggaaaacatgtgagtacttctttgtatcttgtctgggatttatttgcttgattttagtttgtttacctcagttattaagccgagctatattttggcgtaaacagtctatttggggggattgtaatagtaatagtttgagtttatattaaagcagtaatgtgtgggtgttagaactcctgttgtcatcctgtaaggtatatattgctcagtacttgttctaaatgtttaaaatctctttccttcataaatgctatcaattattttgtggcaactttatgatatagctaaaaacttggcaagccagttgataatggattatttcatttcagttttggtatctgccctcacatgacagaagacaataaagatttgatacagggcaaggacttacttattgcttactatgatgtggactatgaaaagaacgctaaaggttccaactactggagaaacaggtaataagaattatgtttttccctcatgaacaagtttacccaatgtatagacagtcccttctaactatcttgttggttccttaagaatctgtaaaacaataaatggttccttaagaagaggtaaaaaaaaaaaaaaaaaaattaaagtaactatcctgttaccatgtgtggtataaaagcaggaaagaatgggaacatttggcttccaaattgtctacaattgacttcaaatggctacatttgaagccataaggacaaataaactgttttcacaatctgttgggcatgtatttcgtaggtgtttctttgctttgtgacacagtgactccaagtagaaggtggaaatttgatataaaatgcacttaaaacattgtgcttacttgcacattgagcctctcagtgcattttacccttacaaattttgttttcagatcagttattatgcctataatagatttcagttatatattacagcaagatttagcaggaatgcaccagttgattgggtatcaccaatttgccagtgaagttcagtaaggcattgaagtatatcataaccctgtgtcagtgcccaagagctcagactgttcagactgattccagaaggctagaactatagaacttagtctttgctttccaatcacttgcttcttagtttcaaaagtgcttgaccaccctgtatagtcttggcacaaatgtctcttgtttcccacagggtaatgatggtggcaaagaaattcctggatgctgggcacaaactcaactttgctgtagctagccgcaaaacctttagccatgaactttctgattttggcttggagagcactgctggagagattcctgttgttgctatcagaactgctaaaggagagaagtttgtcatgcaggaggagttctcgtgagttgctagttgggctttgattctccaaggcaattattaaagccttttatactacaaaggatttctaaagaacaataaccctggaatgtgaagataggtcttttaatcaagacctatgactgtcatttttytyaatttaaatataggtactttagaccaggcgtggtggctcacgcctgtaatcccagcactttgggaggccaaggcaggtggatcgcctaaggtcgggagttcgagaccagcctgaccamcatagagaaaccccgtctctactaaaaatgcaaaaaaattagccaggcacggtggtgcatgcctgcaatcccagctactcaggaggctgaggcaggagaatcgcttgaacctgggaggcggaggttgcggtgaaccaggatcgtgccattgcactctggcctgggcaacaagagcgaaactctgtctcaaaaaaaraaataaataaagaaaaataaatacatataggtactttaaggattatgatccttaatgaattctgaaaactaatgaaaggatggcaggttggaattcttacatgattccacttggtcattagaaatagcagataaagggtgagcacagtggctcacacctgtaatcccagcactttgggaggccgaggcatgtggatcacaggagttaaagaccagcctggcccacatagtgaaaccccgtctctactaaaaatacaaaaattagccgggtgtgacggtgcgcacctgtaattccagctactggggaggctgaggcaccagaatcacttgaacccgggaggaagaggttgcagtgagctgagatcatgccactgttctccagcctgggtgacagagcaagactctgtctcaaaaaaaaaaaaaaaaaaaaagaaagaaatagataagattggacagcctcctttgggccagatgtggtggctcacacctataatcccagcactttgggaggctgaggcaggaagatcacttgatcacttgagcccatgagtttgaggccagcctgggcaacatagcaagaccccgtctccaaaaaatttaaaaatctaaaaaaagattgaacagtctccttgatactgacgtaatttcaaaccaaaccattcccccccctcatccctacagaatgtattttctttttgaaatagcacatgggtctaaagtgaactcagaatcgggaagatctgaagaccccggaaacaatttttaccctcactttctgagattttgggagattgagacaagagaaaatcttccttgtgagccagtcaataaaacaaaatactgtaaatagtgtgctccagagcaataagaccttgttttcttacaaagatgaatctccagaagaccaatgattctcctttctctgaactttgtaatccacaaagaacacactagaaataaaaggaacggtttgtttcttcagtcggtagttctgcatattgagagatgagagtcccccttttttagccttgaaaagctaaaatacatagtaactattcaaagaaattgctgtaattttctcagcggtgggaatagattaacaagccttacccttgttttccaattgtaggcgtgatgggaaggctctggagaggttcctgcaggattactttgatggcaatctgaagagatacctgaagtctgaacctatcccagagagcaatgatgggcctgtgaaggtgaggtgctcacagcctcatcaagctatgagcaattgcctgtcctcatttctttgttccaaaactgtggggtctaaatgaagacttygttggccatctctttttttttttgtccttactcccgagtcataaaataagcattggcaggccaagcggtggctcatgcctgtaatcccagcactttgggaggcaaaggcgggcacatcacaaggtcaagagtttgagaccagcctgcccaacatggtgaaaccccgtatctactaaaaacacaaaaaaatcagccgggcatggtggcgggcgcctgtaagcccagctactcgggaggctgaggcaggagaatcgcctgaacccaggaagcagaggttgcagtgagtcaagattatgccactgcactccagcctgggcgacaagagcgaaactccatctcaaaaaaaaaaaaagcattggcagggctcataatgcttggtaggggcaagcgtgtaaagcctgcgtagaattttctgatgaaatttatattgggctaagttactcttgaggatagagcaacccctaagaacagtgtgttgctttgaattttttatagggatgtggtcttactctgttgcctcagccttctgagtagcttggactgcaggcatgtgccaccaagcttggcttgaaattattttaaggaatggttgggtagcacttctatgtcctgtaacttcctgaacatagtttgacaggtgacagacataggaacgagttggtatctagtgaatgacaacatctttaatacaatctgtaaatgtgatttgggtttccatgacttattttctgtggtaacacatcaaattagagagggattgggtctaggaacaaatacagttgtgaatttatttttttatgttaccaactagagattcttctgtgttttccaggtagtggtagcagagaattttgatgaaatagtgaataatgaaaataaagatgtgctgattgaattttatgccccttggtgtggtcaytgtaagaacctggagcccaagtataaagaacttggcgagaaggtaagtgtgaaccctattctgaggataacatttgagcgggagcagtaagtttatgtatgtattcagcattggctaatttgkttggttcctaagtactgatagatttttttcccaattacttgctgtttactcactttctcgtgactgccccctagtgctccagcctgtgcagtgcctgagatacccacttttaacattccattcctcaggctcaatctagataatggttaaaaatatctaaggacttctgaattttggtaatggcttacatgaatccatatggtccttcatcttaaaacatttggcttagcccctgtaatgtcttattcagaccaggtaaatttgaaggtggcaatatgtagagtcttaatacaagagaaaaaagggaagcttgtggaaagtgaggtactaccatctgcaaaccactcttcccacatgaacagcagtttatctgctggaattacaggtgcgcaccacyacacccggctaatttttgtatttttagtgtttgaagaatgagattgttttaagtcttcaattgactaagtgtccctctgtcactgaaaacttgaaatgtaaacatttaacctgttttattaacagctcagcaaagacccaaatatcgtcatagccaagatggatgccacagccaatgatgtgccttctccatatgaagtcagagggtaagtggcttaaaacttaacaaaagtgtctaggcaatagataggaataaagcttgtaaccaccaggaaatcattactagacatagttttcatattcagttgaaggcagaaccactgattccttcttggcttaagagttctgcagtatgggcccacataactgcttgaaattaataaatgtttctttccccagttttcctaccakatacttctctccagccaacaagaagctaaatccaaagaaatatgaagtaagtgaattgtcccatatccccacaaatatatacacagacgtaaacacacaaccttaaacayagttctttaattgggtttatttatttatttawttatttwttgagacggagtttcgctcttgttgcctgggctggagtgcaatggcgtgatctcrgctcaccgttcaagcgattctcctgcctcagcctcccgagtagctgggattacaggcatgcgccaccaccccggctaattttgtatttttagtagagatggggtttctccatgttggttgggctggtcttgaactcctaacctcaggtgatcagcctgccttggcctcccaaagtgctgggattacaggcgtgagccaccgtgctaggctaattgggtttatttaactaaaatctctttaaactctcatgggcagtatatgtggctgctaatatgcttttacaaactcagaagtcttcctgtttgggtggggcagatcagggttctttaaaaagttacacttttaagctgatctttctgttttcagggtggccgtgaattaagtgattttattagctatctacaaagagaagctacaaayccccctgtaattcaagaagaaaaacccaagaagaagaagaaggcacaggaggatctctaaagcagtagccaaacaccactttgtaaaaggactcttccatcagagatgggaaaaccattggggaggactaggacccatatgggaattattacctctcagggccgagaggacagaatggatataatytgaatcctgttaaattttctctaaactgtttyttagctgcmctgtttatggaaataccaggaccagtttatgtttgtggttttgggaaaaattatttgtgttgggggaaatgttgtgggggtggggttgagttgggggtattttytaattttttttgtacatttggaacagtgacaataaatgagacccctttaaactgtcttattttccaccagattgagaaccagatgttctctacacactatcactgttcaatagagctttcttcagtgatggaaatgctctgtaatctacactgttcagtacaggtagctacrgagcatctgaaatatggctagaaactacatttttgttttgattaatttaaatagccatacagttgctaccatactggtcacggcagctgtagactgactgggtccatagttcatcacctcaaaattctttcaaaatttattatctctttctctccttacatgtttatttcccaggcctaccctggtgattagaacagctgaagggcctttcttgttaggctgtccatgccctaaggatgggttcctgtttatccttgccacgcagctgagcttactgcatgtttatatctcccaaggactgttctctgctcagaaatgccctgtcaagggtgtggcatcacgcagtttcatccaagttgtttcaggaattgctgacactgctgggtgcagttctatcccctaaagcctagggtgtggccctttaacttccccttcagtagaactgggaaaggcagtaccattcctagttatgagtgaagcatccactttcttttgtaacaatgaggaacagaaaggataagactgaagagtgatcttttgtccaactaaaccatttatctccttttgtaggtaaattcaaatcctgcccagttatagttttcagtcactggagaattccaggtaggagccctactttaggtgatcctaggaactcctatgttcagaaaagaattttcttcctactatataattacagtatttagctgtcaattttaagatgaatttggtagagccttatagtaaagtatgtatcttggtcacacacaaagcttggaaaaagtaaaagatgtctaaaccataatcttgtaactcataacatctgggctggggcccggggatctaattgtttagagagccccaaaagtggctcagatgtaaagccagggttaagaaccatctgccttggaagatttaagggaaacatataaacttgtacaaaggacacmgaagcagtcagttttaattttttagccatgttggtaaaagttcattttcagtacatgggtaacacccaggccctttcccattatatccaggtatgctacaagttcttttaactcttatcagaagttattattactgtttccttagagaggctaccaggctaaaattcacttagtttggtttgtctaatgtcctcattattttatcctgaagatgatgtcatttctcaggacttgaaaatgacttggctgaactaaaggtaaaaaagccaagcctctgtcacttttcctagactcctaggcacagctatggagtctttgcacagtgcccataccctaaaaattaataatgaaaaccaaacctcaagaacctagagcagctctctacttgccaccatggactccagtggtcagcataagaaaagcagatagttgcattctatttagtttatagctgctttgttcctttgtgtttcactaagcagaggctcaaaaattcccttgataacttcagctgcccctgttcttttcctcaaactccaggatgagacctttaatgtgggacaatttctggtgaaggtactcacagcgacgcttttcttctctgtaacttgggtactgctgcagagaaaaagcatccatgtcaaaaagtaaaaattctcattctaccttgcttccgttcccagaccttgtcttaccttcctgaactttttatattcctggattatcttgtcttccaggacctgaaacagaaattactagcactgagttcaacattaagaaatgagagaggggcggccaggcatggtggctcacgcctgtaatcccagcactttgggcggctgaggcaggcagataacgaggtcaggagatcttgaccatcctggctaacacagtgaaacccgtctctactaaaaaaatacaaaaaaattagctgggcgtggtggcaggcgcttgtagtctcagctgctcgggaggctgcggcaggagaatggggcaggagaatggcgtgaacccgggaggcggagcttgcagtgagccaagatcacgctactgcactccagcctgggcaaccaagtgagactgtctcaaaaagaaaaaaaaaagagagaggggccaggcgcagtggctcacacctgtaatcccagcgctttgggagactgaggtgggtggatcacttgaagtcaggagttcaagaccagcctggccaacatggtaaaaccctgtctctactaaaaatacaaaaagtggctgggcatggtggcacatacctataatcccagctattcggaaagctgaggcatgagaatcgctttagcctaagaggtggaggttgcagcgagccaagattgcgccactgcactccagcttgagagacggagctagactgtccccccaaaaaaagaagggaagtaacttcccttctcattctaccaaatgatacagactaatttttcccttcaaacaggtttccttgtcactttgcttagtcactttataaacacaggtgtatggatggttagcagggggttaatggccagtagagctggaaagccaggctgggtcctgtccttaccttgtattctggagttcctcgccgaactcttttaatctctgctcccagctctatgaacctttggcttgcagtcccaacacgggcatgcaggatgcggtattcagcataatctgtctcaaagtcctgctcataggcatgttgctgttctgcactgtggatggccctgtattgcctgccaggagcagagagttgtcaccttcaatttcattgcccctgaaaagcccccagcttccaggaagtgtatcttaatatatgaacaagtcttgatgaaattggaaaaagcaaggaactcacaggaggtagtctggtatatcttcaggacttggggattcagaatctaggaaggaagcaagaaaacacaagtgattataagtcttttccactggcatttttaccctcctctcattaactcaccttcttgaactgaggaactgtgttctaatctggggtccatgtcctcatcttcttgctcccaatcttctccctcttgtaaatcctgattggtcaggccttgtagggggcttrgcactaaaggcagagttctgaacctcttttcttccagttctacagtggctacaggcactgaacgtttctgttgaggaaaatatctgtgtgacataaacagccaagagcttcctaaatatgttcttctctcaagaatttctcctaggctgggcacagtggctcatacctgtaatcctgaccgtttcagaggctcaggtggggggatcgcttgagcccaagatttcaagactagtctgggtaacatagtgagaccctatctctacaaaaaaataaaaaaatgagcctggtgtagtggcacacaccagctgaggagggagaatcgagcctaggagttcaaggctgtggtgagccgtgatcataccacaacactccagcctgaggtgactgagtgagaataagaaaaaaaaaaaggatggcctgagcccaggagtctccagcctggggaacagagagaccttgtctctaaaaaaattcctcccatataacgagcttccaatttctaaattttagcttgactaaaagtgcttttcaaaatagtctttgccactgtttaattatattaatgttacaaaaaaaaagcccttgccattctaacttaccttgtccagacgtttccggctggcagaggaaggcagtgcctgaacaggttctctgtttggaacatgggtctggcttctaggatattttaagggaatgggacagatgaagaccagggtaggaggtggaactggatcttttattacaacatttaagagtggagattagaaaggaagacaatgccaaagcttcccatgttagtcccaccccatccaaagtacctcacttcccactgtgccatgtgctcccttgaggatcctgggagtgactgtccttggttgcttgccagtggatctgacactgacacctggtggggaaagtggcaggagcacttggttccctggagtactgggataccttggacttcaggctttgccccaccttatcacaactccctgcaatttctggcctcacccacctcctctagtgccatctgtggctgtgatactgcatctccttcagaatagcctcctgtgttctgccractctcaggatgtctggcatcttcagtcaggttgtgtccctgaactgatgatggggctgggatagaatccatggctgcccaaataatgaggcgctccctgagtgagcccaggcagtggaggctgttaggcccagacctggaaaaggatggtggaaaaaaataggagggtggagagctcttaagcacctctccacatttccctcccccactttccacaaaccctttcttgccggctacctgttccccctcacctgaggaagcgttggcacacaaggtccaagctaccaccagcgccctcctgacaacactgggacactatgaaggagaagaggcaggaccaaccagggcctgggagtctcagatactgggggtggaaggagacggtaagccccatgaagtcagcccctccccctcctgccgccgccactcgtccgggagccagtccgtaagtaagactaagacgggtcccacagggcttgttagcacaccaggtgcagctgggcctgagttccccaggaggccgaaacagcacagtcccctcaaaccacagccccctgggacaaccccagcagcctcctcgccccacttggagttcagttatcggaactacctcagaccgtgactactcgcagcctccggccccgaccgcaccttccacctccagcccacgtttatgctccctcgccctcacctcgctcacacaccctgagctcgcacttacccctcggtggccttggaaagcaatcaccggccgtacctgcggggagagcgaagatgtgaccgttgagcgcaggtgaagcagtgtccccaggatccggcgtccggagcccgggatcacctgcctagcgggcttcacttggagaggtggggaggccagagcttgcggaagccgctccctctcccctgcaccttctccagggtcgccggctgaggcccaaggtccctaggggcagtgactagagaagaagggggccggccgtacctgttgccgctgacactcttgcagcgcccgcagggcagcgtcgttgagcctgagcagtaagaggctagtccgggcagcttgcgtgaagcagagccggagctstcctctcagaggctcctggagctcctccatggcgacgagttcgagtgcaagcagcacgggggccacaggcgagggccaccaccgccacctcctctgttcagggtttggttggcacacccggtaacccacgtctgccccaccctccgccaggaacccgcccccggccccacctcccgccagcgccaccccaagctttcccagccgcgtgggcggcgcttcgctctccccggccaaccgcccggacctcggcgctttcttctaggatccgcatgaatcgctttgggctatcggaagagctatccccagttctcgggagaaagagtccgcgaccagcgtctgacctctcactcagagtccccagtcctgccttagtttccccagcgaccctgaatttggagttgctgtctctaagtgaaagctgaacctgcaaccccttgagggtttcagccgcagaggggcgggagaaagggcctggttggtaggcgggctcagcggttcgcgcccagttagccccgagcttcggagacccgagagaccagaggatggctgacacgaaggggcacccgagacagcgcctgggctttttcccgcccgcggttccaccgctctgaaaccgatttctaacagagaggtaattgggsccctgcggttgtggtggcagcagtgaaagttggctgtcaccgactggagcgcccccagttggtgggcagggatacgggcgcgggtagtggcaggaaagttgcagggcagagagccagaacccagtcctaggtctcacctcgtggcctaaacacgcgtcagagtggtgagaccgctccctgaggagggccaggagctgccatgaagtcgccaggcattccagagggccagatcctggtgcactgagaccccagcaccaacctctggccagcccttggtgtctccacttgttcctgtttgattatgtttcccaagagccccgatgttgtcctgtttcctaaacaggatccctctgttaaatccctggacctgcacaatccccgggaaccttaacgtcctctactacaaataaaattacctatacatttgtcaaaactcataaaaaaaaaatacatttttttttttttttttgagacgaagtcttgctctgtcgcccaggctggagtgcagtggcacgatctccgctcactgcaagccccgcctcctgggttcacgccattctcctgcctcagcctcccgagtaactgggactacgggcacccaccaccacgcctggctaatgttttgtatttttagtagagatggggtttcaccgtgttagccaggatggttttgatctcctgacctcgtgatccacccgcctcggcttcccaaagtgctgggattacagggatgagccaccgcgcccggctaatacacataaaatttgtatgtaaattatacttcaataaagttgatctttaaaatctgtgctatttctgtttctctgcggcaatatcctaatctgataaacagttgtggtaatggataaagctggtctcttagctgggcatggcggtgcatgcctgtagtcccagctactcaggaggctgaagcaggaggatcgcttgaatccatgaatcaggttgcagtgagccatgttttcgccactgaacttcagcctgagcaacagagagagaccctgtctcaaaaaaagaaaaaaaggccaggcgcgctggcagattccatctcaaaaaaaaaaaaaaaaaaaaaaaaaaaaaaaaaagaggctggg

SEQ ID NO: 95726 - DNA, 22852 bp, Homo sapiens
  misc_feature (1)...(22852): n = A,T,C or G
tcctgcgtttttacagcgacagacggtaaagccaaaagatctgtcatcctttattccttcccagaccactggagggatgtaaacagcagttatcagttatcagcaataaacccttatatcaacatttatcaagataaagtttcacaaaacaggaagagaagagatatcattattaaccagtgagtattcattgggtacctactgcatatttttaaatgcttttaaaccataggacagtttataggcatgagatagtttcagtactttggtgaccactaaccagtactgccaacgttactacatggctctatgctagtactataaaagtataaaataaatatattctgtaaattaaactctaatttaatagaatggtgataaagtatatcagataaagttcccaaagaacataattgtaacaatgttaggtttatgaacttcctgtaacagttaacatgaggaaccaggagcctctcctaagagaaagtagggaaggacttttttccttttcttcccctccagagacagaatctcactctgtcactcaggagtgcagtggggtgatcgtgacttattgcagcctttaactcctgggctcaaatgatcatcctgcctcagcctcttgcgtacctgggactaaaggtgtgtgtcgccatgccaggtgtattaggctattcttgcattgctataaagaaatacctgaaactgggtaatttataaagaggtttaattggctcatgattctaaacgatgtacaggaagcatgatgctgctatctgcttggcttcttgagaagcctcaggaaacttacaatcacagcgaaaggtgaaggaggagcaggcacatcacatggccagagcaggagcaagggagtgggtagtgccacacacttttaaacaaccagatcttgcaagaactcactcactgtcacaagaacagcatcaaggggatggtggtaagccattcacgagaaacccactcccatgttcaaatcacctcccaccaggccccacctccaacattgggaattacaattcaacatgagattgggtggggacatgtatccaaactatatcattccaccccttagagtggtgggttggagcccaagcagctggatgtaaggagcaatgtctcgaggctgcttttattttctaccacacggccaggctgcaggttttcctgacttttatgctgtttcccttttaaatataagtcccaacttatttctttgctcccacatctgagcataggttgttagaagtagccatgtcacctcttgaacactttgctgcttagaaatttcttccagcagatactctaggttatcattctcgcattcaaacttccacatatccctagggtatggacacaatcctgctaagctctttgctgaggcataagatgcatgacctttgctccagttctcaataagttcctcatttccatctgagatctcctaagcctggccttcactgtccatatcactatcggcattttggtcataacaatttaaccagtctctaggaagttccaaactttccctcatcttcctgtcttttctgagccctccatactcttccaacctctgcctgttatccagttccaaagctgcttccacatttttaggttcctttatagcaatggtccaccctcggtagcaattttttatatcaagccatttgtgcaccgctataaagaaatacctgagactgggtaatttataaagaaaggaggtttcattggctcatggttctgcaggctgtacaggaaacatgatggcatctgcttctggggaggcctcaggaagcttacagttatggcagaaggcaaagggggtaatggcatgtcacatggccagggaaggagcaagaaagagatagcaaagtgccacacttttaaaaagccagatcttgcgagaagtcactcactgttatgaggacagcaccaaggcgatggtgctaaactcttaatgagaaaatccacacccacgatccaatcacctcccaccaggcaccacctccaatactggggattacaattcaacatgagatttgggcagggacacaggtccaaactatatcacctggataattctttttttttaatttttaagttaatttatttattttagagatgagatcttgctttgttgctcaggttggtctcaaactcctggtctcaagtgatcttcccacctcagcctcccaaaattctgggattacaggtgtgagccaccatgcctggctgagaaggacttttaaagatacgatttgggataactctaaagagggaccagggaagtgggtggtcacttgtggattgattatcacagtgatctttgttcagaagttgggaagaacaaaactggtctgggaaagtcactggtaagaagggagcaataaaaaataaaattagggctgggagcagtgactgatgcctgtaatcccagaactttgggaggctgagatgggtggattgcttgagcccaggaattcgagacagccagagcgacgtggtaaaacctcatctctacaaaaaatacaaaaattagcccagtgtggtggtctgtgcctatagtctcagctacttgggaggctgaggtgggagcatcacttgagcgccccagaagatggaggttgcagtgagctgtgatcatgccactgaactccagcctgggtgacagagtgagaccctgtctcaaaaataagataaaatataaaaataaaaataaaaattaaaaaccatgtaaatattcacaatagccacagggtggaagcaacaagagtgtccattaatggattaatgtatacaaaatgtgatacatacatacaatgaaatattattcagcttgaaaaaggaagaacattctgacacatgctacaacatggatgaactttgaggagatgacagtttaagwgaaataagccagatatgaaaagacaaatactgcataagtctacttgtaagaggtacgtagagtagtcaaattcttagagacaaaaagtagaatcgtggttgccaggggctgggagtggtggttgggtggagacggggagttaatgtttaatgggatggagtttcagttgggaagatgaaaaagttctggagataaatggtggtgatggttgcacaacaatgtgaatgtactgaatgccaccatgctttataccagtggtccccaacatttttggcaccagggaccggttttatgaaagataattactccatggatgggggtgggggagtaatggtttcaggatgaaactgttccaccttagatcatcaagcattagttagattctcataaggagcacgcaacctagatgcctcgcatgcacagttcacaacacagggtttgtgctcctatgagaatcgaatgccactgctgatcttactggaggcggggctcaggtgctaatacttgctcccccgccccttacctctggcagaacagccccgttcttaacatgacacagactggtaccagtctgcaccgatctgcagccaaggrgttggggacccctactttatgtggaaaatggctaaaattgtaaatttttatattatctatattttatcacaatttaaaaaataaaaattaaaaaatatgtaaaaaagtagttatctctcaaaagagggaagggtttgtgtgtccttagccatgtcatgttagaaacattattccagtagtaaagtcgaaaaaaatggtgttctttaaaattttaaatacataatactttaagaagataataaaaagcccaattgataaagttttctgtacttcagctggctctactttttttttttttgagacagagtcttgctctgctgtgcaggctggagtgcagtggcgtgatccagctcactgcaacctccgcctcctgggttcaagcgattctcctgcctcagcctcccgagtagctgggactacaggcatgcaccaccatgcccagtttatttttgtatttttagtagagacggggtttcagtatgttggccaggctgatctcgaactcctgacctcgtgatgtgcccgcctcagcctcccaaagttctgggattataggtgtgagtcaccgtgcctggcctcaactgactctactttctatgaattgagtttaaagctaagaaaaaactaaagaagaaatgcacaccatttttcataaagtaggccacaaatgagtaaaaaggtatagtaaaacaatgcgacatcaggcaatgcaggtaaaatatatacgcattgtgcacagtaagtctttatgtgtataatctgtgcataccttttgatggcccttcaaagagtttctctaggcccttgcaggtggtgggttgggtacacaaaatcagtagaaggtgaaatccagtaccctacactttccttaaagctcctattaggcaacaaagtttctctctcataaaaccaggtaggatggaccacaagctctgtaatgagtagcaatatggctttcagaaaaatacatagaggttataattcaaagccgagattgatatttgtgacaaagcggcattctgccacaaatctgttactgaatagccaagatttaagagactcacaaaatttgacactccagggcctaaaggtcctgatgctggccacctggactcctagaaatgatagacattatagcagtcattgcaggagattaaagacacctggatcaaagcccaagaagatggcagagcaggcagaactgttttagttcattttaagttagtttgctgcatagatttgttataggaggacgaaatttaactttgagaacttttaagaacagagtagcaagttgtcatcatgcagacacctaataggtgaactgaaatgcaggccgcatttcataagaaataagggataatccttggccaaattgtcagaggcatttgaagagtaaccctatcttgaataggggctgggtaaaataacaccgagacctactgggctgcattcctaggaggttaggtattctaagtgccaggaagggataggaagtcagcataagatacgggtcacaatagactttgctgacaaaacagggtgctgtaaagaagctggccaaatcccactaaaaccaagatgacaaagtgacctctagtcattttcactactcattatacagtaattacaatacattagcatgctaaacgatactcctaccagcgccatgacagttcacagatgccatggcaaccttaggaagttaccctatatgatctaaaagcggagaaccctcagttcccggtattgtccaccccttgtttagcatataatcaagaaataagtgtaagtatactcggtcgcccatgcccctgctctgcctatggagtaggcattcttttatttctttacttttaataaacttgctttcactttatggactcgccctgaattctttcttgcaggaggtccaagaacccactctttgggtctggatctggaccgctttcccataagaaaaagaaggaaggtaactaactttgactgaacacctgatacgtgctaaatgatttctcagacaagatcttatttaaatatttctaaatgatttgatgataatgttaatggccttctggcccccaaaagcacactgcctcttggtcccaaataaatgaggaaaatatccagtttgtggaatagaggggcaggtaagtaaaaaaagaaaaagaaatgcaaagaaggaaagatatacatgaaaaaaatgtcatacagagataatcagctcttttccaaccaaccaaagtaagagttcttttttaactgcgcggttacaactaaccaaaactcaggaaataactcctggaagcaaacaaacttagcagtgaaaaacaagcgcgtccagtaacaccagaaaaacacgtggcgggggtggggcatctggtcgcaaccgcaggtgagactctaagtcccatcattcccttcggcagccaagccaggctgttgagggcgagccggcgcaccgtacgctgggacgtgtggtttcagctcgtgcgcctccccgtgggtttgcgacgtttagcgactattgcgcctgcgccagcgccggctgcgagactggggccgtggctgctggtcccgggtgatgctaggcggctccctgggctccaggctgttgcggggtgtaggtgggagtcacggacggttcggggcccgaggtgtccgcgaaggtggcgcagccatggcggcaggggagagcatggctcagcggatggtctgggtggacctggaggtgagtgaggtcggcggggggcttggggaggcgagtgaggtttcgctcgtggaaccgaggagtcgagcccgncctgggagagcgttgggggtctgggtctcaggtgtggcaggtgagcgcggccggccacgggcggtgcagggcaagtccggaggcaggagtcctgcgggtgttgggcgccgtgctgcgctgtagggcttctttccacaagggaggagtcctccgtgtggcttcttctcctccctacccctccgcccagatgtggacttttcctaacgctctggcgtctctgggcttgggtcactggagtgggggcgggggcagcggctctgttcccagcttcccccaactaaatccttaaaggaccctaggttgttagggccagacgggactccggagatgactcagccttacccctcattccataagtgagaacattgaggcccacagaaaggattcaactcattcaaggtcgtgctgttagtgagagtctgagttgagaccagaacccagttcctatcccttcaggctttccatgcccgaaacaagggctcctcccaccgttgagcctcagtttatatgaagtgaggataataacagtagtttttccattagattgtgaaggtccagtggtgtaattaatgtgaaaactttgtaaactctgcagagacgtggtggtggtagttatccaactcttccaaaactgagtgatgtcagcactcagttttacttactttgcatctgtcccggagtagaatctcagtgcttgacaaatagcaggcccttggtaaatgtttgttgaataaacgaggactcgtgtttagtaccttcagtagttgcccgaggagcattctttctcttctgtttcggctatggattacaagctgactatgtttgagggaattcctgttaaataaacttgggtaaaagaggccagaatgatggctttgtgtgtgttatatatttatttttaattgcagatgacaggattggacattgagaaggaccagattattgagatggcctgtctgataactgactctgatctcaacattttggctgaagtacgtgatgccatgtaatacagtcatactttttaaagggcactggaaatataaccatcattttttccagcttctttatttaaaaaataagaaagttgaggtctatatgggttaaggtaatgtgctasgtcatggtaggggtggtactagaaccaaagtaatccatctcacagcctagtgaaaattaaaaattaaacattattttttaattaaccatgccagaaatttacagaaacataaattctgtcgtttactgagcgcttactgtatgccagctacagtttctgtgtgctttatatgtctttgttcttagttctcacagcaactataagttagttattgttataatgctcatttgatggatgaggacacttgagcatagagatgttgggtaatttgtctgaggtcccagtggctgtttactgggggagccaagagtttaactcaggctgtctcagtaaggtgctcctaacaagtaggacagccagctgtcctcccatcagatttggtgactcgtgccaatgtttgcgtctttatatcataaccttgactttaacttgactccatatttacaattctgccttttcaactaggacatgtgattcttctagatcagtattaagattttagaatttctgttagtgcacacccgtaaagtgttctgttgttgacagattgggcatgattaaggtttttgcatgctacttccaactgaaacatttagcaaaacaaaacacacctgctgcatttcagccactcatgaaacatttaataaggatgtgacaccatctggtagggggtgaaatccctgaccctgaataattctgttttatactgtcagcagtattcagagccagaaactccagaataggaacaaagtagggatgtttgtggaaaagagagtcttgttaaaataagttcctagagggtagcattgatatgttactggcactggatacatttcgtaaatctgcagttaacacttttgtttgttttgctgtgtaggtaaaagaggtgaggacgtatttctagattaatgactgcgtttgtggagtaccaggcttatcctccccacatatcaactgtaggagaatyatgagactttgtacttctcatcataacaacttttttaactttgtataaataaagccctgagttttagatttggttgtttttttctgttacttgggatttattggagatcaatagtgaagagaagtgtctttattttaccagtctaacttacccttggccgaagaagagtgtttcctttagactgttgatataatgtgaaatactgacagtttaatggacccgtaggttgatatgtaccctggaggaaatttgggtatgtattcacacagctgcagatgaatgcagcatttgtaaatggactaagtcagatgaggataaagatgttaaaaaaaaaaaaaaagcttaggggctatcagttctgcagtatgttttattcttttataagagtctgagaaaaatgttttatgctggtagaagagcaggcatcctactctgaaaatttttctgtaggtgtggtcccttggcttgctaaatagggatctaaaatagtttgtagtagtttgatttttccatcattgttagtattttttttaatagtatgagtattttttttcattttcataggtttgggttttctttttccttcgtgactatcataaaacatctgttatccaagcaaaattttttgtttcttcgcagagattaccaacaccagttttcttgtttggctaaatctcctttttagtagtaggatgtcaggcgtattttaattaaattctagccatttctttcagtgattgtgaactgtttttaccaccttagtagtaataataccttggatttatggaatacttttctatcagagagttcaaagagctcatatctataatttcttttatcctgttaacatttctatgagggaaggggtacagtttattattatcactatcttacagagggagaagctgaggtgacttgctttaatgccgtagctactgttaactgccaggacttatctgagagactcatacttggatgttctatgaaatggagctgagaatttgagggctactttgtgttttggatatcaacaattacctctttaatttttttttaaatataaaaatactgttaaaacagtgtaactatccaaagtatgtgtgtagtgaactattggatttttgtcctgttctattgctccttcttactccaagtttatgtattgtcttgatattttgtatgtttatataaatgcgtgttttttttaaaacaagtgtaaatgaaatcatacctatacatacatggttttgcaattgtttttttcacctgcaatatagatactttttttttttaagagatagggtctcaccctgtcacccaggttggagtgcagtggcatgtagctcactgtaacctcgaactcctgggttcaagtgatcttcctgcctcagcctcctgagaagctaggactgtaggggtgtgccaccaggcccacctaatttttttttttttttttttaattttgtagaaatgaggtcttgctatgttgcctggactggtcttgaactactggcctcaagtgatcctcccacctcggcctcccagagtgctgggattaccatgcttggcctagacacttttcaaaatgaactcataatcaagggttgacagacttttctggaaagagcaagttattaaattgtttaggctttgagtgcagtcatatgttcttgtcatatgttcttttttttttttaaacaatcttttacaaatgtaaaaatcattcttagctttctagctattaataaatagctgaagtgtggggccatagttkgctgacccttgatagatatctgtgtcatctatttgtaggattagagtttycagtggtgtgtgtatgttcgtatgtyctatttkgccttaatgaacagtgctggaatgaagggggaacacttaaagtatccttatctcttactttctctgatatgtatatttagtccttaaaacagcttaagctttccctctgaaagtaaggttattcctgttgtttcttggkgactgatggcgtttcccatccacagggtcctaacctgattataaaacaaccagatgagttgctggacagcatgtcagattggtgtaaggagcatcacgggaaggtaacattaccaaataacaggattgctgctttggggatcagtagcaagctttttgctcccacacctgaatccgataccattgttggatggtattttaaaaaggcttagagaagattgcatggcaagcctgggaaactgcttgcttgtttacttttcatctttgggacctctcgagatcatcttctcctgaatgtcctcttttttttctctcctacattcagtctgtcgcgaacgcattgtggattgtcaagtattactcaagtcagtcttttggataaggttagacatcaactttcagagaagggggattgctgctytcctgttaatagttgtttcttcccagaggttaatatccttggactttgaacaccgtcttttttgactgtggacatgctattaacagtcaggatcataactaagttggcttggattcttgaagaaaaaaaaatggtgcaaagatggcagttgcaatttgaacttgagctctaaaaatggtctatttgtggttatatttgcccattttaaaagtgaantttcatttctggatgcctttgaaaactgactttacatgtgtttttggtggggggctggggattctctcttgcagtctggccttaccaaggcagtgaaggagagtacaattacattgcagcaggcagagtatgaatttctgtcctttgtacgacagcagactcctccagggctctgtccacttgcaggtaaaatccaatcctgtgtatatcttatagtcttccatatgtagtggttcaagagactgcagttccagaaagactagccgagcccatccatgtcttccacttaaccctgctttgggttacacatcttaacttttctgttcaagtttctctgtgtagtttatagcatgagtattgggaaaatgccctgaaacctgacatgagatctgggaaacacaaacttactcaataagaatttctcccatatttttatgatggaaaaatttcacatgcacagaggagtggatttagtaattgttaaccttgtgtcgtatttgttttacctattttttgttggacattttaaaggaaattgcaggcatcaggacacttcattcctaaatacttcatcaaacatctcctaagataaagacattttcttatgtaatacaatgtcattgcattgaagataattaaacattattcagtatcatatgatatctagtccacattagatgttccccaaaatatttgtttttgaaccaggattcagtcaaggctcgtgcatttcatttagttatatttctttagtctcttaatgtaaaactttccacctattatttttcccctgtgtcattgactttctaaagagaccaggcctgttctaccaggatttttaaaagggtgacattgccagagggaagttaatgtttctctgaaggtatatgtrcgtttgtatatgtaagtcgatgtggtagctaatactgttcttaaacatttataaaaataagttttggcattaagtactagagcatatattgtgtaaatgtttccgccagccaatgtggctgatatctgttttaaaggtctcatttaaaatttagtgtttttagtataagttactttttggggacataaatatgcatatgatttgtttaaaaatttggattgtaaataaaggtttatctacctatgtgattcagttaaatttttagtgttagtggtgtgaattttgtgacactgggagaaagtttgcatatcaggtatgaccttagaaagtaacaaatagatttgtgcattacatcaagcatgtggaatgatagatttgtccttctgttcatgagaggtcatttacaaatttataaggagctaaactgactaagtacttggaaatctgtacttgyaagctaatcacatttacccaaacctgatttagaaatatagaggtgcttttaggaattgtttgaattttaaraaatcatctccatttcaaatacaacttaygaattttgatatcctgttgtataatactagaaatatagagatgcagtatgcttcgtgtctttctaggaaattcagttcatgaagataagaagtttcttgacaaatacatgccccagttcatgaaacatcttcattatagaataattgatgtgagcactgttaaagaactgtgcaggtaagggctatatttaggatcyattaaattacctcatttagcatgttttaattgagaatttgtggaaagtaattggatagagctgtagaactaaggctaccaagtgggttcatatcttcctcatcccattcttgcttgtataggaccttaacttaccctggactggtgagaattgggagmaacaacgtcagacatgttcccagtaaataagccaatgcctggcacaaaataagtgctcaatacattttctggattaactaatattatgtggaagtcttgtgactgggaacatatagatgaaaagctcttaagtactttagaaaatagtggatcgacatatgtgtaaaaaaacgcaccctgaaaatatactctatgatgactcctatagtgaaaatgtgcgtatggactagtgaggtcacaagggaagcagcatctaactgtgctggagcaagaggaatggggagtcagagaaacctttacatagcaaggaaatagctttgaaattgagatgtgaagaagagtggaagtcttgcaggcattttattgaggagagagcattcagagagagcagacagaagtataagaatgtgagggagcaggaagctaaggcaaaatgtgttaaatgaatcccaaagcattcattaatgctggagtgcaaagcatgaggttggagaaggtgggaggtggttctagggcctcaagagcttgcacaccatgccagtgaagttcactatgatcttgcaaggaatggggttcctttgagaaagtgtaggtagaagagtgagtgataacgatcgttctgattcgaaggtggcaagaaaagtggtagaaagatagaaaggaggctttttttttttttttttttttttgagacggagtctcgttctgtcgcccaggcgggagtgctgtggcgcgatctccgctcactgcaagctccgccttccggattcacgccattctcctgcctcagcctcccgagtagctgggactacaggcgcccgccactgcgcccggctaattttttgtatttttagtagagacggggtttcaccgtggtctcgatctcctgacctcgtgatccgcctgcctcggcctcccaaagtgctgggattacaggcgtgagccaccgcgcccggcctgaaaggaggmttttctgccatcttggggagaagaatgaactggagaaagggcagggcatggaaatgaggggcttgtatgataaaaatgtgagagggtcagttgacagacactcagtgttcgaatgaggtggtgtgaaaaggaagaggtataatgttattctgatgtttgtagtttgagcagctttggtggatgatggcagtgttcaaataaaaaggagaagaagaagagtagatatggtggatggggcaggggaggtgttgacaatggtgggtgtgttttgatgtatgttgaattagaagtgtctggtagatttttagatggagatatctagtgggcagttgcatatccatgacagaaactctagggagggctgggctggatttccagatttagcaatcttacacactgatgagcttgctcatagaaaatatatagaagaaagagaggagagggtagaagatagaggccccggcaaagaagcaacttgagaatcatgactcaaatgccattttcartgttaatggattacttgaaggaggtaattgttcagtatatttgagacagcttcctttgagagttccatttctgctgtgtatagacgctggtatccagaagaatatgaatttgcaccaaagaaggctgcttctcataggtaagtttgagttctaccaagcgttttccagtctgacacacacttaactcccaaattmctgactgcttgaaataatgtcccttaactcttttttctcggggaaaagataaagttcaactagcataaacataacattctttyactgttaggaattctggtcaggattccagtgttccattctgagagggttatatagcctttattgctgtttcaaaactcttagatagcttggtttataggaatgatgaaacaatctgtaatctttctagtaatgaaccgtgttaactttcttcccacagaasatatggacttgcagccttttgaaattagaacactttttgtgtgcaattctataatacagttgcctactttgacacttgttatagtttttctgattgtttctcttatgtctgtagccttaggtacaagtagacaaggaatttaaagatcttgtatattcatgtgtcctgtactggttcttttctttttgattttgtagtctttcaggagaaacatgaaacctgatgggaggtttagcagctggcttctragggtagcatttattaaaccatttactgaacccctatgatgtaccttgcacagttataggcaaatagagaaagaccaatccctaaagagtctggcattcttacattattttattgagtgtatgtagactgtagcacaggcatacaggcctagactaccttatctgacacaactggggtatgttttgatttcagaatttttcagattttagaaaggtgttactacatctgtattgtttattatcttgtagcatccctaacaaggtttgagaagcagcccataataaaacacataggtattctgcagtgaaacgtgtatattcacaccaaatggcataagtaatgatgactgtcaatagcctcacattaagattgctcaggttttgctacataataggttctgtaagtactgtgggttttcrggtgtgttttggatttcagttttgtggataagatattgtgtgcctttatttagccagaggctataattttggcagcttcggctctgacatatatccaagtcctggaaagaaagcagatggttgccttagccacacaaataattgtcataaaactcttgcactaaaatttgtgcagggaattctctagargtggcccttggcccatgattcagagtttattgatttacttgcacactgttctaataatcttggttacctgatttctcagaatacaacagatgagaaacaacatattggaagaaaagaaaggctcttagatggaggcaggctgccactgattatagcacaaatcaccatgagagaggaggtagatcctctggtatggttaggtactgtttgataattgatgtttattatgatgactgagtcatgacttatgttcaagtgtgtcagtctgttttgttsagggacatcatcaagtattgggcaatgtttctcaaactgtgttccatgaactgtttataagtattctacaaatgtggtcgattaagttttagaaatactaaaatttattaattttagaaaattaataawtattagaaatataggacagcttccttttgggaattcataatacacattagtatattaaatgctttgcaactttttatttcagtaaaaagtttactctagtttttctaaacttatttgaccgtggaattattttttctccctgtggaacatgtcgccatcttttggaacaatttgggaaactttaatcttctatattttacaaatttttttgtcaaaagtttttaaaaaacaaagcatttaaagaaaattgcttttctgaaatgttctacttttgatgatgctagacagtgacacttacagtaacatccawtgttcttaagtcgttttttaaaagttgtacttttaaaatgattttcatctcytggttttggacagttyattcattgtggtatgtttgcttatagggcacttgatgacattagtgaaagcatcaaagagcttcagttttaccgaaataacatcttcaagaaaaaaatagatgaaaagaagaggaaaattatagaaaatggggaaaatgagaagaccgtgagttgatgccagttatcatgctgccactacatcgttatctggaggcaacttctggtggtttttttttctcacgctgatggcttggcagagcaccttcggttaacttgcatctccagattgattactcaagcagacagcacacgaaatactatttttctcctaatatgctgtttccattatgacacagcagctcctttgtaagtaccaggtcatgtccatcccttggtacatrtatgcatttgcttttaaaccatttyttttgtttaaataaataaataagtaaataaagctagttctattgaaatgcaaacctttttgtaccatctattctttagtagtttaattattgggaaaagatggctttttcttttttaagtgatatggctaatgtttaaactcttgtaatgcaattaggaatcggttaataagttcatgtcaaacaggaagtgaatatgttttgctttagaataaccgcagataagtttaaagaagcagatttgggctcgttgttagagttattgaattaacagcactggactaggctactctgctacattcaggaaattcaattcagacggattctgtaactaaggtttattgcaagtaataattagggcttatttatatgcacagcagtgactgcttggtttacagaatgtaaatagcttgctgccctagttctaatggtcagtaagtagctgagaaaggatttcaattcgaacatactaattcctaagtttacgtattctagaccacagtactaaggtgatttcctagccagagtgtgcaatagaatcatctgtagaacacatctcattgctttgtgcacctcattctgacaaattccccttgaagacaaatcagaattgggaaaggcccacaggttactttcctttccttgagaaccactaggtgagaagacttctgtggtgatgtcaaattacatttcatattacagatatgaacatagtagcgtgatcctgatgtgtgatagttacagatagatcactagctagtagatcagaataaccccataatattttcatttgagtaacattttaacatgtactaagttgtgttacctacactacagctgtatcagtggagagagggattgtagtgtaactttttccaaatgagtgaattaagactgaaattcatgagtctactaagaatgaatttatgaaaacataagtctgctgatctttttgaccacttctttctggaatggcatgggttttagcttatgcaccaacttcagtggcttggaaggcaggattgggtagtacagttgaccgttggacaacacaggtttgaactgcagaggtctacttacatgcagattttcttctgcttctgccactccggggacagcaagaccaacccctcccctttctccttctcagtccactaatgtaaagatcatgaggatgaaaacctttatgatgatccacttccacttaatgaacagtaaatttattttctctcccttaagattttcttaactttcttttctgagagcttactttattgtaagaatataacatatatattgttcctgatgtttgtataaaaaatatattatctcttacatataacatacaaaatctatgttaattgackttatattatcagtaaggcttctggtcagtagtaggctattagtagttaagttttgcgggagtcaaaaattatatacagatttttggttgcacaagggtttggcacccctaacccccgtgttgttcaaggttcaactgtagttaagaacagggctcttgaatcaaactcttaattcaagttcaggcccctgacatactgagtgactttggcaagttgcttttctaagtctcagtttccatatctgtaaaatgaggttaataacgttacttaatgaattgttagaattaatttaaatgctattcatacagttctgagctcagcacagtgagcatcgtgtaatgatagctaatgaatattgataataaagggtactatgattagttatgaggctggaggcattatcttaaatcagcgttcacttaatgcctatgactgcctacattgtgctgaggactgtagtaaacttcactaatagtgtgaccttgacttggtttagtgtttccaactaaatttggcaaaagggtctttgcccttacttggctttcaggaatgttaaattctaatgtgatgatagataagaaaacactgggcttaagaagggttcgtaggaaccagatactgctattaatgaatgcctcaaggtttcttccacacaactggctggtttattcacctgtttaactgttcaagccagtttaaaaatttttaactcctggtgttactgctttaatgctgtcttctgtatcttaattgtgtagctaattctattgtcctttagtggagcttgtgttgaattttaataaaataactggtagcctgtgagttaagcaaaaccagtctagtgcaggtatatatgaagacatgctggttcagtgattagttcattatttttaagtatttttaagttaaatttaaatttgtagtgctggtatttaggatttcacaggggattcctgaagctatgaagtaatttctgtgaaatgaactgcagtgcaaattggtttaaatagaactacagcttgaaaaatgatcagtatatttgcttagtagagcttgccattctggtgctcttggggggcctctcatttgctggttcgttcggtgcagtaattgtcctgcaagctatgttcttaggatcgtccaggtgtatttccccctattaaactcaaggtgaatgaatcagtacagatgcattttgacttacagtggggttacatcccaacaaacccattgtaagttgaaactattaagtaaaaaatgcatttaataaatttagcctaccaaacatgttagcctagcctaccttaaatgtgctcagatcacttacattagcctatagttgggcaaagtcatcttaacagaaagcctattttataataaagtgttgaatataccatgtaacttaatactgtagagaaggtgaaaagcagaacggttgtatgggtagtcgaagtacgattgaaatagtatgagcagactctagcgctctcgccaagacactgaacagcagtgctgctgcctcctgcacccagagtgtttgctattacctgacctagaacatctggagcccatagatcctaaagagcagctttttgaggaatgcagggctgtcgtggatacttaacttccctggttccagagagattttgtggatctgrggacagactccagtaactacctacctattagagtcatgcaatggaacaacttcrtccaagctcttggaaagacaaagacaactttgtacaatgccctgttgaaacactcaagtgagaagaaaggaagcttctcacgctagaagaaatcctattctaccagcctgatatattgtgcctccaagaggtagaacagtattttgaaaccttccarccactcctcaggaggctgggctatcaaggcacattttttttcccccaagccctggtcatcttgtctaggtatagaatacaacagtggaccagacagctgtgcttaatttttcctccaaaaccaaatcaggctagtgaacagtgccaatattaggctgatggccatgacattgaaaactaatcaggtggccattgcacagttcctagagtgcaaggagtcagaccaacagttctgcatcggtgtcacccatgtaaaagcacgcactggctgggcgtgattttgatcagctcaaggctgtgaccttcttcagaacctgcaaaatgtcactcaagggccaagattccccttgttgtttgaggggacttcaatgcagaaccaacacaagaggcctagaaacactttgcttcctccagcctcaacctgaacagtgcctacaatcccctgagtgctggtgggcagtcagaacccccatatactaccaggaagatctggaccccaggggagggcaggcacaccctctggtattctaagcatgctctaaatgtaaggtcagctcttgatctgctcaccaaagaacagattggatccaactggctaccatctttcagaccactggtatctggtgtgtgacttcagctttaatgaggaatctgatggacttacataaacacttgtttttgtctttttaatcacaagagtcttaaccagggatgtttcaggaaactgaaataggataagaagttgcctaacgaaggatagaaacatgggaagtttttgtcatttcattttttatatttctagcatgcccttgggaaaggatcccattagtttacaaatctatagcaaaaaggtttttgcttttgcactccagttctggcgtgtattgttttattttccttagcattacattttgattgtttaagggcattaaattggcttgttttagctgggcacagtggctcatgcctgtaattccagcactgtgagaggctgaggcgggaggactgcttgaggccaggagttttagaccaacctgggccacatagcaagagcttgtctctatttcttaaatacataaataattaagaaaaaatggctaattttgaaggtttttcagtttgaggatgctataaaaactcagaattgcttgaatcctccataattaatcagtatataggagcagtttctctagacagcatgtcaaggtatttgtgagttaaagaaatgtcaacaaggctaggcgtggtggctcacgcctgtaatctcagcactttgggaggccaagacaggaggatcacgaggtcaagagattgagaccatcctggccaacacggtgaaaccccgtctgtactaaaaatacaaaaaattagctggacgtggtggtgcaggcctgtagtcccagctactcgggagactgaggcaggagaatcacttgaacctgggaggtggaggttgcagtgggccaagatggagccactgcactccagcctggtgacagagcaagactccatctcaaaaaaaaaaaaaaaaaaaaaaaagtcaacaacatacgcatggagatatttttttaaaaaattcacataaaattaagtaacaaattatagcattgtgaacattttagaaccatgcaagacacaaattatggagaaagtagtttacggtaattttcttaaagctttaaaatattttcatttgggctttaataaaatgtgtacaaaagaactatttagcctggagggggttttgtttgttatgtaggtgtaagtaagtatcaggtctccttcatacattataaataatctttgctgtgcctccatgttccccattattgtatttctggaagagattccaattagttttcaattatttaaatgctagtagtatctaagctttttaactggaataatattggtatacacttgaggtcactcagcgtcatcattattggaatgtgcttctcacaataggttatttacgagctgaatgtggtagtggctaagaaagtcagtaggactacttttcagtgatgggaaactttctggaaagcctgttaatggactgtcattgacatttcctaagatagcgagatactgtggttcaaaacatctacaaaagagaatgtaaaaattagaaaggtaacgtcgaattctctcccattggtaataaaagtagtaaagataacagttgaagcctctttcaaacaaaattacctgttggtattaaattgataaatattttaacccatgagtcataaatacttaaaattaataaatggtcttttaaagctaaaaaaaaaaaaaaaaacagaaaagttgtaagtcaaactgtttgtaagttggggaccatatatcctttcctgatagtctcaagtcagtgttctttgagtgctcttagccatggtactgagtatgtgggcaagaaagatctccattttttagcagtttagccataggagaggagaatgaatcctgagacacctgtgttttctcatttacaaaacaatatatctctgttaagaaaccagcttacaaatttagagggaaattgatagtttgctttgcgtgaagtgctgttcttgtatgtgtatgccttgaagaacaaataatagtcgtaatgttcaagtgcagttttgtcatattgattgctttgtggtagtgcatcaatgtcccaggttcactcaaacgctgtaacattttgaaaaattaataagtagcagggacaatggaaaattggttgttgcaaggataagccttatgtagcagattgatgagggcaaaaactgttatgtttcatatctgcttatgaggacaaaggctgtt

SEQ ID NO: 95727 - DNA, 20100 bp, Homo sapiens
  misc_feature (1)...(20100): n = A,T,C or G
ggatgacaagccagtagtgcttcatttaattggacagcaggtggcactagagaccatataatcttcacatttctaaaccctgcctgatcttaccaacagccgtaggcaggcaaggtctgtcacttaaacgacactcttgccaacacccccaaaatcccttgttcccttttccttcagttacactcccttccctctgctgaacaccattccaggaccagttaaactgtttatgctccttccacatggtgaatgctctggagaagacccccagacatacaatatgtggcacctgtgaactcatggttaggctctctgcaccgtcctggactaacatagtttcctgtctaattttccttaagagtcacttcaaacttcacagaccccatcttctttagtgatgtgttccatacatgcaaatgccatgcgtggagctttgcactgtggcaataaagtaaaagggctgagttccatgtctgggtttgtgagatgcagaacacagcagcaggtttagaatggcaagaagatgcctaaacagaactaatgcagcagatgcaggagcaaagagcctcaggtaaccatgagagtgtaagtcccccagtgtttcctttcacagaagtccctgaaaaggcattcattgtacttcctcagacaaaacatggagatttgattgatcttcctagatctgaagggtgaaggatactctggatgacctctggcaagtccatagatctgtcacatctttcctctgtttataaatctctatcttaatacacagggaatgaagttcagacacatgaaggatagcagtataatcataagattttgacctaaggatacctgaattctgccttggctctgctctgctctctgtttcttgaaggagaacacaaaaaaggatcagtggcatgtcataatctaggcatatatgcctggtaatccaagggagaaagttctggtaaaattgagtgagcatatgaccaaggcccaaagcataggctgggcctcttcctctgcctaagcccaactcttaccactagccagtgtctgaggattcaaggaaagggagtaagtggtgcacaattgaggggaaaaggaagaggcaaatgggcaggttgggtcctccacaggaggcaagcagtaggaaaacgtatgaaccagccagctaggcctccttggggcagggtgggagtaggggagagctttggcttgatttttttttttttcctctgagcatagctctggagagtaagcaacaccatgtgtggtacttctaacacattgtaggcctgcctgtgagtcaacaaggcccaaccagtgcctggaaatgtgatttaagcagatgaaaattccctttttgtggggagctacaagggagataagggggtgaaacctcctttcgtttatacttaaatgacattcaaggcctttcaataatttggtccccaatcaatgtttccagtcttacctctcacctatctccccattgtagccaagaactcttcaatatgcagtaaacaagctgtacttttccacatttcctttgcttacattctcttcctggaattcccttatctacctggtgaatcttaaaatccagctcaaaagtcatctcttctttgaagccttcttttacttcctgagggagaattagtgttttttttcttttttagtttgtcatgatttatttctgtgtttagctccctcactagcttgaactgtatgaggacaggaaacgtgtttattattcatactgcgcccctggcacttagcagtgcacttggcattcattagatgttaaataaacactttttttttaacttaataagtgaatgaggaccagaaggtgatagatatggggcctaccttgccaatatatgtccattggagtaccttatgggatcttttttttggtgggggggcttgggggtatttattaagtgatgctttagtctcagtctctgccagcaactggggtgtgggttgactccactcgccccaggatttcccagacttgctgttttagtggagagaggcaggaagccaactatcctctaagccccagcttgggaagctaggctagtactggggtgggggcagcagagctgagaccctccacccccacccccagcccccagcctcccagcctgagggggaggagctgaggcaattttggccgcagcctcccacacacagccctgcccttggtgcgccattcactgccctgagttattcatgatctctgctcccacatattcaccttgacactccaaaagccagccccacacccagccccttcaggtctttagtcctggggagagcaaaaggagggacaggggccctttgactgagcagcttcaaggggcctctcctttctgttacccactgaatgccagccccttgtcttcagccctcccttagataggaaggagggtggtggcctcagactgcaccccctttcttcttcttctcttcctggcatcccattctgtcccagcacagcagccaagagcacaaagcacagcacctgtgaggctggtgggcacaggagcccgtgctggcacaggccaaactgcctgcagccctaggtggggcctgctcctgccctagaagctagacagagggagacagaaagcagaagtggggcaatgggatgtgcggcccctgtggcaggaggaggagcacacgaaccctgaccctgcttcttggtgcaggccactccaggccttgcttctgtaagagactctgtggctggctccagagctgcccrgcccccataaagggggctgaaaggaggatgggtggtccttgaggaggggaagggtctgcagagaatcgctcagacaccaggtattacccagctattcccccaagacctggagggtccaaactcctggccccaaccacctgcatcttgggtgaggaagaagggcctcttctgctgttccttcccctcagagatccaagaacccactccagtgaaatgcaggtacccatgcctgccacctgcccctggagacagcaggggagttgaggcaggaaggctggccaggggcccttatgggatcttttagtagaagctagccttctgagacaacgcagccaagcacaagccagtaaatgttgcaagagtgaagggagaactatacctaaatggctgttgatctcaaggcactgaaagctaagttaagaggaatgttatttgcttattggttagtgtgttagtctgctagggctgccataacaaagtaccacagaggtcttaacagaaatgaattgtctcacaattctggaagctagaagtctgaaatcaaagttggttttttccttctgagggctttgaagaaagatctgttccagttctctctcctgggcttggagatggtgttgtctgtgtcttcacatgatcttccctctgtatgtgtcagtttttgagtccaagtttcccctttctacaagaacattagtcatgttggattaggtcccatcctaaacacctcatctcaatacgtgtgcaacaatcctatttccaaacaggttaaacttcaactctgcaaatgcagtgaaatattttactaaaacaaacaagtattattaataaaaataattttgcagaaatttctcttactctttcactttattttgattctttaagctggttttggaatgagcaactatttgtgtaaccactgactgttagagagtatttatcactgaggcagtccatacctgggaaataatgtttctgttctgagtgatctcgcaatagtaattcacttatctgtggctgtattttcttatctgtaaagtgaaagtattgaactaaacagtctctatctcgaaaatctctaaatgttatttgaagttttttctttacagtacaatgggrtagatgagacaaacatctgaaaatgtatggagagtgtttgctaaataacctgttagtagtttaatgcagaacaaacagaatatatagctgtaaataggagatatttgagggaaatcaccatttgagcttatttctatcgcccccatgattttatctttctttttacaggaaacttttccaagcctgttattaatcagtgacttgtcctgcttttcatcatatacagtgatgatttttctcatatagagtggagctgtcctctccagtacctggaacaatgccagccacatagtagatgcccaataaatatttagtgaaagagtgaatggaagcaagaggtgacatgattctgggaactgtgtgtagtttggttactcttgtgagtagatgtgaggaaacaagatcctttcactctcaatgtgtctacactggcagaagaattgctaatatgtgtttaggggtgtctgtattcacactatgccaacccagagtaataaatgggtccatacatgcttgtggataagaatggctttagaatttcccttagtaagaatcattacacaacagtccaaaggactgttgtcacgtggtcctatttgtgctctcaaattcttgctctttaaaaattttgttttaaagaaacggtattaatcctaagcaaaaagaacaaagctggaggcatcacgctacctgacttcgaactatactacaagcctacagtaacaaaaacagcatggtatgggtaccaaaacagatatatacaccaatggaacacaacagaggcctcagaaataacaccacacatctacaaccatctgatcttagacaaacctgataaaaacaagaaatggggaaaggattccctattaaataaatggtgctgggaaaactggctagccatatgtagaaagctgaaactggatcccttccttacaccttacacaaaaattaactcaagatggattaaagacttaaatatcagaccgaaaaccataaaaaccctagaagaaagcctaggcaatgccattcaggacataggcatgggcaaggacttcatgactacaacaccaaaagcaatggcaacaaaagccaaaatagacaaaagggatctaattaaactaaagagcttctgtacggcaaaagaatctaccatcagagtgaacaggcaacctacagaatgggagaaaatttttgcaatctacccatctgacgaagggctaatatccagaatctacaaagaacttaaacaaatttataagaaaaaaaatcaaacaaccccatcaaaaagtgggcaaagcatatgaacagacacttctcaaaagaagacatttctgcagccaacagacacatgaaaaaatgctcatcatcactggccatcagagaaatgccaatcaaaaccacaatgagataccatttcacaccagttagaatggcgatcattaaaaagttgggaaacaacagatgttggagaggatgtggagaaataggaatgcttttacactgttggtgggagtgtaaatgagttcaaccattgtggaagacagtgtgaygattcctcaaggatctagaactagaaatatcatttgacccagccatcccattactgggtatatacccaaaggattataaatcatgctactttaaagacacatgcacctgtatgtttattgtggcactattcacaattgcaaagacttggaaccaacccaaatgtccattaatgatagactggattaagaaaatgtggcacatgtacaccatggaatattatgcagccataaaaacgatgaattcatgtcctttgcagggacatggatgaagctggaaaccatcattctcagcaaactatcacaaggacagaaaaccaaacactgcatgttctcacccataggtgggaatcaaacaatgagaacacatggacacagggtggggaacatcacacaccggtgcctgtcagggagtagggggctgggggagggatagcattaggagaaatacctaatgtaaatgacgagttgatgggtgcagcaaaccaacataacacatgtatacctatgtaacaaacctgcacgttgtgcacatgtaccctagaacttaaagtataataataattaaaaaaaaaaaagaaaaaagaaaaagagaaacgagggtcttgcyctattgccsaggttggactcctgggctgaagtgatccctctccttctcaatagctggggctacaggagtgcgtcaccacgcccgcctggctcaattcctgctccttttggtctataaagcggactgtggccctggggttcatccgattgagtcaccagtcactggagctttacaggagagagtgggagaggaggctcagagaggtcactcaggacccaaagtgtgcccagacgggccctaactacgtggcgtgacctcaggcggggcaaacagatcaaggacacagggtccccacccaccctgaccactccagggtatgcttaggtatcccaaatcttgctctccgaagagattcagatagcgagagacacccttaactgtctcccgaggccgggattggccagagcggaagcggagacgcacttcctaggggcgcgtctggcacgcactgcgcagccgcggtgggaggaggcaccggccgcgcggcgggaggaggtgccggccgagcaccgcagacagcgccgggaagatgagcacggaaggtggtggccgtcgctgccaggcacaagtgtcccgccgcatctccttcagcgcgagccacsrattktacaggtagggtgtgcacacaggtacagcggcgggcggtgggcgccgggccccggaacgtcaccggggcggggccggcgggcgtgctgacgtcgggcccgggaggggcgcgggggctgctggggcgacgcgcgctggtcggcttcgtggggcttcggacggcctccagcatcctgatgggggctggagtgtccccagccctggaggggtgggggagcttgatggttaacggagccgactgcggagggcgatggcccacgtctgggtgcggggcccacacccggttctgcgactcgaagaaacgtctctgcccctaggagtcccttggtgtagaccacagggttgctgtgaaactcagcagtgttaaactcgcctatgttacacagtacctggcgcggcgtagacactcagtaaatgttagctaatcttgtatgccaggagcattggccaccatatytaatgtaattacaaggcaaattttagccccttttttaccaaagactggatgaacccagtccctggtggtctagtggctaggagaaaaaaaaaaaaaaatgagcccagacgttcagtttccgaagcagcatagttgggatttgaatcccgatcatacatactgcttgcatgcactgacgagttgattttgaggaattttaccacgcactaaccagctccaccctctggccctccgtatcgtcgtctgtgaaatgaggatgaccatcgctatctaacaggattcatccctccattcgctaaaccaggttttgtttcgtgcttgtcagggcttgtgctaggtaacggatgcatcagggatcttgtatggggtttccaatctggcctattttgtggagggtacactgagaaaattttgtgcaaaagactttagcactctaaatacaagaagtggctgagcaggagaaagtgggggtgtgttattccattttgcattgccacaaaggaatactgagactggtattttataaagaaaagaggtttatttggttctgcaggctgtacaagaagcatggcaccagcatctgcttctgttgaggcctcagggaccttccactcatggtggaaggygaagggcgagcaagcaggcaactcacagggcaagtgagggagcaagasagaggagaggaggtgccaggctttttttaacaaccagctcgcccattgactaatagagcgagaactcactcattgcttcagggagggcaccaagccattcataagggatccacttccatgagccaaacatctcccactaggccccatctccaacactggggatcacatttcaacatgacaattggaggggacaaacatccaaactacattggggggaataataaagaggatctcaaaaaaaaggggttgtataataagcttaaacacctgagggtggtaaggtctcatagacgatgcgaaattgaatggatgggtataagtataaacattaagcaatttgttttctgtctgagacgacagccaaagattgtaattttaaaaattcacctgcttggaatattcctcaacagattggtaaagttctcatgaggcagtagttgagacatagtataaagcaagattgctaaataggagacttaccaggtcatgtaatttttttaaattattttttctggatgagtagtttagcttctgagagaaatgagatagtaagccactttgcggatcaccatctatgtttatcattatatgctgttatttcattcagcacttgcctgttacattgtaggcactcagtaatgttgaattgaaaagtggaaggcccatgagcagatcagttgctgtggaacaagggggttgaagttaaggtttgtttgtgctaatttgtatggtacaatcttctaattagggaatatgccatggtttgtgacgtatacgtaagtaataaaatcaacatgatttctgactctccctttggtgagctaaagtaataaattgggaaacttttcaaagatcaktacaaataataaatataaggaacagagaagggggtttgaatgtgatacttgtgtcatgctgacttttttttttttttttggtcagtaaatttctaagtgatgaagraaacttgaaactgtttgggaaatgcaacaatccaaatggccatgggcacaattataaaggtgagagaaaaacygatgacatttcagcccttcaataaggatgaaagagtattcagcaaatgtagacataaagaatgggaaaacttacggacacagtgtgaatgctttgagccttgaatgagaaattaaatgggagttcagaatgaaaggatctgttgtcttggttgggtgtgtgttaagttttaccttgcaatgtcaactcttacaaacagtccaaaacaatgaatggtttaaagcatttttctttgtcctagagtacacaacaagtttctttctgattaggtatggccaaggctaatgttaaaattagattttattctttgagtaaataatgactgacaaaaggggaatgttgcctaggaatgtaatgtatggcagaaaaataggtttggtctaaagctttgccagcagtgttcgaagaaagtaggtaatttgttcaaggataagagacttgattctttgaggtacagcctgccttaaaaaacaggtacataagtcgtagagtataaaacagtatgtggtgtggtggcataaaaaaaaacagacaaggtgtcaggagattaggattactggtttagctacagcctcttccttaatctatggtatctcagtctcagtgtactcacttacatgtaatatctaatggtatttgtacagaactaaaatacataaattcataaaagttattaatgtgtaaagcactgataaagtttttttttgttgttgttgtttttttttttgagatggagttccactctttttgcccaggctggaatggtgtgatctcccgtcactacaacctccacctcccaggttcgagcgattctccagcctcagcctcccgagtagctgagattacaggcgcccgccactatgcctggctaatttttgtatttttagtagagatggggtttcaccatgttggccaggctgctctcaaactccagacctcaggtgatctgcccgcctcggcctcccgaagtgctgggattacaggcttgagccaccacgcctggccaagatttttcaaatgcttctcacaagcactttttaatttacaaagcattactttagactttgtatacattcatgtgagtaaggggacaagaatttaaggcccagtagtattgcttgttcagaaaggtactgctcagtattggaccagcttgctgtgtagctggacacctgmaagacattttctacttctacaggcagagaytgagcagcatcttgatgctccctagtgcrttaacataagcagaatttacacccttttmagccttggcngagtgcctctgcttagccaacattcctactaagctcctttgtctcgattgtgtcttgctttggttgctaaaaaaaaaatcttaactaaaataacagatgttttggggtaaatatttaagtatagcttttggggacagatctaataatttaygttgccaacttgtgcttgtatgttgctaacttgtgcttggatgttgatctgttgaaagtcatgctgttttttttgtattttgttttctttccatagttrtggtgacagtacatggagaggtatgtgcaraaaatatttgtgtggtttttgcagattgctgggctctctttcagccagtgtggtggattctgtgttgaaaactgttccagtcagtattgcttcattgttggcccttgtatatgtgtgtgtggtgagctgccgccattccaggcctctcctctaccaaagtgttgtctttaatatgctgtatgtggacaggtagaagggctatacaatgaaaaggatgcttgaagtacatggtgcttccatgctgaggtcaatgattatctctgggatgaaggcaaatgtgcaaatgtgggcacagtctctgcacattgtactgcctttaataatttgccagccrtttaatatggagagcctatcacagtaatattcacctttgtttattctttagattgaccctgctacgggaatggttatgaatctggctgatctcaaaaaatatatggaggtaatggcatgttgggtgcttattatgtgctattccctaactgtaatatttggtggccccctatctacctccccaaccagttatctcctaaggttccatgactttgtgaatagaactggatgtgggtgttggggaatagttggaagaactgctcgcatggcctctaaaggtgttttggtgacttaacggaaattagtcacagttgtgttacagcgatgggaggaaatataacatgctcaccttgtattccttgttggaatatcctgatttccttcagttaacaaattctccatttcttttaagacatagctttctccttgagacttactgtctttctttttttttttttttttwaataggcacagaaccaatgcaaacttttctttttggtagaggtaggggtctcactatgttgttcaggctggtctcagacacctcctgccttgacctcccaaagtgctggaattacaggcatgagctactgctcctggccttctccttggagctttctcttccctctctgaatattccttgtacctttgatcatagatttagacaccacactgtgttgttcattctagctttattataaactcaccagagcagtacctcatagagataacacacaaggtgttcaatgaagaacttaactgattgtgtcattatagaattcttgcactgtaagagactttggagattattcagaccaacttcttcaacccatagattaagattgagagatgctgaacagttaactgacttgccccaggtcatatggctagtcatttgcaaagctgggagtagatttctttccttccagctgttttattatgctgtcatttcacttgcagcttaggtttgttctgagatttgacatttgcttgattaaaatgatgttattagtaatgattacttctttcacattacttattcatatattcaacaaatttctctacttcgcatcagtttttgagctaagtgtacaaagatgaatgagatgtagcccacagagtgtatacattactttttctaggaggtgaagaatattattaaataactgttgatttaataaatgagtagaagaatgagtgaatgaagaaacagcactatgctcaaaatactttaggaaagttatacagatagggccagcatgcatttatggggcaggggttggggggcaggcggrgagagagagagagggagacagagacaggagaagaggagggggaggggaggacaggggaggagaggggaggggaaagaaagaaaaagaaaaagagaaaagaaaagaaaagaaagaaaagagacaagacagcaacataaaaggcctcaacatatgactaaatactggaggagggcttctctatgctgttttctgcttttgtatgcctgaaggacaccacacactttcatcagtaaaagtggcttatcatggcatgtagagtaaagttagagctctaccgtggggggaggattgcttgagtccaggagttcaaggctgcagtgagctatgattatgccacttgcactccagcctggatgacagagaccctgtctctaaaaacaaaacaaaagaaaacaaaaagccctgcataagaggctttaatggagaaattgggactggaactgggattgaagatgaagcaaggatgcccgttttcttgttattcatgtggaacatcccttcattggatatatttcaataactgtttgatctaggacttactctttttgtatgattctagtttttctcaagaaatgattgctgttactgttattaatgtacccttcttcaaactacgtcctatggaaaattacatttttttttcacagatgcttagattttttgcaatagctaaaagcaaaaacctagaaagaatgaggcaatttaatccttgctgatgatgaggaaaaacattatgttaatatacacgagcattagggagtaatagtctttayatatatatatttttccttctatgagcccaagatcattcttaaattattcctcatagcaaaaatttagaactacttacataatttcagtctaggtctgctttataaaatgtagtagtcactggatctttgtccttatgatattgtggcattgttccgtaggtgtgacagtgttatggaaaaatatttgtgctaactgtttggacaggattcacaaagtgttaaactgaattctgaattacaatggcttgtgttgcgagaaagctccaggaattctctgctttttggtttctcacctctttttattcagtaacaaggattcctaatcattaccgacagctgggcctgactttattttacaacttgaaattttgtaaagttgccttgtaagactcaaatctagtacttacaaatatttagttagtggctaagtgataaggtgaggtttagaggcataagtggaacaatttggaatttgagtcgtaaatggagtcaatgatattttcccttggttttgtctctaggaggcgattatgcagyyccttgatcataagaatctggatatggatgtgccatrckttgcagatgtggtgaggtgggtggcactgtatcttgccttatgtggattgtaaaacaagaattgatttgaatactttgattgttgtgtgatttctgaagttttaatttaatgaaatctttcgaaactagaatttctattttctgtaaatattaaacatgaaattttattgtttgcattttgaattttttttgtttttgtttttttttcttatagcaygactgaaaatgtagctgtttatatctgggacaacctccagaaagttcttcctktaggagttctttatraagtaaaagtatacgaaacygdcaataatattgtggtttataaasgagaatagctattggggttagcattgcacaaagcccagtttctttctgtgtttgaaaaagattttgatccccttggaatattaagaggtcaacacgtgattgttgtacgtacacattgtgctctggagtgcctatttattgaaatcattgtaagacctgttataaatttaagtctatttaaaactaaacttgtaatatacatcctgaaaatcatttagagagtcttttatttataaattaaaaatcacttcattttcamaaaatgttttggtgtgggattatttgaaagcaaaagaaatctaattttgttttctccattacctcattttagtattaatttttacttggtataatatacatggttaaaatgcttatgtgacttcgagtaggtgaatcttaaagaaataaaattcaagtgaccacaaagtctggagacaatatatatatgtatatttaatagattgaactctcttgattactacttgttgggtgtgctgaaggcataagtggattcagtgaaaattagacacacaaatcatgtgaggcatctgttgtggatacacgtacaaatattgatggaaatgctgctttagagcacatcattcattacaattttgcacagcgtattgaactatgaattgctagtgaggaacaacacattaaacatatcatggaatatcagtaaattattcagtatactcctctgaatttctgaacctgatgggcacttgaataatttcaactcagaagactgcagaataatcatattttaaactctaaaaaatagtcagcataaaaaggatcaactaccatataaaatatttcctgtatatagtttttcctaattgatcccattttgttctgattattaaacttactatatgcttggcattcttctctgggatcttttcctcgtgactaaatccacaagaaagtatttgcttactttgcacggaagactgttctgtgttcttgtttgttttctaaatgtcttaaacgcagggttctgattttctctccacatagcaactagtatacaatgaattcccagaatgttgttgcctgaaaatagtaaaaggacttttgcagtgattactattctagaaaaacttgcaaagaatagtcttttctagtgattgcagaaatataaagtttgacagtaatgcaaatggccactgaattatatttgaatgtattttagttatcaaacaatttgttctctatgtagaatgttttgtattgattacttgaaaggcagatagctgttatttattaagacactttatgttttaattcacacaaataccctgcaaggtaggtattctcattctttaggtaagataattaaagttgagagagtttaaactatttgctttagatcattcagcaaataaattgcaaactggatgtttaacattcagggtctttctgactccaaaacacagactctgaaaagggacaatttgaatatttccagattttttgagagtctgatcttacttatttgttattcaatttaatttttttttttttttttgagaccgagtcttgctctgtcaccaggctggagtgcagtggcacgatctcggctcactgcaacctccgcctcccaggttcaagcaattcccctgcctcagcctcctgagtagctgaggcaacaggcatgcgccaccatgcccggctgattttttgtattatagtagagatggggtttcactatgttggccaggatggtctcgatctcctgacctcgtgatccacctggctcggcctcccaaagtgctgggattacaggtgtgagccactgtgcccggccaaaaatcttatttttgactggattcagactgagaagtagaggcttgcagtgaggacggtctgtgtctcttggcaactgttcctggtgcttttctttagcctccttcattctcttggccaaaagtttagcatattctggagcctcttccttatttttcttaatatactgtttcttcagagtaatatgctggcatttgtgctgcaggacacgtggaggaacaagatgctgaatcttgggtgctttggtcctaggtttcttaccttctttgtttaagtgcttgcttacgacatagtggcagacatcatcttcttgagagagattgaaaagtttgctcattcttctagatcttggaccccaggagatgagacaccataggatcagctcaggaatatccttctctccttttttaacaataaccaatttgagaacactcagattggcattcacaatgcacgcctgaacagattattgttttctttctccagttctccctggtctataacaggaatgccccttacccagcagcaggcagatatggccatgggtcaagacatcctgcttcatgaggaaaccttgttcccaccactgattcagactgcgtaacccttccagtgtttacccagagcatcagcagcaacttctgtggccatacacttctcataaacagcaaggtttgctttttatcttgaaattttacccattcagtattcgttccctcttttctcctgagttccaaaccacctttctccctaccccatcactgaagcatcttgaagcagccgatcgtctctgaggtgccatgaaaaagaggcctgacttctgctttcatttttcatttctattttcatttatttattttttgagacagcgtctcactctgttgcccaggctagagtgcagtggtgcaatttcacctgactgcaacctctgcttcctggattcaagtgattctcgtgcctcagcctcctgagtagctgggactagaggagcacgccaccacccctggctaatttttgtattttttggtagagacgggatttcaccatgttggccaggctggtcttgaactcctgacctcaagtgatccacctacctcggcctcccaaagtgctgggattacaggcgtgagccactgtgccctgccacattttttttaatgcagaattttgcagatctgataccatattagaaaacatttttcagagtaacattaacactccaggtacttgttcatgagttgcttcaagagaacttttgttcctgtatgccaaatgagtaaatattcttaatgtagggaaggaaaaaaatcattatggggtgatgaggtttggaaaagcttagtggaggaatggtactttcagtgatggggtagggagagtggtggtttggaacttaggaggaaagagggaatgaatactgaatgggtagaatttcattagcacagttactggggtgggaatatacaaaatatatttaggttatagtgaatatattgatcttagtagagtggtagtgaggtgtgagagtgtaatgagaaatgaacttggaaatacaggttggggacagcctggagggccttgaatgtcaatcattctttatcttttgaggaatagcaagctatttgttttttaaagaagataaccaggtggacaaaggaaagtgaggaagctatttgcaaagctgttgcaggaatctagacgtgaagtgatgggtgcctggaccatgggggtggcagtggaaatagatggaagaaggagaatcgagctaattgtgcagtgcccattgtggtgtcaggcattttgctaaatacttcttatatgacctcatttcatccccataaccaccctgctgggtaaatgtattagttatctactgctgcataacaaattactcccaaacatagtggcttaaaacagcacacatttattatctcagttctgtgcaccagaaggccacctctggctcagagtcactcataagactgcagtcacctcagggcttgaccaggaaggattcgcctcccagctcattcccatacttggtggttggactgaggcctcagttcctccctctgtttcttgctgtgtaggcctcttcacagagcatctcccaacatgacggcctgcttcagcagagtgagcaggtaagagggcaagggagagtgccaccaagatcgaaggcacagtcatttgtaagtgaaacactttttctgtattttgctccttcgaagcaagtcactccatccagtccatactcacggagaggggattatacatatattgctgatgtgcacattttgatgtggagatatcaggtgataagactggagaggtaggcaaggagtgtatataatgccctttttgatgccagggaagtaaagcacatttcatttcacaggagtgaaatatcagagcagcagctgttgtttacagtgggaattgtggagtttgtgggtggtagaggaatatataaatcttggaaacacaactcttgaaattaaaaccaattctaaggtgagaagttaaaaaatatcaccatatctctgtgaacataatgaccagagccgaacgatcatttgtattacctcaattgaggtaggaactaccagcgagttataaaaatagccagggtgctttgatcaattgcgtacacgtggccactaatacattagacctatgataaaagatctgtttggctttttaaactccaaacttttaaattccctctggaattgaaactatcttaaagatgggaagcagattgtgctcattttgcttttgttatgtctgggatatttctaatctcccttgcacgtataaaaatcattgttagtttcacacaatttaactttatagcaaggttctgctgcaagacacttctggaaagtgtcccagataaacaccattaaaatctccacatagctgcatagagaactgctgtcgccacaaaagtaagggaaggtggttcttgcactggagggttttcaaagcagcatttccgctttcaagtagctcatcagttggtttgttctcttcaaaaatggactcacccatttccaccagtgttctgcaaccattgagacagaaaaatttatatatatatatatatattacatatattttgagacggagttttgctcttgtcatgcaggctggagtgcagtggcgtgatcttggctcactgcaacctccgcttcccgggttcaagcgaagattctcctgcctcagtctcccgagtagctgggattacaggcgcccgccaccacacccagctaacttttgcatttttagtagagatggggtttcaccatgttggccaggctggtcttgaactcctgacctcaggtgatccacccgcctcggcctcccgaagtgctgggattacaggcatgagccactgtgcccggccaagaattaataattttaaaaaagaaatagaacagtgttcttcctacccacctttctttgtagttcttggctaaagaagcacctcccaggcttgtaagccttgtattcttgaagaagcccagcaggacgcagtggctcatgcctgtaaccctgtatatttgggaggcctaggtgggtggatcacttgagcccaggagtttgagaccagcctgggcaacatggcaaaaccccgtctctatgaaaaacaaaaacaaaaaccccaaaattagccaggcatggtggcatgcatctgtagttccagctattcaggaggctgaggtgggggtattgattgagcctgggagatcaaggctgcagtgagccataattgttccactgcactccatccggggcaacagggcaagactctgtctcaaaaaaaaaaaaaaaaaaaaaaggccaagaaacaagtactgagtacttaagcccatatttgcccttatcaagccagtttattattcagtgaaaattctcaagttagtatgataataatctgaaccaagttttcaaacccttttcacttttcacaagtatcttcatagatgcaagcactgtggctacaaacaacatgaagaaataaagggattagtgtgtcttttacctattgaaaattttacttgaccacagatagagccactgatgggcgtcctgtgggcacctcaaacttaacatttccaaacatgaatttctgatttctccttcaaaacctgtccgtctgccagtcttccttaataatgccacaaccatccattcttttttttgaagacagattctcactctgttgcccagactggagtgcagtggcgtgatcttggcgcactgaagcctctgcctcccgggttcaagtgattctcatgcctcagcctcctgagtagctgggattacaggcacccgccaccatacccagctagtttttgtaattttagtagagacggggtttcaccatgttggccaggttggtcttgaactcctggcctcaaatgatctgcccgcctcagcctcccaaagtgctgggattatgggcatgagccactgcacccggccccattcattttttcaaatgagaaacctgggagttctttttgacctactccttccccttcccacctcttaaatctaatctatcagaaggttctggttctacctccaacatgtataatgg

SEQ ID NO: 95728 - DNA, 32423 bp, Homo sapiens
  misc_feature (1)...(32423): n = A,T,C or G
tgagggcatctcttcaaatgtttataagcctttcttttgtttttccacgaactgttttagttgttcactacagaaaaaaactatttaaaaacaaagcaagtttaccagtggagaaaggatagccactccatgaaagcgaataagtgagatactttcagactgagcagggagaaagctctctgtggatagtgatgcttcttgtattctggcaagacttttttcacagaacttctcatactcctccatcttcccacagtcacactacaagagagaaaaatgttatttttaatgtactgggaaaaacagatcttaattatttggcagattttgtagagcatgagagagtccctataattcacaattcctataactggtcctcccagaattgtcttactgatcaggagctaattcttgggtatggtaattcacctcaagaacctgtccaattaagatttactttatatattaaatatttctgaatattattgcatgtaaatcaatctttaaatgggattaatttagctaagaattcagtaaaaccttcttaaaggaaacaaagttctgtaaatctttactaacttcacattgtaaaacaggatattatattttctttaacaggacttatctacacaagaaaaactatatcatacaaaggtacaaacactgtagtaaaaaagcctacttaaatcaaagaatatttacttttaaaaattttctattttgaagttcagaggttactctcatatctttttttttttttttaaagagacagggtctcactatgttgcccaaactggattccagtgactattcacaggttcagtcacagtgcactatagtctcaaactctgagactcaagcaatcctcctgcctcaatttgcctatcttaacactatacttggactgcatgagcaccagccaactcagtcagaggtaaaaaagagcaaatcgattggctctgatattaattatattttattgttgaaaattggaaccatcaccaaactacttaaaacaatcccagtaatttcacagtttctgggaaattgtgattatgaaaatacaaggtaaccaggagggattaggcatcatattcattcatttagcaaacagtaaatgttgattgcttatttgcacagcattatgtgtggcactgtttcctttaaataagcaagggaaaataaaaagacattatcagaatcataaccagcaagggtatgaactatggaaacagaaaatagaatacaatcatgttcctttatgtcttcattttaaaataattagcttcttaacaaaaaaagagagggcagggaaattcaattcatgatgtgggatatgcaaagatgaaataggatatgtcctcggtaggcctcaaagtacttaaaaattcagtacaccaaagtatcagggacaaattatagtgcaatgagaaatgggaaaaaaaaaatagtcaaaattataatcaggttataaaaaaataagatataatgctattttttctaaatagtttaatcaataacaaaacttcttcctactattcaatcaattgtaattatttgtgttcaatctatgcaaagtaggaatctaatgacaaacaaatggttctctacagtgtgagtgagactattttacaagcttttatttattttaaaaaagcaaaagtaaaaacaataaaacaccttaaggcatagcctttttttaggtctaggtttcaactcacattatttcttaaccccatttctgctcaaatattttatttttttaatcatgccatgcattcagcaatacacagaatgtaaatagattatacaaataaagtaatatatcttctatggatactcaagcaaagcatgaaattcaattttagaagtgagggaaattattaaggaaatataatacttttatggccatagttttatttttctttcaacatcatagagctatgcctcattgtttcagaaagttattcacatcccttaaatagtacatatatgtcctatatcttgcagatgtatagtactatattattattacagcacaacacagcatatgacaacgcattactcattcaaatatgagtgctaatatggagattatacaaattactagatgatccttagagcatgactggatccttcttattcttcagtctcggcttggatatcccctcctcagagaaggcatccctgatgaccccatctaaatgaactctgcctctatcactatcacattaccctgctgtttcccaattttcatagcacttaccactatctgaaattatcgtgtttatttccttgatttttgtctgtcttcctccaccaaaatgtaagcgccataagtacaggtaccttttcagtcttgttcactgaatccccattacacagaacagtatcagcacacagcaggcacttgataaaagtattgaataaatgaataagaataataataagctcaaacaataatgtaaaccagaagaaaaaaagaaggcggactatacaccgaagctagcaaggaagagtggaatttagagaatggaaatttcaccatggctctagtcccagagaaactggtacctcttaaactgcaaaggtaaccatttaagaagtgagcagtctgtatcccatgattaagcaagaggacactatgcctttcacactacaattaccactgtcagcaaggttttattttaagggagccctgactacaaggctaccccagccacaaatctactgctctatatcttgccatcaggcatcactggtccacttccagtaataatttgtcagctacagcaggttcagacatgccgtcttctccatttataccacagagaaccactgacccttgtgcaaatgagcctctttgcaaaccccgtagactcatggtcctatctgctccttacccgtgctctgccagacatgtcactgaaaagagtggtaaaagtaacacagaacagatcctgctttttttttgcagaacctagtgtttctttgcccatcagttccgccaaagacgcaaacttcttgtaaaagcggtaaaggggaagatttcttattcagatgcgtactagctgcaagttcttggcaagccagttaccatccccacacctgtttcgtcctctgtaaaagagggatgatcacggtatccgtctcaaaggaatgttgtaagaattcaatgagctaatgcatgtagggcaattaacgtagtgcagaacacgcagaaagcaacaaataatggggactgcttttcttattaagaggataatgatgatgacgatttttagcagtagagtatgaattcctggagggcagcgacagtgcttggttccccgtaggtttcaaatgaaactgaaaaatatagaaaaggggacaacggcttcctcatttccctgtccctagacctctccccgtcaaatcaatctcgagatggctgccatttgcctaaactgggggtagggagcttggatcgtaaccagaatagaatcaaagggtgggaaccatctagcagctccaggggcaatcgattactttattatcctcaagtttatgccccagagtggcaaaggcgaagtaagcagcgctcctagggccttggttgtggaaacaggggctcataaatggccaatgcacaccccggggaagcctccctctccagcaccgtgggagggagaagaaaaacggcccaaacaatttgatcaccacgatggggttctccggctctggcccgagttttattcaccagggacggccccctgccctctccccagcgccccatgcccacctcctccagctcctccgatttaagactccaaaccgagggccctccaggcggggccagcatcggagcatcacctcagcgcccggtgctggctgcccccggggtcccgcctcccaacagccggcgcctttccagggggctcgaggcccgggagcccagcacagagcccgccctcagcttctcagggcgccaatttcgcctcgccagaccacctctcagcccggacccgtcaaggctcaagccccctcctcatgcacacacctgatcccccacggccccttcagctcctctcccctcgccacgggccttgtcaggaagcgaatggctcaaatggtactgacagagcgcagctcggtccgccgccgccttctcctcctcctccccgccatattacggatctcaggctgcaacgcgggctcctggcaaccgccgccgctgccaccccgactccacctctcagggccggcacttccggtggttgattcccgggctgttaaaaccgttgggccaccagaacactaccatccccgaggtgcattgcgcgcccgcgatggaggacgtaatgcttacggccagcacgctgcacgccgggaaacgtagtcttccttgcaagctagagactagaatttattaataaatttacttatttagtagaataggaacacccctcagggtctgaagccccctgaagtgttccttgaagttgccatttttttcttatctgtataaagataacccctttctatgcagccgttagaaaacatgtaacattcaccaaaatattttcttgtaggtaaaaacttgctgaacccaccgggcgtgatggcttacgcctataattccaacattttggaagccgaggcggaaggatcgcttgagcccaggagttcgagatcagcctgggcaacaaagggagacggcatctctacaaaaattttaaacgttagccgggtggggtggcgcgagcctgtggtcccagctactcgggaggctgaggtcggaagatcgcttgagcccaggaggtcgacgttgcagtgagccatgattgcaccactgcattccaacctgggcgatagagtgagactgtctgaaagaaaaaaaaaaaaaggctgaatcctagatgccaactggaaggcttaagacatctatccccttttgcaaatcagtgggaaaatgcactaaagsaaaaaaaggtaacagaaaaatccctgaatatttttgcaaagttctctacataaaaatgttaccagccctccaaaatatgtccaggggccccttttcactccctaactcggcttcatggtctatctctcttaccctccttccagtgcctgtttttgcatatgtaaaatgggggttttaaaagtgcctatcacaagggtggttgtgaggcacagttgaggtaactcytgtacagtgcctggtacaaaagcccttagcagaagtaagattagggggaggaggagtgaaaatgtcacaaatcactggggaggcctttatgtcagtccccaccctgccattaactgcttaattcacctatcctcagtttccgcatctatgaaataagggaatccttaaaaccccttccagttttataatccgattgtgccttctttgctaggctcttccagtcccccagaatctggaaaataaagtcgattgaaatcagtctcctgatagtaactgttaggctgtattgagaatgagataagcatataaagtgtttgctcgtcaagtacctgggacatggtaagtgctctgtaaacgttaggtgtacttgctaacttttatttcctcccacaagaatgtgaatcccataagagcaaaaaccctgtaggtcctgttcaactgtgtccggagcacctggaccggtatttggcacatcttgaattgaactgaactgaactgaattgaattgaattgatagtctaagcatcctgcctctccaggttccctggaattcagtttcctcaagggcagataaaggagtcactaaaatcccttccagtcctacagctttaggatggttcttatccctccttttctcgcctaggagtctgaacgcccaggttgaagttcagacctcggaaaaccctaacccaccttagatttggaacgtgagcctggggcctggggcctgggccctcccccgttgccatggagcggctccgcccactggcgctgcgaatcccgatccctgattggctgggcggccgactccctctctggatgtgtctgctgccgccattgtgcggcgctggtcccctcagagggttcctgctgctgccggtgccttggaccctccccctcgcttctcgttctactgccccaggagcccggcgggtccgggactcccgtccgtgccggtgcgggcgccggcatgtggctgtgggaggaccagggcggcctcctgggccctttctccttcctgctgctagtgctgctgctggtgacgcggagcccggtcaatgcstgcctcctcaccggcagcctcttcgttctactgcgcgtcttcagctttgagccggtgccctcttgcagggccctgcaggtgctcaagccccgggaccgcatttctgccatcgcccaccgtggcggcagccacgacgcgcccgagaacacgctggcggccattcggcaggtgagacccccacgttcgcgcccctcggtcctcccgagagctcggacttctacttttccttcccagggttccccgatcttctcaggacggccttcccacttcctcattcgtccacaaggcacactcccggcccttgatcgctcccagtgtctagggatctccggacttgaggttttatatttacagaagacagcagatatgtatatagtttctgtgcgcctgacgctaaggttacatacagccaggaacaaggtcaaaagtgtccctggtttacagagtrtacatcggaatgggggaggcaagccttaaacaagtaaacacataaatgagataactttaagagagtgaaaggtgcaatgaagaaatcgggggaactcgaaggaaagagktacgctattttatttagatggaatagtcaagagaaatcgtctccgaagaagcracatttgaacagaaaccggaattataaggagccaggcaggtgcagaaggtcctgagatgggaataatataggggtgttcaggtaacagaagaggcagtgtgtggcctgacttcaaggaagagaacaaagactggtgtgtgaatgaagtagaaaatgggtcaggtcaaataggttcttggtcagtaattgaggttagtctaaatagatcacccttcacaagacatacgtttgcttgtcttgtaaatcacttgagtcatttccttatcaccttttccccagacacacacattcgcactcgcacaaccctggcagctggactcacatcagtttctgccccctccttttcacaaggcactcctgaaacttttgatacctcccagctcttggcattctcctagcttcataataatgacagcttacagagagggcttttcagtggattaggcacttttgcatctgtgtaaatatatctgattctcttcttttttatttttctctctcttcttccttccttcttcttcttttttttttttttactttmcagagtctcactcttttacccaggctggagggcagtggtgcaatctccacgcactgcaacccctgcctcccgtgttcaagcgattctcgtgcctcagcctccggagtagctgggattacaggcgtgtgccaccacgcccagctaatttttgtatttttagtagagatggggttctgctatgttggccagactggtctcaaactcctggcctcaaagtgatccacccgcctcggcctcccaaggtactaggattacaggcatgagccatcatgcctggcctccctcatttcctttttttttctttttttttttctttttttttaaacgaagtctcactgtctcccaggctacagtgcatcggcgcaaccccagctcactgcaacctctgtatcccaggttcaagtgattctactgcctcaacctcccgagtagctgcgattacaggcatgagccaccgtgcccggccaagatttatacttttaaagctgcactctggcccatgtggagaatgtactgtgggtgtaatttcattcctttgccactgtttatagtagtgtatctgtttttggaatacactcaactcacatttatcaagtttttccttctatatctcatttataatctaccagaaattctagcactgtcagaaatgtatatatgtatgtatacattcgactttaccaataattttgtttatttatttatttatttttgagacagggtctctctctgtcacccaggtttgagtgcagtggggcgatctcaactcactgcaacttccacctcccaggttgaagcgattcttgtgcctcaggctcccaagtagctaagattacagatgtrctcctccactcccagctaatttttgttttttgtttttagtagagatggtgttttgccatgttggcaaggctggtctcaaactcctgacctcaagtgatccacctgcctcagtggattacagagtgctgggattacaggcaaagtgctgggatcacaggcatgagccactgcctggccagctttaccagtacttctatgttattccagtaattgagataaaaagatgaatccctggttctaattcacatattagtatatataggagatattgcaagttcagttccagacctgagtaaatagtcaataaagcaaatatagtaataaagggagtcacaaattttttggtttcccagtgcatataaaagttatgtttacactatattgtaatctattaagtattgkgtatgtatatatatatatatatatatatgcacatacacacacatatataggttttcatccatggttcctggctcataactctcagcccttgctacagtattttgttaggcatcctaggccttaggagcaggccttgggaaacagaatctctcctgccctcctttcacctaccccaaggcaggactggaatctttccctgtctttcaaattgtgagtcttaagaccctcctcagagagggaccccaccctataccctgggggaaggaatgctgacatcatgaagcttccataaaaacctaagaggaattaaaaaaataaaaactaaaataaacctaagaggacttgaagccarttggtcagaagttccataggccccagcttgctatttgtgtctggaggagggtggggtgcagtcttggggaccaagccctcaacctatgatctgacactatctccaggtagatagtgtcaaaattgagttggaggatacccagctggtgtccactacttattggtggggaaaaacccccacatttttggtcacagacgtcggggttgattgttgtgagagcagagggaaaatgtgatgtgtttttccaaaatagtcgtacatctgtatcacatgggaaaaggaaaagatttaaataaagcagaaaaatctccacccataaaggacgttattgataaatttgactatattacctttaaagatgtgtttaaaaggacataataaataacaatggctaacatttattgaaatcttaactattcactagcacagtgctctgtgttgtttatgggtacttaaataaaaaccggtaagggagtgacatgagaatgatatacaccaactttaagatggtaattacctctggagaggaaaggaggagaatgaaagggagaatttcagctgtatctgtagtgttgatagtaaaactgaagcggataagagtgcaacttctactgcatcctarcttgtgcagccctgggcaagtttcctactctttctttgtctcagttttcttatctgttaaatgagaatattaatagtacctgcttcagggttgtgaggatcaaataagttaatacatttaaagcacttagaagagtgcctggcaagtagaaaaggctcaataaataatagtttttgtttttgtttttgttttagtacagaaagagactgaggaaattaggtcaaaatattcacatatgttaaatcttttttactgtagatgtttgcaatagaccatgacttaaaatattttttaaaaaattaaaaatcttgatcatagctgggcacagtggctcacacctgtaatcccagcactttgggagactgaggcaggaggattgcttgatctcaggagttcgagaccagcctggacaacatggtgaaaccccatctctacaaaaaatacaaaaattagctgggcatggtggcacgtgccrgtagtcccggctacttgggagactgaggtgggaggatggcttgaacccaggaggcggaggttttagtgagccgagatcatgccactgcactctagcctgaacaacagagccagatcctgtctccaaaaaaaaaaaaaaagaaagaaaacttcatcgtaatgagcatttcacatctttattgtgatgaggaagccaaggaagcaaacattaaatagtgtgtctccagaggagcatggctcgtgtaatttaaggttcaaattctctttttagataaattctaatctacctcatcaagcttaacaacttatkggccaacagccagtgctgcttacataaacaaaatgtgatatgtcctagaagcaggcgtggtgtctttgtggtagagggtggaattaaaccaacaaaaacctgactcatttatgccaaagtagtgaaatatctgactaatcaacaaccgtagggtgatcatcagaactgctgtaccaacaaatagtgtaggtaaacagtggaattgtctaagtattcataagccattgatgacccatatagttaaacatccagagaaaacataagttcctgaagtctcctagtcttccactgtgaaagtaagaagagtgggaaaattaaagtttttaaggaatccatcagttaggaattgaagtaaggttatatacacagaaaacagaaacagatcaggattgctgtttggtgggggaagtggaaggaaaatgaatcaaaaaggacagctgtcttaggagccctgctggtcttttgggtggttagatgcaaaataatgtttgtggccatttgacagtaatattcttgatgtttttgttaaggcagctaagaatggagcaacaggcgtggagttggacattgagtttacttctgacgggattcctgtcttaatgcacgataacacagtagataggacgactgatgggactgggcgattgtgtgatttgacatttgaacaaattaggaagctgaatcctgcagcaaaccacagactcaggtaagtagtttattgtcacttaaacagatcttttagcttttattggaaatgacagacactggtgccttctaattacatctgccccaggagagttgtcttgttttgttttgaactgtacgtaggtcttgtaagtaatgagcaagtgccaggaacaacagaaatttggcattatgtttttaatctttcccactgaggctaaatttggcttcagaattattstcaagataatactgtctagtcatagaatcatgaggctgaaagtcattgcttggcaatcttcttgccttcaggtgtaccaagaagcaaattatacattcattaaaagcttcaagtaacattataatatcacattttaacttaacccatttaattcttctgatcctcataacaaacttctgaggaatcacagaattgtaggaatagagagtatcctagaaatcatctagaatagcactttgcagtagaactttctgcaatgatggaaatattttatatctgcactgtgtaatatggtaggtacttgtggctattgagcacttgatatgtggctagtgacacraggaagtgaatttttaatttaaatgtaaatttaaactgaaatagccatgtgtggctaccatataggatactacagatctagatcaatcttgcctttagatataatcccagaaaagttaaattatttactcaagggcaaataactagttcataaagaagccaaaactagaatctatcccaagttttagtccaaatcatgctgtttttagctgcccccaatgtctttcaaccctgtaagagcaaaagttctttcagtgtctaatttaattccttcctggtagagtgtaaacgtagcttccaaagtatatacactagagctaatcttacaagatgttctgcaaaaacagggttcaagtaagatcaaacagtgtattctgaatacttctgttgtggataaacagtccacatcagctgattcttacttgtaacttagcttttctcaaacttacatgatcacagaacctacatcctcttccccacttacagcggtaaacacccttggaattggtatgctgagtaatatactgtactttggaatgtggttatttaaatccctctctgcttgtcatctttgcagtactgaaaagggtgtgctcactggttattcatgtaatatcaattatccagacaatgatcgattctcttggaaaattaagtatttgacccaacagttaagttatactttttcctaaaagatgatcyagacctgttttcctaggatctgaaaaacattagtctgccgaaggaagtcatactgtaggcaggaaagaatattggtaacacttgagaattatgagtccaagttgctagaattgttcttgagtgtcatcagataytgtattgctctgcttatgcaagggaaaggctggtttgaatattataatgacattgcagctaataaaatgtcaggttcaaagttaatacttaaagcaaaaatgtttagggtcatcattacccttaaaaatcctttaagggagcactgagtccatttctctggaatttgtgcatcctaggraaaaaaattgtgattttcaaaaaatcccttaagaagacagcaaaggcaacatattatctcagtgtctttaacacaaccagtctttgctccactattggaacagagtgtgttctatgattgaaaactaaatgaagtaattggcttgtgtttacggattatgttgtgggaaaaaatagatattttctctagaattatgctcagtgtgatgagatgcttgtcctgagaggaggataaggaggaaactaagatcagccaaaggaataacaaattcaggtctcccatctttyactctcagggaatagaaattgattagaatggctgggataattgcctgtaatgtttaaattatccttatcttttttttttttttttttttgagttggagtttcactcttgttgcccagtttggagtgcaatggcatgatcttggctcactgcaacctccacctcccgggttcaagtgattctcctgcctcagcctccagaatgctgggattacaggcacatgccaccacacccagctaatttttgcatttttagtagaaacgrggtttcgccatgttggccaggctggtctcgaactcctgacctcaggtgatctgcctgcctcagcttcccaaagtgctgaatttacaggcatgagcccactgtacctggcctatccttacccttttttaaaagcatgatcttacagttgaaataatgcagttgaattagcattaagttaaataataattttattatgagagaaaagctaatttcttttgtatcaagcacttagttttcattttctttatcagaaaattatgtcttagaacattatttattttaaacagttgcacttaaataaatacacaatacagttaacagatttatgtattcctaagaattcctcctgcatagcattctattagggaaattacaatctgaaaattmagtctttgagttttccaaaggtggcatatactctgccctttgggaagtagggttattaataatgttattaattcaatagaaattcagtgatttcttaaaaattaaatgatttttgttgttgttgctggtctttggtcaagaatatctgtatttgaacacatggaggttcctgaatgatggagcactcagaaagggcatggaagctctatgcccctttccccatacctcaccctacgcatgtcttcatctgtatgctgtgtaacataytttataataaacctgtaaacatgtttgagttccgcaagccactctaacaaattaattgaacccaaggaggaggaggtgggaaccccaatttatagctagtgtcagaagcacagaattaccagaaaacaaatcaaaacaaaacaaaacaaaaaacagaaaaataacatccattatacaatataagaaaccaaagaccatcaatctctaatctctgtgctcaggtgtctgtgtgcttcaattcttctcatctacgagtcttgggttttcaatgctcacttgtcaccaggatatgaattaaaaatgtcttgggcaccaccatgtggtccagttgtcttaacctttctaaaagtgcttgtgcaaaccatttacttgttgcttcttacacaattacagcccaacctacttgtgtttaaaagcaaccacagcatgtttgaaagtcttatgcaataaaagggaagtttatgattacatttagtctgtacttactggatactttcagttttatcagttccaagtacagcaaactctggataatatggttaattacttcctccatgattctttcgaccttcatatcaattttgctaaatatggaatgattgactagccagagcaatcaggaaagagaaagaaataaaaggcatccaaattggaaaaagaggaagtcagattgtacctctttgccgacaacatgattttgtatgtagaaaaacctaaagacttcaccaaaaaactgttaaaactgataaacaaatttagtaaaattgcaggatataaaatcaacgtacagaaatcagtagcatgtctatacgtaaataatgaactagctgtaaaagaaatcaagaaagtaatcccatttacatagctaccaaaaaaaaaaataacaaaatacctaggaataaatataaccaaagaggtgaaagagctcttacaaggaaaactacaaaacactgatgagaaaacttaagaggacacaaatggaaagacatcccatgctcatggatcagaagaattaatattcctaaagtgaccattctactcaaaataatttacaattcagtgcaatccctatcaaaatatcaaagacattcttcagagaaatagaaaagcaacaatcctaaaattcatatggaaccgtaaagaagcccaaatagctaaagcaatactgaacaaaaaggacaaagctggacatatcacactacctcatttcaagatatactacaaagccacagtaaccaaaacagcatggtattggtataaatactgacacacacacacacacacacacacacacacacacacacacaaaacagatacatagaccagtggaatacaatagagaaccaagaaataaatccatatatttacagccaactgattttccatgaaggcaccaagaacattacagtgggggaaaggaactctcttcaataactggtactgggtaaactggatatccatatgcaggataatgaaactagacccctatctctcactatatttaaaaaatcaacacaaaatggattaaaagtttaaatttaagaccagaaactataaaactactagaagaaaacacaggggaaaagctctgggacattgatctaggcaaagattttatggctaagacctcaaaagcacaggcaacaaaaacaggcaaatgtgactatattaaactaaaaagcttctgcacagcaaaggaaataatcaacagagtaaaaagaaaacctgttgaataggagaaaatatttgcaaactattcaacagacaagtaactaatatccagaatatacaaggaacttaacagcaaaaacaataataatcccattaaaaacatctattcaaatcctaatttgaataaacatttttcaaaagaggacacacaaatggccaacaggcatatgaaaaaacaccacaaattattagggaaatgcaaatcaaaaccccaatgaagtaccatcttatctagttagaatggccattatttaaaagatttttaaaataacagatgctggcgaggatacagagcaaaaggaactcttatattctgttggtgggaatgtaaattagtacagccattatggaaaacagtatggaggtttctcaaaaaactaaaaatatagaactaccatacaatccagtaatcccactagttggtatctatccaaaagaaaggaaactagtgtatcaaaggcatacttgcacccccatgtttattgcaacactattcacaatagccaagatacagaatcaacctaagkgttcatcagtggatgaatggataaactgtggtaaatatactcaatggaatactatgtagttagccataaaaaaggatgatatcctgtcatttacagcaacatggatggaactgaaggtattatgttaaatgaaataagataagccaggcacagaaaggcaaatattacatgttgtcactcatatatgggagctaaaaaagttgatctcatggaggtagagaggagaatgatagttaccagaggctgggaagggtttggggttgggggaagaggagaataaggagaatttggttaatgagtacaaacatacagttcgatagaaggtataaattctagtgttcaataacatagtaaagtgattatagttaacaatctgttgtatatttcaaaatagctaggagatttagatgttcctaacacaaagaaatgataaatatttggggtgatggacatcctaaataccctgattttatcattatacattatgcgcatatcacaaaaatatgtctaagtgtatagcaataaaaatgtggaaaaaagaatatctataatttggttcaaattattacagtaggacaggcgcagtggctcacacctgtaatcctagcactttgggaggccaaggcaggtagatcacttgaggtcaggagttcaagaccagcctggccaccatggtgaaaccccgcctctactaaaaacacaaaaaattagccaggcgtggtgtcacacgcctgtagtcctagctacttgggaggctggggcgggagaattgcttgaacctgggagttggtagttccagtgagctgagattgcaccactgcactccaggctgggcaacagagcaagactccgtctcaaaaaaaaaaaaaaaaatcttaaagtaaagtatctttggactttgctacggtcgaaaaaaggaagttggagaaaacactctttccttttgattgagagacatatgcaaaatgtttgttgcaatacagtttatctgtttctcttttttcctacaacgtattttctcttctcttacaggaatgatttccctgatgaaaagatccctaccctaagggaagctgttgcagagtgcctaaaccataacctcacaatcttctttgatgtcaaaggccatgcacacaaggtacagtttaaattgtggacttcactttgttaaaaagacatcttatttcattgacggtcntttccgaagttacatatattttgttatttattctttttaaaacttatttttataaattgtatttgtttaatggaagtgtacaatgcaggaatctatatcatttaaggaaacagtgcattatggaactttttaaccttttatggaaactttacaaaaccagcayaaaatggaagagtcaagtttctattatttacataaagcatttacaaaagatattaagtaaacagtaaaaaaggcatttctagaaaaaaaccactgtagtaaccttgagttacttgaaaaaaaggaattccgaagttgtacacaagaccarttttatctagcttaaaagttaagggccttatatgkacaactatggactgcatttaaagagaattcctatattaaaagcttctaatagttaacagaacatataccttttacatagatktatccctttgtataatttatatcccttatgtatagttttttattcattgattttagcagttatacttttatcagaaaatcatttattttcttcaaatgtatttgacattcctagataaaattttgcttaaattttagggcctgcacttacactcataagaacatattattacagtgaaaatcagtgggaagatatgattctgattacatttgttctcttataaccagcttttcaagtgcaagtacttttttccccatttgggcaacttgagtatttttcccctagcaatattaataatcggtaagggccatctactggttgagaattctgatgatgccaatttttttttttaattaatcccatgatatcattgaaaccagttgttaaaacccaaaatgggccgggtgcggtggctcacacctgtaatcccagcactttgggagtggatcacctgaggtcaggagttcgagaccagcgtggccaacatggcgaaacccctgtctccactaaaaatacaaaaattagctggacttggtggcgggcacctgtaatcccagctactcgggaggctgaggcaggagaatcgcttgaaccggggagacagaggttgcactgagccgagattgcgccagtagtactccagcctgggtgacagagcgagactccgtctcaaaaaaaaaaaaaaaacctgaaatgtggagcctaagtatacactctaattttattaacagttaattcctatttttgaagaaggaagataatggtaactaatttattattctagtaaaccgatagttgtatacgtctaggttttccaattggtctgcgttagaatcacctgtacctattttaaaatataaattcctgggccattctccctagggaagagattctgaaaatgtctagggtgggctcaaggaacatgtatttttaatgagcacctcaggtgctcattgttgatgttgcagcccacatttgggaaccctgataggtcctacatttcacccatggtatactgacttttatgcttattctcttagattttttgagacagagtctcactctgtcacctaggctggagtgcattggcgcgatctcggctcaatgcaacctctgcctccggggttcaagcaattctcctgcctcagcctcccaagcagctgagattagaggcatgtgccatcacacccggctaatttttgtatatttagtagagatggggttttgccatgttggccaggctggtctcaaactcctggcctcgagtgatccgcccaccttggcctcccaaagtgctgggattacaggtgtgagccaccacgcctggcttctcttagaatactttttaaaaagaagtagacatttaaaaaagaaaatctagctatttgagtcttctgaatgggtgctcatgggtgttcagccaagactgggtagaacatagtgacctaattcaccaagatggtagtagaaaggcacaagtgtaggcaacaaagtggagctagtagagcacagtggccaaaatcatgggcttgggactccaacagtccttgactgagctcttactacagggtaaccttaactttgatgagcttcagtttcttcatgggtaaaatggggtactaaaagcagttaccacataaggttgttgtgagaattaaataatgtaaatgctaagagtttacagtgcatgtctttgttcaaacagaaaaaaaaatgctttctatagcttgccttcagttgcattagcgaagaggaggcatgacatggataatttgtgtccttttttattttggtgggggaatgcattttgctcatcatatttggttaggggtatgtgtaacattccaaaaattagcagtgtttcacaaattatgcagcagcagcattgcgtcccacatggctggtgactttcttgttgttagctgctattgatgtcacttcactaggggttaccaaataatacttaaattctatcatgtcttcttcatttcgtagctagactactataaaaagaaacttctgttcaccttgggaagaattgggagccccttaactcttcccagtccctcctacccttgccccattacttctccctccatattggtgatgggtaatgcgtcctctcagtcccctggactgagaaatctaycctctgtagttcccagactggctggctcatgtttcatttagaaaaggcacagagtgatagagctgtgggtatgaaaggacttttcatagtggctaaactagggtataaggcaaggaaaattttgcctctggcctcatctgacctacggcttaccacacttttcaaaagtattccaaaaggggtgaggccctcagagggagtaaagcagcagtactccaccttcttccttgtttgctgctggtgtgagtttaaaatgcatcccagtggataatagactctaccaatactttcagtacctccatttctagtaaacttctgttttattccatagggttgtacttaatatgtgatagttattggctggggctatctatcacattttaatcaattttaaatatatgaatctctttattttacaggctactgaggctctaaagaaaatgtatatggaatttcctcaactgtataataatagtgtggtctgttctttcttgccagaagttatctacaaggtaacattcgggatttttcttgtacatattaggtgagctggtgtagataattgcaatgggctgygtaagcacaggatagatgcctattaaattgaactgcatcagggtcacagttgagaagctcctcttttaaattaaccagagaaattccagaaggggaatgtactcataccccttacagaatgccattattcctcttttgccccttcttttatgttgtttataggctcactcagattactgtagtaaaattctcacaacagaaaagaattatgtagcccctacttctcaccaactaacagcagaacataccttcataaaataaattcttaattatggagaatctaaaacatgcataaaataaagtagtagtgtaccccccctttaactgtgatccagctcatttcacccataaccccattgatcctccccagtgttattttgaagcaaatcttattccatccataaaattgcattaagaatctttaaaaagtgatgccattttatttatttatttatttatttatttatttattttaaaagacgggttctccctcagtttcccaggctggagtgcagtggtgtgatcacagctcactgcactcttgaccttccaggctcaaatgatcctcctgcctcagccttccaagtagctgggaccacaggcgcacgtcaccacgcccagctaattttttatttttattttttgtagagacagggtctccctgtattacccaggcagttctccaactcctaagctcaagcaatccttccacctcagcctctcaaagtgctgggattacaggcatgagccacagtaaccagcctagtgatgcctttttaaaaacatagccacaatgccattgtcccatctaaaaattattaacaataaattattcatatcatcaaatatccagtgtataaattttgacttgtctcggaaatgtcataaatggttgtttttcataaattgctcattcgaataggacccaagtaagatcggcgtgttacaatcgtaaatctttttttgtttgtttttgagacggagtcttgctctgtcgcccagtggtatgatctcrgctcatcgcaacctctgcctcccrggttcaagcaattctcttgcctcagcctcctgagtagctgggattacaagcacacaccaccatgcctggctaattttttttgtattttagtagagacggggttttgccatgttggccaggctggtctcgagctcctgacctcaggtgatctgcctgcctcggcctcccaaaatgattacaggtgtgagccactatgccctgccggcaactgtaaatcttaaaacttgcaggttctgtctctctctctctctgttttttttgtttgtttgttttggggggggtccttgttttgtatttactgaagaaaccggattattgttttgtagagtttacccaagtccaaattttgctgattatgccatgatatggcttaatatttttttctctttattttctataaactggtagcgagagctggaagcttgccttgatgaggttagggttggttattcttggcaagataactctagagatgagggtgtttttccgtcaggaggcacttgacatctggttgactcctgttgtttttggctgctattgatgctcattggccagatctgtccattttctagggagctacaaaatgctgatattttaattctattacttcttgcattagctgaaatagatctttaaaaagaaacttttcctcctctactatttagttaccaaataggcagaataaatgctttatctttccttttatttaccagtttccagaataacaagctggttccgtagcattctttaccagtgaccaacagagcatacattgaaaatttttacagtgaggatagagcctatcaatagaagctgtcatggagttgaatagggtcatggggcttgcagacatttggaacagtgtttcccaaacttccttgaccacagagtcctttaaaacgtataagacattcccccagaggagcacaagagcagagactaaaggaactccatccacatctctccatttctctgttgtcctctcccattctctygtcacaatcccttctctcccttcccacctcacttccccatccccctcctcacccctacaactcttcagccatttgctctggaaagggtcaaaactaaacagcccatcttgaactgaccttggttccctcctcattgagttctaattaattatctctggccaggatttaagtcaatagccaattaaaagtttattctcrtgacattattaaaatttgatcctgaagttttaatttttccattttaaagataggattgcagtttttaaggactgggaaaaaaaagttctcatatgtgctgcatattagtgctttacattcttcacattattttctcaaagggtttatgattgagaacttatttagtagataccggggcagggtaccaaccatgaccacctcatctgattgagcacattggctaaatctaaactaataagtattcaactttacatatgatcattattttacttccccaaattcctttgcagatgagacaaacagatcrggatgtaataacagcattaactcacagaccttggagcctaagccatacaggagatgggaaaccacgctatgatactttctggaaacattttatatttgttatgatggacattttgctcgattggagcatgcataatatcttgtggtacctgtgtggaatttcagctttcctcatgcaaaaggattttgtatccccgtaagttggaaggttttttattttacccagacagacatcctgaatgctcttatttgaaaggaaggattaacagagtagacaacctgaattggttctgacctgcaaagcttaccatacctctaaattggattaccaatttcgcttcttaggtgggaagagttcaggcatatttcactgttttcagaccgagtcgatcacatattttcggttttttagtgtattttgaagaaaaaaaatgaacctgtgacactatgctgagcaagggattttatttctgtgactggtttttttgaaagccaacacaggatcctgggcagaaccacagtgaagacatcctgtgggcaccagcctccccactaccgtcttatgttataggcactcccccacctctccccataaaatttccatttcctaacctgctagcgatctcggaatcatttctttggcaattctgtatctgtatatttcagctaattagagttgtaggtctagtattatttcagacatacatgattcagttcaataaatatttggtaagtgcctatactattgcaaggttccatgttgagaagctgaagatgcagtgggtaaagaatcaaagccatgatctctgccctcgtgacgtttatagccaagtgggagagtgagagatgctaatcaaataaaaatccaatcaatataaagttaaaactaagatacaggctatgtcagagaaaactgtgcatgggctataatctaatctggtctgggttgtcagaaacagcatccccaaggaagtgacagttaagctaagatctgaagggtgagtgggaattgggaggaatccagatcagagagaaaaatacatgtaatgtgctctggcaggaaggaacatggttctttccaggaagtgaaagaaaattaatattctttcaattaatttaaaattaatcagcacagaaaagaaagggggaatgtggtgtgagatgaagccaaggagacaggtcggggccaggtcaggcacaccttcagtggctgtgccaaggacatttgggggtggcgatcattagtgagctactgaaatgttttaagctgggacagtgtagaggaggttcatggcatcytgggttttggaacagtccctctgatcacagtgcagaggccagttaggaggcattctctgggcaccattggtatgcagtgaacaccatacttagtggccattatggattcctgagacagctgcttattattctaacaggattggctttcctctttccccagggcctacttgaagaagtggtcagctaaaggaatccaggttgttggttggactgttaatacctttgatgaaaagagttactacgaatcccatcttggttccagctatatcactgacagcatggtagaagactgcraacctcacttctagactttcacggtgggacgaaacgggttcagaaactgccaggggcctcatacagggatatcaaaataccctttgtgctagcccaggccctggggaatcaggtgactcacacaaatgcaatagttggtcactgcatttttacctgaaccaaagctaaacccggtgttgccaccatgcaccatggcatgccagagttcaacactgttgctcttgaaaatctgggtctgaaaaaacgcacaagagcccctgccctgccctagctgaggcacacagggagacccagtgaggataagcacagattgaattgtacartttgcagatgcagatgtaaatgcatgggacatgcatgataactcagagttgacattttaaaacttgccacacttatttcaaatatttgtactcagctatgttaacatgtactgtagacatcaaacttgtggccatactaataaaattattaaaaggagcactaaaggaaaactgtgtgccaagcatcatatcctaaggcatacggaatttggggaagccaccatgcaatccagtgaggcttcagtgtacagcaaccaaaatggtagggaggtcttgaagccaatgagggatttatagcatcttgaatagagagctgcaaaccaccagggggcagagttgcayttttccaggctttttaggaagctctgcaacagatgtgatctgatcataggcaattagaactggaagaaacttccaaaaatatctaggtttgtcctcattttacaaatgaggaaactaaactctgtggaagggaaggggttgcctcaaaagtcacagcttagctgggcacagtggctcatgccgataatcccagcaattcagaaagctgaggcaggaggattacttgaggccagactgggcaatatrgcaagaccccatctctaaaaaattaggcatggtggtgcatgcctgtattcccagctrctcrggaggttgaggtgggaggatcacttgagcccagaagttcaaggctgcaatgagccatgattacaccacggcactacaaccttggtggcacagtgagaacctgactcttaaaaaaaaaaaaaaaaaaaaaaaaaaaaagataactagaacttctagaacatcttgtttacagttagccagaaactatacaagtggtttaacatgcattatcttactcaatccatacaaaagtcttatggaggtgttagcactctttctactgatgaagaactgaggtacttcataaaaccacttacccaaggtgtcttgagtctggtacaactggcattcaaatctaggtcagtctgcccccagagccactacccttacccctcactgaatctgcctttatattgttgagcccatgaccccaaactgctctttccaatttgaacttccagggattttattgtgaacttacatagcaacattaaaatgaagttgaattgtttttaatggcaaygccgtctgtctcctctagcttaccgcttctcacctttcaaccccatctgtggcctttgtccaggcccacagcttagccatggcttccctcctgcatccctgcygtgggttgctggcctcacacttgcagcagctggacagtgattttagaaggccaccagtccccrtagctatgtgacaatgagaagcaaacttttttgtgacagattgtattggcataggcatgatagatggggattggtacgttttgaatcagcatttgcaaaaaaattgtcttgaattttaaaataaacaacaaagatttgttcattgagtgcaacaaatgtctaaactgcatgtacttccgtgccatgttatgactagagtgaaagaaggaggaaaaagtgaccaaagaagatacatcaggccaggcatgatggctcatacctgtaatcccagcactttgggagctgaggtgggtggatcacttgaggccaggagtttgagaccagcctggccatgatggggaaaccccrtctctactaaaaatacaaacattagttgggcatggtggcacatgcctgtaatcccagctattcaggaggctgaagcaaggagaattgcttgaacccaggagtcagaggttgcagtgagccaagattgtaccactgcactccagcctaggccagagagcaagactctgtctcaaaaaaaaaaaaaaaaaaaaaaagatacctctgttcaacactagctgttcaacaggctgttcaacactagcctgggcaacatagtgagaccccatctctacaaaaaatttacaaataggggctgagatgggaggatcactggagcctagcaggttgaggctgcagtgagctaggatcgtgccactgcactacagcctaggggacagagtttgactccaatctttaaaaatttcataataataataatatccctttrtgttgtgggaagatctctggagagccatgagatctctgtctcttgatctttatcccaaatccattttacctttgattcagccaggccaaattaaggatttaggtcctatgctaagatggtcagggcctcaaaaggtggagaatttgaatgatgaaataaggtattaataactactattaagcacttccttggaaggcttagtatagggttaataacaggatttggaatcagagaaagccaagtctgccttcctattcagcaacttaccagctatatgaccttgggtaagttactgaatttatctgtaaaataggggtagtattcttgcggtggtagtgattaaatgaaagagtgcatgtaaaatccttgctaattaacatttattgactgcctaccatgtcctagactgtttaaaatgctttccatgtacagtagtttctttattttttgagacagtctcactctgtcacccaggctgaagcgcagtggtgcgatttcagctcactgcaacctctgcctcctgggtccaagcaattctcctgcctcagcctcctgagtagctgggattacaggcgcttgccaccacgcccggctaatttttgtatttttagtagagataaggtcttaccatgttggctgggctggtctcgaactcctgacctcaggtgatccgcccacctcagcctcccaaagtgcggggattacaggcatgagccactatccactgcatgtacacctccaggagaagcagggctgcactgaagtggagacaagggatggaggtgaagggagaagcattctagatggaagcacttagcatctggtgaatgagcagaagtgatgctttcagagagagttcagatttcattgtagaagcccaagcagcagccgggcacggtggctcacgcctgtaatcccaacactttgggaggctgaagcgagcggatcatctgaggtcaggagttcaacaccagcccagccaacatggtgaaaccccgtctctactaaaaatacaaaaattagccggacctggtggcacgctcccgtaatcgcagctactcgggaggctgaggcaggagaatcacttgaacccaggagggggaggttgcagtgagctgagattgtaccactgcactccagcctgggagacagagggaggctccaactccatctcaaaaaaaagcaaagaaaaaagcacaaacagcactaagatgaccccaaggggaataaaatcacttccaacatcacttccatgggttgcctgcactgaccccacagacaagtctcccttagtccctgtgcttcttcagagcatctactacaactgtaattaattattgcttaagaattaaattcatgtctaaacctgctagacaggcagcaccatgaattgttcaccatcttgctcaccactatttggtccatatttgttgaatgaatggatggatgaacactacatacaactgttaccaaagatgacaccaaaagaaattaattcctccgatgaagtgaattaatgaaaaaaataagtgaatgaaaaagtgcgtggtcaagtgcagtggcgtgtgcctgtagtcccagctacttggcaggctgaagtgggaggactgcttgacctaggagtttgagtcaaagctggcaacacagcccagccttatctcttaaaaataaaaaaaaaagggaataaatgacagcactggttgggtgcttgtgtttcgaatgtatcttaactgctttctaaattcagttccaattaggttttatgcgagtgattacttaagaggaggctcctctctcctgagtaactgcacctttctgctggacctttcagtgttaagaacagccacgtggcttgtgaatcatttggcaaacctgcaaaaacattatacacacacgtattcattacatatgtgcacacacacacacattccacacatcaccaccagtttcatatttggtttgaataagacttttaatttactttatttatttatttatttatttttttgaggcagagtctcactgttgcccaggctggaatgcagtggtacaatctcgcctcactgcaacctctgcctcccaggttcaagcaattctcctgcctcagcctcccgagtagctgggattataggcatgtaccaccacgcccagctagtttttttatttttagtagagacggggtttcaccatgttggccaggctggtcttgaactcctgacattaagtgatccgcttgcctcagcctcccaaagtgccgggattacaggcataagccatcgcacccagctaatttcttttcttttcttttttcttattcagtctccgtagagactgtcaaaaattgccagcgctgattatatttcaagtcatcacggtggggtattgggaaaatttccaattagcaataatcgcgtctcggataaatctcattggctacggtactgccactgtgcaaagctagcttgacgtaggactttgatggtcatgtataacacctcacaggggcagaacctcctccatccccgactccaaagactcatgtaatcagtacgcaagaaagttcagagatgagacctctggttgtattccacctttgggacatgggggatgtctttagttcaaagtcacaaataaatgcaggttctacaattcagaggcttcatatccctgctggagtattacatgtttattcaggatggaccacttttcttagcaacagtttctaaacctttgccaggtctgggaagtctggcaggagagatttctaagaaccaatcattcctgcacacacttcttgaagataatatacattattccctagttatctcttcctaggtttttgtaggctcatttcaatattacaacaatctttattggaaaaccccaagtattttgtcttgaaaaatcagcaatccaggtattaaaaatagcatggaatgcccaattttactttgataattacatggtagtcagtttccgctcctggctaaagccttggattttcttctgggcagttcctaaaggcacaggtggcatggaagaaatcattccattttcgtctcctccccttatttgattggtgtctggttaccaaaagagtcatcaggcccttggattaccttcttgaactgatcttctagatcgcaagtctaggtttgacacaggaaagagaagttaacgcaggcacactctgccccatctctacaagggaaagaccagcttgccttcaagattccatagcttctcatgccttctttgcctcttccttttagtttctataatccttcccttgaactcccatcactggaagtcatcagtaaatgctatcccccaaaaataaatgggtttgcttgtttgtttcctgcccagaattcgctctcctggcatcagccccagattttctttaggaagtcacccttccctactcttggtccctatggtcttcatggttgcaccacctgcatctacagatgaaatcatgtgatcaagggaactgccacatttttgcacccacaacaattggttcatagacggggacatcacccagtcagatcctatgaaacaccgtgagaatcctgggtccctcagtctttcccaccagactgactctgagaagatataagaagttgataaagctgtcttgcacttattaggcagagtctattgcaaaaggaactaacatgggtaagaacggaactgaaagaaaccgggttctggtgacactgtgagttcctgcgttaggcaaggcctaaagcaagaattattcttggaatttygtttaagccagtttggatccaatttgcaactgaaaaagtaatggacacatgagcaattcttacacttgtcttaggatatttcaccagaaataaattagtgtcttattctgtcccagtttaattactcaccaagactgccatcatgttcccccaaatgcaaaaagccttgttgctgaaaaagaaaaaaacaagcagccacgtcacggaggaagaatgcagattctgggtcttgtcacatatttggcacaatttgtgagcccctcaccattttatagaagttaagggatgagagattaaggccaagtctccgccatagaaatattgaacatgttttgttttttagggagagtgattccattcattcattccacagatactctttttttttttttttttttttttgacagagtcttgctttatctcctagactggagtggaatggcatgatctcggctcactgcaacctccgcctctcgggttccagcgattttcccgcctcagcctctggagtagctgggattataggtgcctgccaccacgcccagctaattttttttttttatttttagtagagacagggtttcaccatgttggtcaggccggtctcaaactcctgacctcaagtgatctgtccacctcggcctcccaaagtgctgggattacaggcgtgagccaccgcacctggccgttccacagatattcactgagcattcatattatgccaggtaataaattaggacgtggggtgacaagtgcacagacgtggtcctcaccttcagagaatctacctttaggcctctagatcccttacctaaattgtgctgacagtataaatttgcacagatggtaaattacttgtcagtcacttctgtcaagatcacaatttccaacataagtggtatttgcgttaaggtggatttactgttcatctgtattttcaggacactcaggaagcaagcaaggctttggaattagagcagggtttcatgtatctttatattctcttggtaagaatgaaattgattaaatctttttaagggaatgatatagcaatatctattaacattgtcatgtacgtgctttgtggcagaaatattcacaaaaaataactttttaatttttttttttttttgacacggagtcttgcactgttgcccaggctggagtgcaatggtgtgaccttggctcactgcaatctccacctcctgggtccaagtgatttcctgtgcttcagcctcccaagtagctgggattacagatgtgcaccacaacacccagctaagttttcttgtttgtttgtttttgttttttatatttttactagagatgggtttcaccatgtttgctgggctggtctcgaacccctgacctcaagtgataagcccgcctcggcctcccaaagtgctggggatcacaggagggagccactgtgcccagggtaattttttttagagagagggtcttgttctgtctcccaagctggagtgcggtgatgggatcatagctcactgtagcctcaaactcctgggtttgagcagtcctctcacctcagcttcctgagtagctgaggctacagttgcatgccaccgtgcctaattattaar
